United States Patent Application Publication US 2023/0087228 A1 - sequence listing, part 6

SEQ ID NO: 542 - DNA, 36552 bp, Artificial Sequence
  Synthetic Oligonucleotide
ggggaagactagccgcgcccaaggccgtatggaatcattgtcggttcacccccacatgcgtggggaagaccaatacacaatgaaatacaagaaatttacaaacggttcacccccacatgcgtggggaagacttttccaatcggtgaagaaatttggcttttaccggttcacccccacatgcgtggggaagacggagcaaacatgctgacaccgtatccaacggacggttcacccccacatgcgtggggaagactcttaatttacagcagaaaacatagtaaacaagcggccacttggacaaatggtcatgccaacccaactcatgaagcttctggttgcccgcctttagcccgaagaagcgtcaccaaggctaaaccctcgcgttcgatcagcatccgccttgccgaaccatattgccggaactggaagccctggggcgtcgggcttgaccagatttgcgccacatagcccagaggcggcctttcggtcaccttcgcccaaagctcatccctcaccctccggctgcaatggcccaggaaaactcccggcttgatttccatcagccagcgagacagctttcccctcaagctcgtcgggattttctccgagatcatcagcagcatcgagcacctccgcgatatccggcaatatgcgcctcatcaacttggcctggtgaaaagccacacggcaggccaatcgtgtttcccgctcaagcccgggcccgtccttggcggccatcgtgaatgccatcggtaccgtcaattccgacttgtacaagtccgcgatgtcgtaaacgaagctcagcattttccccacatggatgaacccgaggccggcggaatatccggctccgacgatcgcggcatggcacaggccgtaaaggcacgcgttcgccgccgaaaggcaacgattgacagcgttggccttgaaccagtcatcctggtcgtaggtccgcccgtcccatggaactcccgttttcctgctccattcctcgtagcaaacgcggacccggtatccttccatgccccgcaactgttccattgtcttggcggaaacatcctgtcccgggaatcgcttggcatacatccggcgggcgacctgcatccgtgtctcctcccgactcaccagcatcgcctggttgatcagccgccgcgcgctgaatgtcgcgcccgtggaatgggcgtaaagcctcacgccctgctcgccaacccacgccaccatgcaggcgttgtcggccaggatcctcatcgcggcgtgggtgacggaggtgcccggacccagcttcaggagcgccaactggtcgatcggcaccggggtctcgccatcggcatcgcggaataccagcgccgaggcggtgcaatccagcttgccatgttcgaggtaaagatgtgaccagcggtcggaaaaccgcggcagatcgtgcaggcggcgcatcagtgtgaccctttgtcgcgggatggaacgcccatcgaatcgctcacgaggcatatcccgaacaaatgaggttttacaagtgaattcggcagtgatgtggccaaaaagacggggccttcccgtcggattcgcggaaatggcgccaaaacgaggtgttgtctttgcattttaaccagataaaaatgcaaagaatcaaggttcagggaaaggcgcataacgggcggttcgaacatgggttccgtcgtattggataattccgacccggcacgatggaacacgctgtcatcaccctggttggaagcgctggatagccgcggcgtcaacatccggatctcgccgctcgaggcgctcgccaattcggcggacttgtgccaacttgccttttccaaccctctcgaccttttcgcggcccacaggtttttgctgtcgctcctgtactggaaggcgggagccgctaacggcacccgggcgctgcgcgagcggttggtttcgggaaccatgccccagggcgttatcgaatcgattcgggaggaagcatccgcattcaacctttttgatcctgaaaggccattcctccaggatcccgcttgccgggacgacaaaaaggaatccccgccctcctatcttttcgccgaaatggcctcgggaacgaatgtcgcccacttccatcacggggaggacgattcatcccggctatgcctttgctgtgcgactcggggtttattgcgactggcgccctggatgcaatcgggcggcaaggggttgaaacccgccatccacggcgcgccgccgatcatggcgatcgccatgggggacacattgcgtcacaccctgggcctcaacctgattccgtttgacgggcatttgggaaatccgcaatggaccggaccattcaagccgacgcgcgagggggccgtcaccccgctcctcgaggcgttcacctggaacacgcgacgcgtccatttgctcgatccttctccgctggactgctgttccaattgcggatcggaaagcggtttcggtgtcggaccgatcgttttcaaggcgaacgaggcttgcaaggatgattcggatgaggggcaagcgtatgccgacaattggcgcgacccggcggccttttacaccgtgaaggatggcgatactgtcaacaagaccgtcaagtcgaccgacgagtcacaggcctccgtcgccgccgatctcacgcgcctgattcctcaaaagaggggcaaggcggaagtaccggcgccacggtgtctcctgacgcaggccaatccgggacacgcgaactggatccttgtcattccctgcaccaatcccgccaataacaagacattcgatcaccgcttggtggcgatacggggagagctgcccggcgccatcgtaccgggccgtaacgatgtggatgcgattcctgttcttgccggggacccgcgcacgctgcgcaagccctggtcggcgaaccccagccggggcgcgagggtattcgtgaacgccgccagccgcctgcaaaagggtgactgggcggtgttggcggggtccgccggcaagcccttgggacacgacgccgcggccttcgacatcttctcttccctttattggccaatcaggagccgggtttcctcggcgccttcgcgggaagccgcctggatgaccctcaaactgatggcggtttccaacctcggtggtaatgccgccatgggtgatattcgcccgtggaatcatttgaaaaacagtatgcggaaacagaaaagccggaacggcatcaacattgcctacccgaggcggattcccaagggcgttcaccttgaaaccgagcttggggggatcatcaggcgtttttccggcaagggactcgactgggcgggcctttgccaattcctcaacgaccatctttcctgaccacacctgaagggagcgcatcgatgtttgtccagatccacatgcttcaaagtgttccgcccggcaatctcaaccgggatgattccgggttgcccaagaaatgcgtttttggcggcgtcacccgcgggcgcatcagcagccagtgtctcaagcgcaacatcaggctttcacctctgttcaaggaagctttcgcggaacacttggccgttcgctcgaaataccttcccacgctggtcgccaacgccttgagggaaaacagggccgaagccatccctgaaaaggaaatcgaggcggtcaccgcggccttggccgcgaggttcaagaaagaggaaaaagccagggattccgaacaggacaccggggaggacgatgaggctgccgatgcccccgaggctttggcggtcactccgcaactggtatttttccgccccgcgttcgccggcaagatcgcagaactcgcgcggaacttgaggagcaccgatccgctggcctacaagcttttcaccaagatggaaagaatctcgaaaaacgatgagagaagcgccaaggccggcgtcgaaaaattcatcaggtcggtgttcgaggcgcgggaatcgttgtcggtcgatgtcgcgcttttcggtcgcatgaccaccagcgacatcgtaatggatatcgaagcctcgtgccaggtggcgcatgcgatcgcgacccatgagaccttgattgaaagcgattacttcacggcgatggacgacctcaacgacagcttgggcaagggtgccggtgcggcattcctggggtcgggcgacaccgagacattcttcaattccgccgtttattacaagtacctgaacatggacacgggcgcatttttgcgcaacctccggggtgatgacacctccgtggcctccaaggccgccgcggttctccttgaagccgcggcactctcgacgcccacgggaaaacagaactccttcgccgcccattccgtaccggaattggtgctggtcgaggtctccccaaggaagcagccgatcagttacgccaacgcgttcctggggcccgtgcaaggggaggacctgatggcggcctcggcggacgccctggctgattattgcgggacagtcgcggcggcattttcaccgccgaaaactcaaagattttaccttgccgttggcagggcccggaacttcaggatccccatggaaggtgaacggatcgacagcctggccaacttggcccttgaggttgggaaaggtgtcaaggctgccaacgcgggtgccaagtgagcgacaacaccctgttgctgcgcctggcagggcccatgcaggcgtggggcaccgattcccgattccagttgcgccggaccgaatccgttcccggcaagtcgggcgtcatcgggctggttctttgcgccatgggaatcaggcgcgaagaggcctccgcgaaggctgccgaattgtcggccttgaaaatggccgtccgtgtcgaccgggccggccacaccgactgggactaccacaccgtcggcgccggcatcggaatccgtcaagccgaggggggcgtcaagaaaacggcaagcacgggtgaaccggagacccttctgtccaggcgccagtacctttgggacgcctctttcacggtggcgcttcagggtcccggcaacctggttgcggatgccgcccaggcgctgagtgaacccgtttggcctccgttcctcgggcgaaaatgctgcgtgccaaccgaacccgtctttttggccgctggccgtttcgcaaacctcgcggaggcgctgggggcgatcgaatggacggaccatcatggatcgtcgaggaacgggacgacggaactccaggcattcattgaacacgacgaaggcggcccggtcccaccaggtgccttcgtggtttacgacacaccgcgaaccctgcgaaatcccagccatgggccaaggttggtggttcccggcacgatcaatgttcgggttgcgaccgttcaaccggccaacgcaatcggcaggcgaggagtgaactacgccgcggcccaatggcgagcggtgagggaaaggcggttggaactggaccgtttcctctgcgtcttctgcaagatgcccgcggaggatgtgcatcatgtgacctacgaaagggctggaaacgaatccctcgacgacctgaggtcgttgtgcaagatctgccatgacgcctgcacgcaactcgaatacggctccggcatgactcgggaaaggattgatccggcagaacccgcggcgcgcaacgccatcatggagcaggttggcaaacttctttcacaaaggcgcctggcaaggcgtcaggccatacgcgatttggcccgcggcgactttttcgacaatgttcccgatgcggggatatcctgaatgttcctgtcccaattgatcgtcaatacggcgggaaatccggaccaaccccgtcccggcagggaatgggtgcgatccacttacagggtgcatcagcgaatctggatggcttttcccgacgaacacaagcgccatgccgatccgtttttccttggcgcctggtcaacgcctgatggcgtcaagcctcgaaggacggaggcgggattccttttccgcgtcgaaccggatttgccgacccgggttttggtccaatcggttttccgcccggattgggaatatgccttccagaacgccaggcatttgctggcggaaacgccaaatgtgagggaattcaatccggacccagtcgccggccaaccatacaaattcaggctcgccatgctcatggtgaagaggaaaacacacaagggatccgaatcagccgggcccgtcgagcatccgatccgttgcctggttccctcgcccgtggctggcgagccttttcggcccgatccgaaattcacggcttggcgggaaaagctatcctcggaagccttgcggcatgggtttgcgctgggcgagtatccctcaaggctttcagtttcgccgatcaggcacctcatgatgaaaccggacaaggacggcaaggccatgcccttcaacgccgccatgttcgagggcgagttgacctgcaccgacccggaaaaactcaaggccgcgatggttggtggaatcggccgtggcaaggctttcggcatgggcctgctttcgctcgcgatccttcccaagaaagcctccggctagaccttcccaaggcggatcgtccggcccggaaaatatcacctcgccatcaactttgaaatcagggtggcgccgctggcgggccatccgcctgccgtccggtgacatggccccaagcccgcagccggggcccgtcgggcctgatggtgatggcgccctccacggaagtcgaccaggtgcggtccctcgggcctaggcgcgcccgccgcgaatcttcctgcgccaccgtgagccagggcgcggcccagcccaaaaacgccggcccgttggcccccgcgccgccatggtgcggcgattgcagcacggccacgccggggccgggaccggctttcatgagcgccctctggccggcgccctcgaggtcgcccgtgagcagcacatttcccgaggaatgcctcagcagcgccaccacgctcgcctcgttctggctggaggcctcgaagccgggcgccgggtgcaggaactccagcgatgccgccccgcgggccaggctgaaccccggctccacctcctccacgggaactccccgcgccgcgagtccgtcgagcatgaagcggacgccgggcacctccttgcgggcgaaccagcccgacaccagcacccggcccaccggcacccgctcgaccaggtcgagcgcgccattgaaatggtcgaggtcggcatgggaaaggatcaactcgtcaacccgttccacccccctgttccagaggaacggcgcgatgatcctcctgcccacgccggcgttggccaacgatccggcgtcgtacaccgtggtggacccgtcggcccattcgatgacggcgcatcccccgtggccgacggcaaggaaggtgcatcgccagggatcgctccgcgcggggggcgccagcgacaccgccaatcccgcggccagccaggccatcgccggcactcccgcccgggcgcgggcccgccatccgttctccgagagcgccggaatcagcaggatgtgccatggcacaagccaggcgagtgaaatgtcgcccacccagaagctggcccatggccagttggccgcccagccgaccagccccgcacagcccttgagcgccatgcccgcgcaccatccgagcgccggggaaaccaacggaacatccccacccagaatcagcaggggaaagccgggcagcagcgccagcgatcccaggagcgccacgggcggacccaccaccagcgccgaggggctgaccagatgggtgcgcgccgcgaccagcggagtgaggcagcaccagatgacggcattggttccaagggcgatggccagggcccgaaggaacgcgcgaaccagtcgccaaggagccgaccggcccatgtcccgggccctggccaaggcctcctcctgttcggtgggcggttcggaccacccgggtacggcccagtacaaaagggcggtggcgaggaacgacagcaggcaaccggtgccgaaaaggtctcccgggtcgagcaggccgaccacgagccaactgaaggcgatcaccgagggaaggtggcggggccgccgcaggatgtcggccagggccagggccccgacggttgccgcggcgcgggtggccgccggccgcgcccccgtcatgcccgcgtaaatcgccacggtcagggcgatgggccatgccaaggcgcgcgcgcccatgccggcgcaccggccggcgacggtgaggaacatcgccaagagcaccaggtgctggcccgagatcgccagcacatgcaccacgccggtgcggcggtactggtcccagctttcccgggacagccttgaagtctcgcccaacagcagcgcggcggccagcggctcaacctccggatcgatcgccccggccaaccgggccgcggccctcgcccggagcccggcgagaatgacgcggatatcccaggtgcccgagggccccatcgattccagcgcgcccgggttgtcggcgacgcggacctcggcaacgatgccgcgggccagccaaggatcgcgcccgtcggtttcccccggattcatcggcccgggaatcaggcggatctgccccgcgatgtcgacacggtcgccgggcgacgcgtccgggggcgctcccgaaccggcgacccgaacctcgcctaccgcctcggatggcgcgcccccgcgccgggcgctctcgaccgcgaccaccgtctcccagcgcgccggaaccggaatcagacgaagcggatcgggtttgggcggggaagtcgcctggatggcatccaccacgatgccgcgcaggcggattggcgcgtgctcggatccggccatcgaggcgatgtcgttcccgcccatcgaaccgaaaagcaaggcgccgcgaacggcgcccatggcgaacacgaggaacagaatccagagcggccgccacctcacatgggccagggcggccagggcgaacgccaccgccagggccatcaccacccaaggcgtcggcctggccagcctctcgaggaaaatgccggcggtcagtgaaagggcggccggcgccaagggcgccgaccgccagattccagccacgggggccgccaactccagccatcgccgaagcaaggcggccatgacgcttcagcgcgccggggccccgaaggcccaaagatacttgaagccgcgcagataaatcttgccgtcggcgatcgcaggcgaggcggccagcacatcgggcaccgtgttgtcggcgaccttctcgaacttcttgcccgccttcaccaccgtcacggtccccttgtcgcggttggtgaccagcacatggccgtcaaccagcaccggcgaggcgcggaaccggccggcggtggtgcgctcctggtagtactcctgacccgacgcggcatcgatgcagatcagcgtgccgttctcgcggcacaggtaaaccagtccgtccgccaccaggggcgacggcacatccggggtgttgctgggcttgcgccattgctcgtggcccgacccgggccccacgattccggtggccccgggcttgatgcccacgacctgcccgttcttcgccgtgggcacgacgatgaggccgggtgccgcgacgggcgaggcgacaaatcgcagatacttgttgtacttgtccttggggttcaggtcgatcacgcgccagatctcatggccgtccttgaggtcgtgggccacggcgtggtcgttgccatgggtgacgaggtaggccttgccgccgtcctgccaaaggacgggcgaggcgtaggaatgcgggttctcgtcggtgccctcgctgggccgggtcactttccagacttcctttccggtggcggcatcgagggcgatcaccaactgggcgcccgtgtgcagcagctggacgaagagctttccgtcgtgcagaaccggcgtcgagtgcatgccgaactggatgttgaacttgccgtatttctcctggaggttcaccgcccaaaccttggtgccgtcaaccgcgtggcaggccaggtctccggaggcgacgaaggcccacacatgcttgccgtcggtcaccgccgaggccgaggcccagttgccctcgtcggtgcgggccgggacattgccggatcccagcttggcttgccatttttccttgcccttggtgtcgtacgccaataacagcaggtccttctccacgacgcaggtgaggaagatcgagtcgccccacacgacgggggtggagcaacccatgcccggaagcggcgccttccacagcaggttctgggtttcgccccatgccgtgggcaggcccttctcgggagagtggccatcgcccaggggaccgcgccaggtgggccaggggcccgccaaggcgcccgccgccacgcatcccgccattgccaccgccatcaatccgcgcatgccttcttcctcaaccggtttcacgagtctccgtggccaagagtgtaacgggttcgaatccgcccggccagcggttcccgccagccaaggttcatgaaatcttccaacacgggaacccgaacatcgggttgaatggaactaacgatccgacaccgggaggagccgaccatgagacccctgatctgttgtcttgccgtggcgctggcgacggcggccgttcacgcccagatggagccgaactttcccggccccaagcccgacggttccgtccagcttcccaaccagtggcgcctcatgcccgcgggcaggcacaccacgctgggcgattatcccgtgcaggcgctggtgcatcccaagggccccttcgtcgccgccctgcactgcggctacggcaagcacgaggtgatcgtgctcaaggtggaaggcgacaccaccttactggtcagccgcgtcgggttcccccaggccttccacggcatggcgttcgacgccgccggtgaaaccctgttcgtgagcggcggcgagttcgaggtcatccgcgcctacccgttcaaggacggccaactcggcacgccgcgcgaactcaccgtggtggacaaggcccagaccttcattccctcgggcatcgccgtcatgcccggcggcaagtcgctggtcgccgccggcgtgctcggccactccgtggcccaggtcgacctcgccacgggcaagggatccaagcccattcccctgccggaaggatcgtatccctactgctgcctgcccctggatgacgacgaggttctcgtctcactatggggcaagacaatggtggcgctggtcgacctcgacgacgccaaggtgaaggcggtctgggacctcggcctggcccaccccgccgaaatgtccttgtcgaaggatcgaaagactctctatgtggcgtgcgccaactccaccatggtggcggtggtcgacgcggaatcgggcaaggtggccaagaccctcaactgcgcgctccatccaggggcgccggtcggcaacacccccggaagcctgacgctttccgccgacggcaagctgctcgccgtggccaacgccgacgccagcaacctcgccctgttcggcctcgagtcaccgcgcgatcccaagcctctgggcttcattcccaccggttggtatcccacctccgtgcggttccaccatgacggcaggctgctggtcaccaacggcaagggagccagctcgaaggccaatcccaagggccccaaccccctggccaagaggcaacccaccacggaatacatcggcgggctgtttcagggcacgctttcggtgatcgacgcccccactccggaacgcctcgccgaatggacccccaaggcttactcgtgcagtcccctgcgcgccgatgccggtgccatccaggcccgccccgagggcaaccccgttcccgcgaaaatcggcgacaagtcacccatccgccattgcgtttacatcatcaaggagaaccgcacctacgaccaggtgttcggcgacatggtgccgggcaacggcgacaagtcgctctgcctgttccctgaaaagatcacccccaaccaccatgccctggcacgcgaatatgtccagctcgacaacttctatgtcgacggcgaggtttccgcggacgggcacgaatggtcgatgggcgcctacgccaccgacttcgtcgagaaggtctggccgctgggctaccggggcagcccgctcaagaagttcgccttctacccggccgaaggcaccaaggatcccgtcgctcgccccgccggcggctacatctgggaccgcgccgccgaggcgggcgtgacctaccgcagctacggcgaatggatcgccgacacggcgcccggcaagccggccaaggcgcgcgtcaaggcgctcgaggggcatttcgaccctttcttcccctcctacaacctgtcggtcaccgatgtcaggcgcgccgaacggttccttgaggaactcaccggatttgagaaaaccggcaagttcccgcaactcaccatcctcaggctgcccaacgaccacacggccggcacctcgcccggcaagcccacccccaccgccatggtggccgacaacgacctcgcccttggcatggtgatcgagggcctctccaagagccggttctggaaggaaatggcggtgttcgtgcttgaggacgacgcccagaacgggcccgaccatgtggacgcccaccgctcggtggcgttgtgcgtcagcccgttcaccaagggccgcggcctcgactcgaccctctattccaccagttcgatgttgcgcacgatggaactcatcctcggcctcaagccgatgagccagttcgatgccgccgcccggccgatgtacaactcgtttctccccaagggcgacgccgcgccctacaaggcccgccccgcgggcaccgacctgaaggaactcaacacggcgcaggcctggggcgcgaagcagtcgctggcgttcgacctctcgaaggaggacgcggccgacgacctcgccttcaacgaggtgatctggcgctcggtgaagggcgccaacagcccgatgccggcccccgttcgcgcggcgtttttcctggccaagtgaacaaagcaaagaggctgtttcgctccggccccgtgatcgttcaggcaaggacaacaaacaaggcgccgggttcacgcccggtgccagcctgtttcatggggctggctgccgattggcgacgctgacacgacacaatttacacatggaagatcgtataataattcattgaaagtgctgcgaagctccggagtgctgcttcacggagtgggaaccccatggcttgcgccatgggctcaccaaaagtctcccccggttcaccaaacttcccggtgttgtcagttattgtgccgccttggggtgagcgccgtgcgtgagcgcggcgatacgggccagctttcgggaaccccatggcttgcgccatgggctcaccaaaagtctccctcggttcaccaaacttcccggagttgtcagttattgtgccgccttggggtgagcgccgcgcgtgagcgcggcgatacgggccagctttcgggcccctttggattttgggagtgcgcactcgcattggccttgtcggcatcattcttccaaatcaccgacttggccaaaaaaaccaagttggcggcgctgacacgacacaatttacacatggaagatcgtataataattcattgaaagtgctgcgaagcaccggagtgctgcttcacggagtgggaaccccatggcttgcgccatgggctcaccaaaagtctcccccggttcaccaaacttcccggagttgtcagttattgtgccgccttggggtgagcgccgtgcgtgagcgcggcgatacgggccagctttcgggcccctttggattttgggaatgcgcactcgcattggccttgtcggcttcattcttccaaatcaccgaattgaccatgaaaaccaagtaggcggcgctgacacaacacaatttacacatggaagatcgtataaaacttcattgaaagtgttgcgaagcaccggagtgctgcttcacggagtgggaaccccgtggcttgtgccatgggctcaccaaaagtctcccccggttcaccaaacttcccggtgttgtcagttattgtgccgccttggggtgagcgccgtgcgtgagcgcggcgatacgggccagctttcgggcccctttggattttgggaatgcgcatttgcattggccttgtcggcatcattcttccaaatcaccgacttgaccatgaaaaccaaggttgggcgatctgccacccagtcattcacttcaaatccgcaggcaccggttcggcggctggtggcgggggcaccttcaggaactgcgccaggatcgccgcgctggccaagcacgaaaccttgccctcgcgcttgcccggcttgatgcccggcccgtagaccaggagcggaacatgggtgtcatagtcgtagggcgtgccgtgcgaggtgcccgtcggtatcgccgaccccccgaacaggcagccataggcgggcagcaccagcaagtcgcccgagcttttcgggtggaagctcaggcgcgcctgacgaagcaaggagtcgtcggtaggcgcgtccgattcaagctgcccccgcgtgtagcagcagccgatgccatcctgcttgcgcaaccaagttgcagcggcctcgcgaaccttggcgatgtcgccgccggcgaacgccttcgcgttcaggtacatgttttcatcgaccgggccgacaagcggctgaaccttctcccccaagtcgaattcctcacgaagatacgcaaccaacccttgtcccagcttgacggcatcaatgcgcctggcggccttggcgcccttggaagtcgccacctccggcagcggacaaacaccatggtcggctgacaagaccacgccatagttgtccgggcccaccagggcatcgagttccttgaagaaacgcgaaagcagagcgtcggtgcgcagggtgatgtcgagcacctcgtggctgtcggggccccacatgtgtcccaccacatcgttggccgaaaaactcacgcacaaaaggtcgggcacatcccgctggcccagcttttcccgccggacggcctccagcgcgaaatcggccaaaagttcattggaaaacggggagttgtatagcgcgctgtaataggtcttgtccggcttgcctgaatcggagggaaagggatgcggaaaggcgcgtccctgcttcttggcgattcccggcccttcgcccacaacatcatccggcccggcaagcttgtcgtagtcgaggtcgtcgcgaaaccggttccaggtggtgccgaaccacctgtcggccggcttggcggcgttgaaggctcccacccagtcggccacgcggtcgcggtagtaggtggaggtgacgaaatcacctgaatcgctgtcccaccagtagacgatgtttcccttgagtccgccgggaagcacggcgccccggtccttgagggaaaacgaggcgatcttggagccgctttgggcattggcgcgaatcgcgtcacccactgttggcgcccgaagcctttcgggagaaccggcccccttccggactgtggcgacggccgctgtgcccggctttggcacgacgggcttggcgggtggcacgcgctggtgcctctcggtggtggcgcagtacacgcccgcgccggtcaacgggtcgcgccaatcattgccgatgatcccatgcaccgatggactggacccggcgacaaggctggcgtgcccggcgccggtgacggtgacggcatagggatagtgggcattggcataccaggcgccctgctccagaaagcggttgaggccatcgggcccatagtgtgccttccatcgagccggataatcgccgcggaactggtcgaacaccaaaagcaccgccagcttgaccggcttgtcggtgccaccgacaggcgcctgggcccatgcggcggctggtatcatgaacggtaaaagaacaaggaatcgtgtcagcatgcatcgctccccaataggcctctctccctacaggataaccctgcgaaaggcggatgggatgaagggatgaagaaggaccgaggtggtgggggaagattcggaaaggtaaactcgaatccgcattccgcccgggggcccattccgtgccaaaacatgcgctagcgttcctgatcctcgcgtcaatcgcggactcaggcatggccgctgacttcaactcccaagccaagccggtgttcctggcccggtgcgcgcggtgccatggcgccggcacggccaaggcaggtctcaggctcgactcggccggcggggcgctccgcggcggtaccgacggcccggtcatcattcctggccaggccggcaaaagcccgctcatggcacgcgtcacaagcgacaagcccggggagatgatgccgcccaagggaccgcggctttccccggctgaaatatccgcgctgcgcgagtggatcgattcaggggccaagggaggcaacccgggggaagaccgcgatccccggcttgaccactgggcctggcaacccgtggccggcgtggcgactcccgctggcaacccggtcgaccatttcatcaacgcccgcctcaaggccgcaggcctcccgcccgccccgcgcgccgacaggcgctccctgatccgccgactgtcgttcgacctgctcggcctgcctccctcacccgaggaagtgacggcattcgtgaacgaccctgatcgcctggccttcgccaagttggtcgaccgttacctcgactcgccccggtacggggaacggcaggcgcgccactggctcgacatcgcccattacgccgacacccacggcttcgaacgcgaccagcgccgggagaacgcgtggcgctaccgcgactgggtgatccgcgccttcaacgccgacatgccctacgaccgcttcctggccgaccagatcgccggcgaccagttgcgaccgggcgaccccgaggcggtggcggcgacggggttccttgccgcgggaccctgggactttgtcggacaggcggaaacccccagccccgtgctcaagcgccaggcgcgcgccgacgacctcgacgacatggtcacgcaggtgatggcggcggcatgcggggtgacggtgaactgcgcgcgctgccacgatcacaagctcgagccgatatcccagaaggagtattacggcctgtgggccgtcttcagcggcgcgcgccggggggacaggcccctcgatccaccgggcgaggcgcggcgcgacggcgagaggaaggccctgctggccaaggccgccgaactgcgggcaacgctggcccgcctcgacggcaagggcctcagcctggccgatgccgttggcgggggcgacgggctgggctcgggaacccggggcgacgggatcaatccggcgaccggcaggaagtcagccaccaaggccggtctcatcagcggagccgtggcgaaccaataccgggcgctgggcggcctggtcgacggcgtcgtcgtccccggggggggcgatgttcccgtcagttccaccggcatcgtggccaagtcgatccccaagacatccgccaccgcctgggatgccatccgcaacggcccggtcaaccagcaaaggtcgacatccatcgccggcatcgactactcgggccccgggcatgacatcctcggactgcacgccaacgccgcgatcaccttcgacctggccaaggcccgcgccgccctcaaggccgacaccctcaggttcaccgccatggcgggatatggcggccggccgggcgacaattccaccaaggccgaccttcgcgtgctggccgatggcgtggaggtcgagcggcacctgggcctcaacccgggaagcggcccgttgcccatcgacatccccctcggtcccgacaagcggtttctcacgctcgtggccaccgagggagccgacggcggcatcggccacgaccaggtcttcctgggtgacgcccgcctgctcccctccaaaacggcccgacccccggcccctgaaacggcgaacaggcgcgagctttccgaggccctggcggccatcgagcggcaaatcgccgccatcgcgcccggcccgatggtgtacgccgtcaacggcggaacgcccgaggccgtgagggtgctcaagcgtggcaaccccgaggctcccggtgaggaaacgggccccggggcgctttcatgcctcaagggcgcccgcccgctggaggccacgagcgacatgggcgacggggccaggcgcgcggcgctggccaggtggatcgcgcagccggaaaacccgctcaccacccgggtcattgtcaaccgcctctggcaccatcatttcggagccggactagtcggaactcccagcgacttcggggccggcggtggcaagccgagccatccggaactgctcgactggctggcgggcgagctggttcggcggcgctggtcactcaaggcgatgcaccgcgtcatttgcgacagcgaggcctaccagcgatcatccatggcgcaagatcccaaggccgccttggccgacgcgggcaaccggctgctctggaggcaaaacccgcgccggctggatgccgaaagcctccgcgacgccgtcctggcgacaagcgggcagctcgaccccacccccttcggcccgggataccgcgacttcgtctaccaggaggcctacgcccccatctaccggcacatcgatgacgacagcccgtcgctgcgcaggcgcagcatctaccgctttgtcgtgcgcaccactccccagccgttcctcaccacgctcgattgccccaacccggccaacctctccccctcgcgcaccgaaaccaccacggcgctgcagtcgctggccctgctcaacaatccgttcatgctgaggcaggcccggcacttcgcccagaggctgtcccgggatgcgggtgattctaccgccgggcgggtcgggcgcgccttcgccctggcgttcgcccgcgcaccgtcacgggccgagctcgacgcctcgatggcgctcgtccgggcccgcgaccttcccgagctttgccggatgcttctcaacgccagcgagttctgccatgtcgattgagaaccttggcaggaggcgctggctgcggcagggcggatgctcgctgggcgccatcgcgctgggcacccttctggaacgcgacggactcgccgcggcgccctccgcgttcgccccaagggcaccccaccacgccccgcgcgcccgcgccgtgatcgagatcttctgccccggcggcatgagccatgtcgacaccttcgaccacaagcctgaactggaaaaatcccacggcaaggcgttcgacgccgagctgggcaagcagaccttcgccggcacgggcggaacctacgccaggagcttctggcccttccgcaggcacggccgatgcggcaaggcgatcagcgacctgttccccaacctggcccggcatgtcgacgacatcgccttcatccattccatgaggaacaagtcggcgctccatggccccgcgatgttcatgatgaactcgggcttcatccttcccggcttcccgtcgatgggctcctgggtcacctacggcctgggatgcgagaccgacaacctgccggccttcgtggtcctgcccgacatccgcggcctgccccccggcggcgtggtgaactggggcgccgggttcctgccggcggtgcaccagggcacggtggtggaggcctcgggaacccgcgagccgatcgcggacttgtttcctccggaaaggcaaggcgacgaggcgccgggccgcgcgttcctgaggtcgctcaacgccaaccacgcggaggctcgcgcctccgacacccggctggccgcgcggatggccagctacgagcttgccgcccgcctgcagatgagcgcgccggaggccgtggcgctcgaccgggaatccaccgccaccagggccatgtacgcgctcgacgacgaggacatcggcccgttcggcaggcaatgcctgctggcccgccggctggtggagcggggcgtccgcttcgtgcaggtgttctgcggcgccgagaacacccaggcccgcaaggtccgccccaactgggactcgcatgaggacctggtccgcgaccacggctactggggcagggtcctcgacaggggaacctcggcgctgctggccgacctcaagtcgcgcggactcctcgacgagacgctggtgctctgcgccaccgaattcggccgccagccgttcctgcaggggggcaaccggggccgcgaccacaaccccggcgcctacaccgcctggatggccggcggcggcaccaagggcggaacctcatacggttccagcgacgaactcggatggcaggccgccggaaacccgacctactcctacgacctccacgccaccgcgcttcaccagctcggcatcgaccacgagaagctgtcgttctaccacaacggcatcatgcgccggctcaccgatgtgcacgggaaggtcatttccgaaatcgtcgcctgactccggcgcgcctcaggcccgcaacgccgcgagcgcgccgcaatgaacccgcgtcggggcgatcgtgcgggccggcgtgaaaccggtggccgaaagcatcccccggtactccccggcgctgtaggcccgcccctcggtgagcgagaacaacgcggccgaataaagcgccacctccaacgggccgtccagggcgtcgttcaggtagacatcgtggatgaacaacctgcctccggggcggaccgccttgtggcagcggcgcaggatgtcgaggcaggtctcctcgttccagtcgtgaagcacattcgagagcagcaccgcgtcgcacgatgggtactccccgaagaggtctcccgccaccatcgccacccggtcggcggggccatgttccgcgaggatcccggaagccaccttgagcacctcgggccggtcgaggttggtaacgcgcaggcccgggttgcgctgcgccagggccattccatacaccccggttccgccgcccaggtcgaccaggtggccgatgccgtcaaggggcagcacctcggccagcacgggagcgcaaatgaaggcccggcccgccagggccatggtcaggcggcgggcgctgtctcccgattccatggccgattccatcccctcgcggaagatgaacgccttgccctcgtcgggccggttgctcaccggcttgtcggcccgcagcaggtcgatcatggccttcacgccgggcagtgcggaggtgaggccgacatagccgcggatctcatggctgccgcccggcaacaggaaccgtcccatgggagtgatggcctggggcaggcccggcgccccctcgatgagcctgagggcccgcatggcggtggaaagcacggcccacgggcggggcgccaggcccagcttctcccgcagggcatcctccggaaccggcccgccggccaacgcgtcgaagaggcccaattccagcccgctggccaacagttcggtcatgtagttgccgcgaaccatgtcgaacagcggcgtgggatcgagttcgggggtggtgaaggggggcatgatggtctccggggccggctgggcctcgaccggcgccgcctgctaacctgagactaaggcaggcgggggcgtcggagaaggtgcggatgtccgcgaaggatcgaacggcggtggttctgctcagcgggggactcgattcctccaccgtgctggccctggccatctcgcagggctaccgctgccacgccctcaccatcgcctacggccagcgtcaccaggtggaactggccgccgcggcacgcgtggccggtgccgcgggcgtggccgggcacaagacccttgccctcgatctgcggatgttcggcggctcggcgctcaccgccgacattcccgtcccccacgggcgctccatggattcgatggcttcgcacattccctgcacctatgtgcccgcccgcaacacgatcttcctgtcactggccctggcccacgcggaaaccctgggggcgttcgacatcttcgcgggcatgaacgcgctcgactattcgggctatcccgactgccgacccgagtacctggccgcgttcgaggcgatggccaacctcgcaacgcgcgacgccgtggagggcaagggccgctacaggatccacgcgccgcttttgcggttgggcaaggccgacatcatcaggcttggcgcggccatgggggtggattactcactcacccacagctgctacgacccgaccccggccggaaaggcctgcggcacctgcgacagttgcctgctgcggctcaagggcttccaggaggcgggaatgtccgacccggcgctggccgccacatgagaatcgccgaactgttcctctcgctgcagggggagggcctcctcgccggggtaccctcggtgttcgtccgcacctcgggctgcaaccttcgctgcggcttctgcgacactccctacacctcgtggcaaccggaggggctggaacgcccggccgccgatgtcgccgcggaggtgctccgccaccccacccgtcatgtggtggtgacgggcggcgagccgatgctggcgcccgacctgcccgaactcctcgaccccatcgccggcgccggcaggcatatcaccatcgagacagcggcgaccgtgtaccgtccggtccgctgcgacctggcgagcctgagccccaagctggccaacagcgcgccccgcgaccgcgaaggcggccgcttcctggccatgcatgagggcacgcgccggcgaccggatgtcatccgcaggttcatggaccaccacgaataccagctcaagttcgtggttcaagatccttccgacctcgtggagatcgacaacctcctcgatgacctgccccccgtgccgcccgagcgggtcctgctcatgccgctgggagtcaccaacacggaactccgggaacgctccgcctggctcgccggcctatgcctgggccggggctggcggctttgcccccggttgcatattgaactctacgggcacactcgaggcacctgaggcctcgaaacccatggggatggaacgatgatcacccttctgatggcctgcctggcgatgctccccccgccggcaaaacaggaacccctggtggtgccccaccggggcctcctcgggcacgctcctgaaaacacgcttgccaatttccgggcctgcctcgagctggggatggggttcgagttcgatgtccagcgctccaaggatggcgcccttgtctgcatccatgacgacacgctcgaccgaaccaccaacggcaagggccgcgtggcggacatgccgctggcttccatccgcgaactcgacgcgggagcctggttcaatacccggttcaagggggagaaggtgccgacggtggaggaggtgctgtcgctggtcggcgcgcatcgccacaagggggtgctcgtggccgtcgacctgaaggcggcccaagtggaggccgaggtggcggccatggcggtgaaagccggggcgctgaaaaagctcgtgttcataggccgggccatcagcgaacctgccgtgcgcgccaacatcatgaagcaatgccccaaggccgcatgcgcggcgctagccaacacgccggccgacttcgacgcggcgctcaccgccgccgacgcctcttgggtttacttccgtttcatcccgacccccgggctcatggagcgcgtccacaaggcgggaaggaagggattcatcgcgggtgtcacggtcgccggcgttgagccggccaactggaaggcggccgcggccgcgggcatcgacggcctgctgaccgatcatccgcttgaattccatgagaccttgcggccttctcggccaaaaccctgaccccgggccgaatcccggccgtttcaaggtgccacatgcggatcgtgtccctgcttccaagcgcgaccgaggtcgtgtgcgaactcggcctgggcgaaagccttgtgggtgtcacgcatgaatgcgactatccggacttcgtttcggcgctgccgaaagtcacgcgggcgctgatccctcacgacgccaccagccttcagatcgactcgctggtgcgggagagcctgcaagcccgcaaggccctttacgcgctggacatgcccgaactggaacggttgcgccccgacctgatcatcacccaggcgctgtgcgatgtgtgcgccgtggccgaggccgatgtggccgccgccgctgcctcgctacccggccggccgaaggtgttgaacctcgagccgatgtccatcggtgatgttctggagacgctggccacggtggcgaacgcggccggcgcgccggctcatgccaaagcggccatccgacgactgcggacgcggatcgacgcggtggccgaacgctcaaggaaggtcgccggccgcccgcgcgtggtcgtgctggaatggctcgacccgccgttcagttgcggacactggacacccgaactggtggatttggccggggccgacgaggtgatctccaggcccgggcaaccgtcgcggacgctgcggtgggatgaggtggtcgccgcccggccggatgtgctgttcatcgcctgttgcgggttttcggtggaacgcacgctggtcgaccttcccggcctcgccgcccggcccggctggtcggacctgcccgccgcgcgcgcggatcaggtctttgtcacggatggcaacgcctacttcagccggcccgggccgcgcctcgtggacagcctggaaatcctggcccacgccctgcaccccgctattcaccccctgcccgaaggcccgcggcccgccatgcgaataggcacccgccaacttgccgaaggccgggcggccctgccatgagccccaaggcggagacatgggcgggcatctatcaccggcccgggatggcccgcgccgtgtcggaatggcttggccattccaatgatctgatgtcctcaagcgggatattcctttgagccatcccgaacatccgctggtcgagggggtcgattaccatgtcgaggatggccggtgggttttcagcgcccactaccacctcaagcgcggatactgctgcacaagcggttgcaggcattgtccgtatggcaattcgcccaccgaccgggacagggccgcgaacgatggcgcccggccgtcgggagccccgggccggccccgttgaagcccatcacgattcaccgaacccgaaggcggctcgaaatcatccgacggtagtcaatccggcctcgcgcagcgccttttccatggcgggtttcttcgccgggtcgaggggagcgatgggcgcccggcacggcccgatcgattctcccagcagggccagggccgccttcactccgcctggcggcgtgcaaaggttgagcgccaggcgcagcgggtgcaggcgggcctgcgccgcccgggaaccttcccgatcgcccgccatgaacttttcgtagatctccacgagcaacttcggggcgatgttacccgtcgccggaatcgcgcccacggcgccgaggtcgagcgcgctgtagatgagcgtgtcgcgtccctgcagcaccgagaatgagggaggcacacggcggatcaggtcggccaccagcgtgaggtcgccgctggaatccttgatgccgacaatgttgggaacagccgccagtttctcggccgtctcggcctcgatgcgcaggccgccgcaggtgaccggattggaatacagcagcagcggcagcccggtggccccggccacccgcctgtaatggtcttccagttccttctgggtgggcatgatgaaatagggggtgatgaccgagaccccctggacaccctcgcgctccgccatgcgcgtgagcctttcggcctcgcgcgtggtctcggcgcccgtgcccgccagcaccggcaccctgccggcgacatgctccaccgcggtcgcgatcaccgcctgtttttccgcctcgtcgagcgcgtagaactcgctgttggtgccaagcacgaacaccgagtgcacgccgccggtgatgagccggtcgatgaaccagcgaagcctgggtaggtcgagttcccccgactcggaaaacggggtggcgaccggcggaatgatgccccgaaacgacatggcctaccctccaagtcaggaaatggcgacatccagcccgaacggcttttcaccggtgtaggcggcgtcgaggatttgcacgggatggccgacccacacgcggggggagcggtcgcgcatgtgccggtcgatctgcaacaggcagccgacattgccggtgagggccgcggaggcgcccgtggcggcgatgttccccgacttccgctgccccagggccgccgacatttccggctgggtgatgttgtagctgcccgcggcgccgcagcagtgctcgttctcggcgaggggaaccagcgaaagcccgtccaccatcgccagcacctgccggggcgccgagcggatcttctgggcgtgggccaggccgcaggcgtcgtggtaggtggccttgagcgagaccttgtggcggggcttcatggggcccagttcggcgaggaactcgtggatgtcgcgcaccttgccgccgaacacggcgccgggcccggcggcgtcgtgtccttccaggatgtggccgtagtccttgaggacggggctgcaacccccggcgttgctgatgatggcgtcgaggccggccaatccgccgggaaccgccgcgaacgagtcgcagttgccggccgccagcctggcggcgtcgtcgtcgaggccggcgtgcttgtgcagggcgccgcagcaggcctgcgatcgcgggatgtgcacatcgcagccgttgtgctggagcacccgcgccgtggccaggttgatctgcggatggaacgcgtcggcggcgcagcccagcagcaggcccaccgtggcgcgcttgggcccgatcgccggcaggaactcgggaaggttgtgatagggcgccaggtcgggcacgatctcctgcatccgccgcaggaagccgggcatcaggtatcccgaaagcctcacggcccagccgagcccgagccgttgcatcagcttgacgggaaacagcgcccagcccatgcggccgcggtgcggcgtgagcccgaacagcatggcgcgctgcagccagcccagcatgggcgcggggccccgcgtgcgcgcctggtcgttcttgaacgagtggatcacatgccggtactgcacgcccgaggggcaggcggtctcgcaggccatgcactcgaggcagccgttcatgtgcttctcggcctcgggcgagaacggcgcgcggccgtcggcgatggcgcgccagaggtagatgcggccgcgggggctgtcgttctcgttgcccgtctccacataggtggggcacgatcccaggcaaagcccgcaatggacgcagtccatgaacagctcatagtcgatgttcttgccaaggtcgctggcgatgggcaggctttggcgggtggctggggcgctcatgatggctttccgtcggggaggcgcgtgttgtggcgcatgcggttgggattgaagatgcggtcgggatccatttccctggcgatggccgcggagatggcctcctcgggccgggcgggtccccacatggagtcggcctgccgccatgggcgcggggcgcgcgcgaggcgggcccatcctcccggcccggcggcgtcgcgccagcccggcagcaggccccgggggtctttcccctcgggcaccaccgccctgaccacgcccgagccgggcaacgcgtgcaccaccgcgccgggcatgtcggccagcacgcgggccgccaggcccgccgtccgcgagggcaggcaacccagcgccgcgaccgctcccgactgggggtcggtccgctcggccaggcgcgtcgccatggcgtccaccgaattcggctggcactcgatgatctgcacatgggccaggtcgcgaaactcctccttggccctggccacctgccaggccaccgcgggagcctcgccctcgaatccgatcatcgccgtccacgcggccggcccgccgggaagggcgagaaggtcgaacgccacgggccgcgcggcgcacccgtgggcgcggtcggcggcggcctcgtgcatccccgccttcagcggaatcgccagccaggcgcgcaccggcggcaacgggcgcaccttgagcgtcacctgcgccatcggcccgagcgtgccgtgcgccccgacatgcagcttggccatgtcgtagcccgcgacattcttcacgacgcgtccgcccgacctcgtcagcttgccgttgtcgtcaaccacggtgaggccgatgacgaagtcgcggggcgttccgtgggccagccgcctcgatcccgagacattgcacgccagcaccccgcccagggtggccttgtcgggccacgggatgtccaggggcagggtttgccgttccctggcgaggatctcctggagcctcgacacgcggatcccggcctgcgcggtgatcgtcatgtcgcgggcgggatagtcgatcacgcggtcgagggagctcatgtggaccacggtgccgggaaccgtcgcgggtatgccggcgcccagggaaagcccgccgcccacccagtacaggggctggcccgaggcgcgacaggcccggacaacctgggccagggcttcgggcgtctcgggggcgacggcgtccaggtcgaggccgtcgatgtcgaatgtggggtccatggcgtgctgctggtcctcggggggagcgtcagagggcggcgcgtcggccgggcttcacctgcttgtgccgccccgcttccgcgcaggcgccggcggtgggcagcatcttgtcggggctgcacaggccgtcggggttgaatgcctgcctcacccgcctcatcgcggcgaggtcgtcggggctgaacagcttggccatgaagtcgatcttctccacgccgatcccgtgctcgccggtgacgctgccgcccagcctgaggcactcgtcgaggatctcgtggctggcctccatcacgcgcctgagttggtccgggtcgcgctcgtcgaacagcaggatggggtggaggttgccgtcgccggcatggaagacattggcgattctgagcttgtgcctgtcgccaatcgccgtgatcgacctcagcatctcggggagggcggtgcgcggcacaacgccgtcctgggtgcagtagcttggcgccagccggccgacggccccgaaggcctgcttgcggcacttccacagcagcagcctctcggcttccgtgttggcgcgcctcacctcgcgggcacggttggccttggccagcttctcgatccgcgcggcctcctcgcccaggccggcatccagcccgtccacctccatgatgaggaccgccccggcatccagcgggaaaccgaagctgaacgcctcctccaccgccttgaggatcaacgagtcgagcatctcgagcgccgccggcacgatgcccgccccgatgatggccgagatcgccgccgtggcgtcgtcgaccgactcgaacacgcccaggagcgtgcgcaccgactcgggattgcgcaccagcctcacccatgccttggtgaccacgccgaaggttccttccgaaccaacaaccacgccggtgaggtcgaggccggggccgtcctccaccgggccgccaagggtttgcaccgtgccgtcgggcatcacgatctcgacgcccatcacatggttcaccgtgacgccatacttcagggtgtgcgggccgcccgaattggtggcgacattgccgccgatggtgcaggcgccctggctggagggatcgggcgcgtagtgccaaccctcggacttgatccggttggtgagccacatgttgatcacgccggcctcgacaagcgcgaaccggttgcgcaggtcgacttccaggattcgcttcatcctggccagcgagatgatcaccccgccgcccacgggcaggcaccctcccgcgaggctcgtccccgaaccccttggcaggaaggggacccgcaactcccggcatagcttcacgatctcgaccacctgttcggtggccgtggggaacacgacgacatcgggccggttcttttcgagcgtgtagccgtcgcactcgtatacgagcaactcggcctgggagttgatcaggccgtccgggcccacgatgccggtgagccggcgcaccaggttctcgacgacggatggctcaacggcggcgacggtcatgggggggcgttccgggaactaatatcggcctttcccagcatacagggccggaaggatttcctaatagcggaaaccgttgcgccgcacatgggtccacggctcaccctcgggttccgatcggcccgcgagcaccgtgccggtcaccaggtcgtggtcacccacggggtatcggccggaaacctcgcagaggagatgggcgtgggcatcctcgagaaggggcggaaggtcgtcggaaaacctggtggccagaggggcgaatccctcgggcccgggcggcgttcccttgccgaaatgcctcaggagttccttctgtccgtcgcgcaccacatgaaccacgaaacgcgccccaggaaccagaagcggccccaggccccggtcgcggccgatcgccacgctcagggaagggggctcaaacccgcactgctgcacccagcttgccagcatcgcctgggccgaagcccccgtaccggcggtcacgatgtacaacccgcttgagacgcgccccagggccccacccagcgtgtcgcggtcttggctcagcattgtccgctcctccgcgacgatcaatccttgaccagcttttccaaaagctggggcaattccgattcggccgcctcgctgtcgaggtatttcttggcgatcagccccgccttgttgaacacgaaggtcgccggataaccctcgatctcaaacttcttctgccaaacctcaaggggctccctgagcatgtaggaaaccccgggcaacttggcgcgcctgacgatggcgtccaccttctcgcgaaccttggggtgtccctcctcggcatcgagggggatttcaacatggacggcgatcaccgtcacttttccaggaaaccggccgcccatctcgaccagatggggcaaggccttgatgcaggggattcaggtcctctgccagatgtccaccaccacgacctggcccttgaggtcgcgcacggccttggccaactcggggaaccgaacctccttgagtaccggggcgggatcctgggccatcactcccgccagcagcgcgcagcagattgaaatcatcggttcgtctccaagctatgtgtcaaggccggtaacacgactcacttcgcgaacacgcgttcgcccggcttggccgcctccgcgtcgccatcgtgcaccagcatggcgtaggtcagcttgagggtctcgcccttggccagcttcacgaggtcggcgcggcccttcatgtccgggaagccggacctgttcctgccaaacgggttggcggccatcagcccgtagccgcgggcatgccagcaggtgggatatttgttgtccgggtgggccacgatcgccacgccggcgaccttgccgccggtggggccggagtagtcgcaccaggccgacttcttgccccagaggtttttctcgcccttgaggccctcggcgttggtcagcacgcccttgcccggcttttccgtcaggtcgtcgcgaacccgaaccccgaaggaaccttccttggtgtcctcgaaaacaatcccgccctcgctggcggtgatctccgaggcgacctccatgatccacgatgaggcatcccgggcccggaacacgagggtgcgcgcctcggtgaggatcgtcttgcccgtggaatccttccaggtgttggcggtccgcacggtcacggggccattgccgtttccggtgggcgtggaaatcgccaggccggcgatcgtgccatgcccggtttcctcgctccagaagtcgatgccgtcgatccccttgcgcttgggggcctgataaccctcaagcacaatgtcgccatggcagaaccacgccgatttctggtgcttgtggtccttggcctccttggcgtcgggcaccatcggccaatcgcgggtaatcgccaccccgcccggggtgaccacaggccagaaatacggcttcgcgaccttcgggccggcgttgtaccgggtgacgacggctccacccagcttgaacgaaaccacgccgtcgggcgaaacctcggcagccaccggaacctggccggaaaccgccagcacccacgccgccaaccaaccacatgcactggacatgcccggccctcccggcccaccatagccgtgtgaatccttggatgatgctaacgggtattggttcaagagtcagcagtctcccccttgaggatcgattcatgcgatttcccacatgcctcgggctggtggcccttgccgccgccatggcggcaccggcccgcgccgcggagaccgcgctgccgcccctgttggtgcgcctggcgtcgatcgacacgctcaccaggcagttcttcctgctggcggacaaggttggccgcaaggccgaggccgagcagatgaaaaacgcgctgcaggccgccaccggcccgggcggcatcgagggactcgacccggccaagccgatcggcatctacggccgcatcggacccaacggcctcgacagcaccggcgtgatcctcgttccctccagtgacgaggccgccatgctcaaggccctcaagaaactcgccggcgccatcggcggcaacctcgtggagtcgaaggagaagggcggcgcccacacgctcaacctcgaccagtcgcccatgcccatcttcctcaggttcgccaagggatattgctgggccaccttcaaggacgagtccgccatcaccatcgacaagcttccagacccggcccggctgctcgaggcgcccgccggaagcgtggcccgcctgcatttcgacctggcggcggtgccggagaacctccgcgccaccgccgtcgaggcgttcaagcagggcgtcgccgaggcccgggagaaggcgccgccggccgaaaccgccgcgaccaagaagttccggatgcaattgaccgacatgatggagggtggattggtccagttcctcaaggaagggggcggcctcgaccttgagttggtcatcgacgccaagaccgaggatgtctcacttgaggccaggctcgacaccctgcccggttcctcgctcaccaaggcgatgcaggccatgggcgccggggaatcaatcggcaaggccatctccgcggggggggacgccgtcgccatctcgtcctacatgcgcatgccgcaggaacttcgctcggcgttcatgggcgtgttcgaggaagccctggccggcgccaaggagtccaacgactcgccccaaaagcagaaggtcgccaaggacatgatcgccgccgtcatgcccaccctgcagtcggccgtgctggacatgggcatcgcgctgaacccgtcgaagaaggaaggcatctacaacgccgccatcggcttccgcgtggcggaaggcgccaaggtggagacggcactgcgcaccgccgtcaaggaactgttcggcgagaaggccgaaggcaaggtgaagctcgacttcgccacctacgcgggagtgaaggtgcaccagttcaccggggcggacgacgccaagtcccgcgaaatgctgggcgacggccccgcctacctggccatccgcgacgacatggtgcttgtgacggccggacccgatgcactcgccatgctcaaggacatggtcagcctgaagccggagaagggctcgatgatgaaggcggaactcgggctggcggcgatcgccaggctgggtgattcgaatgtgcccaaggcgctggtgaagaaggccgccgacacggcgttcgccggcaagccgggggtcgaccgcgcccgcgtcgagatcagcacggaaaagggattcggcatcaaggtctcggccaacctggccaccttggagttcctcagcatcatggaccccaaccggaacaactgatttccggcctttcgtccactggtgagcgcggggcgtcagctttcctctttaggcgagcgcggggcgtcagccccatgagttgggttgccggcgcgcgcggatgattaccggcggccggccatcgccacctttggggatcttgagacgggcgcgaccgggacggccttcggccggaggctccaccagcacgacgccggcagcatcccgattccagccaacgccaggtgcgcgatccaggtgatccgcagcgagcgcgcgagggtctggtcgaaaccgtaggcatgaagccctacggacaactggttggtgccgaaccagctccacgcggtgatgatgttgcccaggatggccaggacggcaacgccgcggtcgcgcaccatgcctccccagcgggcatgcaggatgagggcgttccaaagcacgatcaacagcgcgccgttctccttgggatcccatccccagaagcggccccacgactggtcggcccagattccgcccagcaccgtgccgacgaagctgaggagcgtggcgaagcagacgacgccgtaggttttcttgacgagggccttgccgccctcagccgacatccacggcgtgcagacaccccacagcacatacccgatgccgaggaacccggcgacgaagctggcggtgtagccgagggtgatgcaggtgacatgggtggccagccagaagttcgtgtcgagcacggcctgcagcatctcgagggtgtcgccgctggcgcccaggaactgggcgatgagcagggaaaggaagccggtgaccgcggcgatggcgtttccggcgccacgcttgtcgagccactcgatcatggctcccagccaggcgcagccccagccgatgaacaccgccgacgagtagaggttggtgaccggcggccgcccctgcaggtacatgcgcatgagcaacgcggcggtgtggatggtcgccaccatgatcgtggcggcgagcacccccctctgcacggcgatcaccttgtcgcccatcatccagcccgccagcgtggccagcaggatgcagacataaaggacgcatgaaaggtagatcgggttgacggcgttgtacacctgctccatgcgcaccttggccatcgccggcgccgcgacgcgctcctggaggatctcctggtaggcttccacatgcttgttgaagtcggcgggcttctgctgggcgtaggcgaggaggacgcggccgaaggcctccgtggcgggattcgacctgccctcgcgcgtggccaccatcgcctcctggaaggtgagccagcggtcgtcggcggtttcctcgcccgtcgggggggtctcccgtggaatcaggcccgtctcgggcagggtgagcgtggcgatctggatgtacagttccaggtgccgggtgagctcgagcagttgcctctgatagacatcgcggcgggccggatccaccttggccgcctctcccgccgccttttcaatgtcggccatcttgtcgcggaactcgttgatggcgtagcgcagtccctgccgccgctcaacgcccaacaggcggagcacctggtcgttttccacgcggaagatcttgaggttctcggcccggcccttgtcggtcaggcgcgaggtcatcacatcgagcagccactcggtggccggacgggagcgtccctcggggtcggtgaactcggtgcggtgggtgatcacctggaggctggtgcgggccagggtgtcgaagggcttgagccggccgccgctttgcatcggcaactggccgaacttctcaaggtcgtagctcgagctgcggtagctcatcgccacgatcatgaacgacagggcgccgacaacggcgccggaaaccagccaaccggccagcggtatcccgggaaggcccttggcgcctggaacctggctcatgtcgtcctccggagaaagcgagacaggttgatgccgaaatgcacgagcattcccagcgacaccacggcgcacgacaggtagggcagcagccagcctggattcctcaccacctggagcacgctgccggaatcgccggcgagagcctggtgctggtagaaggtttcgccgcggtggcgcatcggctcgttcatgcggatggtggtgggtcggtccaccccgatttccgcgtcctcgaggcggatgtcgctttggaagttgcgaggtttgttggtgccggggtacacctcgtggcgaaactcctcgagggtgatcgtgtagggcttgtaggtgcgcctgaagcggaggctcaccaacctctccccctccttgggggcaaccttctgcggccggggtgagcgggtgagctgcaaccaggtgctgaccagccaagtgcccatgtcggtcccatcgcggtcggtcaggcgcaccagcgccgcgggcatgttcaccttctggtcctggtcgacgccgttgacccgcggcctttcgagcacggtgagttccttgccctcgccccggctggcgtattcaggctcgtccttgccccggtcgcggatgtcgctgttggaaaacaggctcagcaccgtcaccgaacatggcaggcgcgggtcgtcgatcggctggccggttcgcgccgccctttccaacaccgttccgggaaccaccacgaccttgtcgctttccttgtcggaagggtcgatgaacgccagttccacatgacggttgctttccacgaacgacgccttgccccccgtgaccagcgtcatggtgctttccacggcgaactcgcgggtgaggaactcgcccaccatcatgagcac

SEQ ID NO: 543 - DNA, 33372 bp, Artificial Sequence
  Synthetic Oligonucleotide
ccgcacgttccttcgacgacttgccagcaaatgccaaatcttacctcaacgctctacgggaaatgactggggttgaaatccagcatatctcagtcggaccaaaacgcgcacaaacgatagaactcacacattaatggttggactgcaagcgcatagccagcgaatggtgcttcttgcagaggggcgcctgagctcgattggactgcgaatggtgattgcggcgcttctctatgttccggaccgtatcgtcgccgttatcgatagcaccaaggagcgccagacggcgcaggaaggtatcggctttggtggggatacccctatcgtgcattctctcgaagaagctatggagtacgagcccgactcgattcttatcggtataacaccgttgggaggaaggatcccggatacatggcgggaaataatcgtcaatgctatggatacggggcttcatgttgtcagcggtctgcagcagattctgatgaaagacgagttgatccgtgcgaagtccgcagagaagggagtgcaggtatatgatctgaagaccgtgccgcacagccatcttatccgggcgcaggggagctggcagctccgcgcagcgaagaccattctaacggtcggcacggatgcaaataccgggaagatgaccgccgcgatcaggatttacgaagaattaaaagctcgtggaaaaaaggtagcgctcatcggtaccggcccgactggtatactgattagcggtcggggagtgacggtcgagtcgattggtgccgactttgtgacgggcgcaatcgaatacgagatcgataaggcaatcaacgaggggtatgatcatatcgttgtggaagggcagggcgctattacgcattgcggtaactcaccggtctcgctggggatacttcacggcacaatgcccgatgcgatgattctctgccaccacgctgccagggagaaggatatctacggattgaagctgcccaccgtcgctcagagtatcgcattacacgaacatatcatggcgccgttcaaggcgagtaaggtcgtcggtattgcgctgaacacgatggatttgggaaaggacgaagttgcgaaactcacagagactctccagtcggagcttcaactgaacgctatcgatcctatgcgccactccgcaaagctgctcgtcgatgatctggaacggtactacgagacctataagaacgataatcgcggccagcagttcatcaaggtctacgaccgcatcttctagagcttccgccctaaatcctccggttttacctcagattttatcttcacgaacgatcccagaatcaggatgatggttatgggcaaaaacacgtacaagaacagcatgttcaggacatcgagcgattcaggccgaagcgatttcatcgtgagataaaacacataaaatccgaagtagaagagaaagagcgctccttcccaccgcgatagctccaggccgttcacgaagacaggtatacagagtactgccacgccaatcatgagcggtaaatcgaagatcaccacatcgctggaaacaggcataccgccagaaccaacggcgcttgagagtccgagcactatcagcagattcatgatattgctaccgatcgcgtttccaacagcgatatcgagttcgcccttgataccggcaaccacagtcgtcgcaacttcgggtagcgaagtgccgatcgcgatcacagttaaacctatgatgagttcgctgacgccaagcgatgtagcaatgataactgcgctatcgacaagccagtttgatccgaatacgaggacaataagtcccgcgacaacatagaatgcatgtagagcccggtgcttatggtcgggctttgcatcgggggcaagcaacgcgtcgatcttcgcatctttgctttccttcctgctccgtttgacggtgataatggtgtaaactattccgcccaggataagaattccgccttctacctgcccgattcccccgtccagtgcaagcgcgagaaccacaagtgagacgccgatcataattggcagatcgatgcgcacaatttgtttcgaaaccgggagcgaccggatcgctgccgccagacccagcaccagaagtacattcgtaatgttgctcccaacgatgttcccaagcccaagatcggactggccttcgaatatcgactgcacagctatcgcgagctcaggggcgctcgttccatacgcgactaccgtcaaccccacgacaagcggcgatatgccgaaatcgattgccagccttgccgcgccgcgtacgagcagctccgcaccggcaataacacagacaaaaccgagtataaagagaagaacgacagtgtagtccatgaggaatgagttcgcgtggggctatgaggggattgtgttcacagttccggattgtattcgaatgacagcacgcaatattcactctcatgtcgtgacatccaaatcacaatgccaacaggcaaaccgaactttgataatccggcagcatgcgctagtttggaaagctatgaattcgccgaagacccacgattcacccattgcgcgaaccttgttcgccatcgttgcaggacttctccttgtgttgaccgccagccaggcgcagttcatccaagcagacacaaccctgcagactcgggaatcacaaaacctggctgagatggtgtgggaggatgtagagataggattcaacgacggcattgggttcttcacagccccggccaggttcgaaaccagcgattggctcattgccggcggtattgtcggagtaacggtcggggtgatggtgtacgatccggagttacgcgagatcagcctacgcaacaagcgaacatcgcccacctggcgcactgcgctcgattggggagaggattacgggacagtcgctgctggctgggcgattggaggaggattgtacattaccgggcttgcatcggactactggcttgacggcgctatcggcggaaaaggggaactgcgtacactcggacggctggtcggtcaaagcctcacgtattcaggactcgtcgcggttatccttcgttcgcttattggaagggagcgccccaatgaagcggatccggaagagcgaaatcactgggacgtggatttcttcaattgggacgcaagcgagaacgcattcccatccggacatactaccattgtattcgcaatctcgaccgcaatcgccgagtacctcgatacatggctcgctcgcgccgtgatgtactccgcagcaggtatcggcacgtacacgcgctttatcagcgacggccattggacgtcggatatcgtcgcgggtgctgcgcttgggtacttctctggtagatatgtcgtcgaccgggagcgggcgcgaggtatcccgaccgactcgaccacacccgaagtgtcgttctatcctgctccgaatagcgtccatatggtcatccgcttctaaatcaagctcccccatttctccccacctttcccgataaatggtataaagccttccatacaagcaagttatcgcctttctgctgacctagcctcgggagaccggcatctttttttgaagattccacgcaaatctgcccgattatttggaagggtcaggtctccctgtaagtcgctaatataaaacgatttaccgagcatcgactgccgaagcgcgctcagaatgttccacttttacgttctcatctcgaaaaaaagcacttgactctgagttaaaatggtgtgaaattggaggaaagtggtatattgtgggtcaaagtggtggactagtattgaggtcctgtgactggctttaaaggcaaatacgaatactcgatcgatacgaagggtcgcttgaaccttccggccaagatgcggaagcatatgatgccggaagcgaatggtaccttcgtcatcacccgtggtatggaaaattgcctgtacctgtatcccctcgatacatggagtaaggtcgagtcggaactacgcgaaaagctgaatgtctatcgtgaggaggataggctctttctgcgcacactcttgatgtgggcgcacgaagtaacgttggataagcaatcgagaatcatgatcccgcaggagcttctcgagtttgcctcgcttgatagcagcattgttatcatcggagcgctcgacaagatcgaactgtgggcgcctgcagaactggagaaatatctcggcaagttcgcagagcaatcgtatgaagaagtcgctgcccgagttatgggcggtatcgaataagagccatcggattaccatgtatcatgtcccggtattggctgaactagcagtccaatacctcgttacgaattcggacggggtctatatcgatggcacacttggcggaggaggtcacagtgctctcatattggataagctcagtcgcaacggtctcgtaataggcatcgatcaggacgaagatgctgtgcgattctgcaaatccagatttgccgatgaaacccgaatcaaaatagtccacgaaaacacagaacatatgtcgcgaatcctgcaagaaatcaatattgacgcggtcgacggagtgctgctcgacctcgggatttcttcccatcagattgatgagggtgcgcgcggattttcattccgagaggacggtccgctggatatgaggatggacttgcggaccgtcgcctcggcgctcgatatcgtatcgacggcaacagccgaagagcttacatcgattatcaagcgatacggagaggaacgctttgcgtatcagatatcgaaacgcatcgtgcagcgccgtaccgaaagagcgatagataccaccgatgcactgaaacacgtcgtgttagaggtggtgaaagggccaaacgcgatgaagtcggtagcgcgcgtttttcaagcgttgcgcatcgccgtgaatcgcgagttggacgtcctcgatgagattctggaagcgacgtacgcatcgttgaaagtaggcggaagatgtgtcgtgatttcttatcactcgctggaagacagaaaagtgaagcagtttctgaagcaggaagcgcccgtacaaaacgagattgacagactatataacgctacggcgcctggtctgttcaatctgataacaagaagtgcaattcaacccgatgaagatgaagttcagcgaaacaatcgcgcgagaagcgcgcgactacgcgcggcggaaaaagccgtctgagaatcagcagagcgaatttctgttcgatcacaacgtcgatgttcctctgacgaacactgcgtactatcgtaaacccgggaagcagggtttcgaatttacaacgttcaatatcattgtgattctggtattcgcaggattgatcgcaacggcatacatctcaaatgttgtcgcggttgacgatctgatgatccagagaacgaatcttcgggaaacggaacagaagctgcttcaacagcgagaaaatttgcgcgctgatatcaacatgcttacaagctacaatcgcatccacagtatcgcgctagaaaaactggggctcgtagacgctaccgaacgcccttatgtattctccaagcccgaaggcgactaacggcatagaaatgaacgacccaatctcactcggaatatcgacgccgcaggaagaatctcagaaaccgaagaccggtttccgaatgagactctacttcctgttcgttgtgtttttgctgggatacgcagttctcgcagtgaggttgtttgttattcaagttcgagacgccgacaagtaccaggagattgcacatctacaatataaaagcagagagccgttagagccggtcaggggtttaatctacgatcggaacttatccatccttgcatccaatgtcacagaatataccgttgcggtggacccaaaggtaatcgaggataaggattccgtggcggagatgctcgcacagtatttaccaggtacaaaagcctcatacctcgagcggttgaatacaaagaaatcgcgctatgtgattctggaaaaacatatctctgaatcgaggatactcccgcttaagcaatggaactactacggtgtgcgttttgatgcgatatcgaagcgtaaatacaacttcaacgatctcgccggcccgattatcggatatacaaatgtcgataaccgcggtcagagtggaattgagcttgcgtttaatgaagagctctcaggcgaagaaggctttattgtctaccaattaaacgcgaagcggtacaagcgtccggaggttgagtatccgtataaggagccaataaacggccgaagcatcgtactcactattgatcacgcatatcaatctattgcagaggatgaattaatcgcaggcgtcaaaaggcatgaagccgtatccggtagatgcatcgtcatgcacccaaagagcggtgagatccttgcgatggcgaattatccgagcctggatcctaataaccgtgcggaatatacgcccgaaaaggcgaggaatagagttgttacagatttgtatgaaccgggctcgacattcaaagtcgtaaccatgagcgccgcgctcgatgaagcactatacagtccggaagatgaaatcgacgcagaaaatggcaggtactatcatacgccgaacgaaaagccaatcgtggatgatcatgaatatggttctctgacactccgtggtgcatttgagcattcttcgaacatcgtgagtgctaaaatagcgaaagaactcggcaaggagcggatgtatgaatatgcaagaaacttcgggtttggaattaaaaccggtattgaactccccggtgaattaagcggggaactacgtaaccctacgtcgtatgatgccacaacgcatttatatatggcctttggatacggcctggccgcgacctctctgcaaatcgcttgcgcgtatgctgcgatagcgaacgacgggatcctcatgagaccgtacatccgaaaatggatgatcgatggcgataggaatattatccatgagacccggccacaaacgatccgccgcgttgttagcagtgagaccgctgccacgatgagaaggtttatgcaaggcgtcgtagactctggtaccgcgagaaatgcgagaatcgacgggatgagtataggcggtaaaacaggaacatcgcagcggctggtaaacggttcgtattcgaatacatcacatgtagcatcattcgtgggcttctttcctgttgaggatcccaaggttctgatattggttatcttggactcgccgcagaaaggctactacggcggtacagttgcggctccgatatttaaaaatattgctcaacgtattatatcgtatagcggtgaatttgcgaaagtacccgacgctgtttacgcctccgagagcgggaataaactaaaaaccgttcctgacgtaagagggttatcacctgcttcagctgctttgctattacatcagtacgggctcgcgtattctccagcgcaggatagtggtatcattgtggcacagaatccaaatccaggaaatacactcgcagagggcggaatcgtacaatgcgaagtggcatcagatacgggaaatggtgatgtagtgtccatgcctaatcttgttggaatgactgtgaggcatgctaacacactgttaaccacactcggtttatcggtagagatacatggtagtggatatgtaaaacgtcaatcgccagaacctggcagcaaggttgaagcgccacgctgtacactatgggcagaggctgcaaatatatcagcaaatctatactaagacgatgtttaatcaactgaatccaaaaatgcacgacccaatggccccgaagagattatcggatatcatctcggatgttccggttgtgcagttatttgggccggttgatgcttcggtgcagggaattactactgattccagagaagtgaaaccggggtgggtgtttgtcgcgcttgatggtgagcatgtcgacggtcacaagttcgtgaacaaggcgattgaaagcggcgccagcgtcgtagtgattcaggaagcccaatacgaaaagtctttgaaggaactccttactccttcatatgtgcagcacaatggtacaaccgtcgtgattgtacgatcaacaagaatagcctgcgcaattcttagcgatagattctacgactcaccggcgcaggagatgcgttccgtgggaattacgggaaccaacggtaagaccacggtttcgtatttgttggaatcaatcattgcgcatgcaggtcttaagccaggcgtgatcggcactatcgaatacagaagtgcaggaaaagcaacgcctgcaaaatacactactcccgcgcctgaaatactccacggagttctgcgagatatgaagcgcgataattgcgatgcatttatcatggaggtctcctcgcatgcactatcactcgatagaatctacggaatgacattcgatgtttcgatcttcacaaacttgacgcaggaccatctcgatttccacggaacgatggacgactacgcatactgcaaggcaagactctttagtgatcatacagcccaagtctccatcattaataatgacgatccatatgcaagcgtgatgctgcgaagagcgaacggaagaaaatggacatacggtacttccaatgattgcgattacacgatgtcggttgtatcgaatccatcgaatgggctgatagttgaaataacacacaaggatgaaaccgatacggtaagttccgaactgcaaggattttttaacgcttacaacattaccgctgcctatactggagcgcttgctcttggaatagagcgcgaagcaattatacagggcatccgagccatacagaacgtaccgggaagatttgagctgtacgaaggccccgacgggaaacgagctatcgtcgactatgcacatacacctgatgcattaaagaatgttttgcaggaagcccggaagattataccagataacagaaatctcatcctggtatttggctgtggtggtgatagagatattgacaagcggcccaagatgggtaaaatcgctgctgaaggaagcgatactgtaattgtcacgaacgataatcctcgaacggagaatccggaagaaattgtagcgcagattctggccggcattccagagggttattcgaacatatctgtaatctacgaccgtgaagctgccatccatacagctatagaaaagtcccagcctggtgacatagtgcttgtggctggaaaggggcatgaagaataccaggtaatcggtcacctgcgtagacaatttagtgattcctcaatcgtgaaagatgcattaggtatcacatgatatgatggaacgattctacatatcgcatttgctgcagattccggctgtttcgcacgtaggtctggcagataggacgaaagagcccgtaaacaacatcgttatcgacactcgaaaagtgaaagatggagatttattcgtcgctataaacggggctaacatcgatgctcatgacttcattgatgaatcagtagtaagtcaggcacagctttgtgtggtaagcaaggagtggtatacgcaacgcggtcatgagtatcacaacggttcatttcttgtagttgaggatacaacgaccaccctcggtcaacttgcacgattgtacagggatgaattccagataccggtgatcggaattacggggagcaacgggaaaaccacgacgaaggagatgttgaaatctgtactgtcagtaaagcatcaagtttgtgctacaagcggtaactataataaccttattggcgtcccattaacgttgtttactctgcgcagaaatcacgatatagctgtagtcgaaatggggacgaaccggccaggagaaattggagccctttgccagattgcaaatcccaatgacggtattattacaaacatcggatatgcccatatggaagggctgtcaactctagaagatgtagctaaagaaaagacagctctgtacaagtacgtagcaaatcgtggtatccgatatattaatgcagatgattcatatctcgcctcgcaaaaggtagtagccgggcaaaacgtaatctttggtatggatgggaatgctgatgtaagaatagcaggctattctacgaacgattccggtagtacggtaagtttagaagtggggcagaatacgagatgtgatgttagtatcccgaagcttggtaggcactttgcatacagcgttgctggtgccgttgctgtcggactgcagtatagttgcggattagatgaaatgaaagaggcactcagcgcgttccatggtgctcccggccgaatggatgtattccgtgttggtgagaacactgttattgacgatacctacaatgccaacccaagttcggtcaaagcagccgttgatactcttgatgaccttacaactgattgcgataaggtcgtagtgctgggagatatgctagaactaggccatcgatccgctgaatatcatcgggaagttggtgagtatatcgccggatcgaaagtaatgacactcatgacttatggcagcgacagcaaagaaatgagtgacgccttttctgaaatacgcagcgtgaaggccgcgcattatactgatataggtgaacttacgagaacactaattgagtgcatgagtgtccggactattctccttgtaaaagggtctaggagcatgcacatggaactcattgtagagaaacttaaaaattctgtaccggtgacctgatgctgtattacctactggaatatatcaacgaagcattcgcaccaccaggtttcgaagtgtttaagtttataacatttcgagcggctgcggctgcaattacggcacttcttatgaactggttagtcggcgcgaaactaataaggctgctcaagcgattgcagataggggagtcggcgaaggttgaagcaccgaagaatcatttggcgaaagctggaacgcccaccatgggcgggttgatcattattagctccattacgattcctatgctattgtggggtgaactccataatacatatgtatggctcattttggtaacaacggtatcgcttgctggtgttgggttcctggatgactacctgaaggtagtaaagaagtatccgaaaggcctcattggggggtataagatcgtcggacaggtccttgtgggggctatggtgggtagtgtcctttacttttccccagagttcgcggaggtcaattctttgacaactgttccgttctttaaaaatctgaacttcgactatttgtggctctatatcccagcagtgatatttgtaataacggcaacctcaaatgcagtaaatctatctgacgggttggatggtctcgcagtaggtaccattgtaatagcatttctcgctattgcagttataagttatgtctcaggacgggtggaccttagcgactacctaaacatactgtacctaccaggaagtggcgagttggccatattcagtgctgctatagtgggtgcaggacttggatttctttggtacaacgcataccctgcccaggtgtttatgggtgatacaggatcattggcattgggcggtgcattaggtgctacaatgatacttatcaagaaggagcttttgctacctattctcggcggaatattttttgcagaaacagtctcggtcatcatacagcgtctatatttcaaatatacacggatgaaacatgggcagggtcgtcgcgtgtttaagatggcaccgatacatcaccatttcgaacttgaaggctgggctgaaccaaaaatagtcgtccgattctatattatcgctgttattctcgcaatcttgagtttagctacgtttaaggtacgatgaagcctaagtataagaaatactccgtactagggtctgcaagaagcgggatggcggcagcgttatttcttaagcacaagggaatggacgtgtttgttagtgagcttcaggaagcagatcattttatcgaatcgaagaagcagtatgatgaatacgatatagaatatgagtatggtaagaatagtaaccgagtattggattcagactgcatagtagtgagtccgggtatctcgctatctatccctctcctggagacagcgagagagaacggaattcctattgtcagtgaaattgaggtgggctcatggttttacgatggtaccatcattgcaattacgggtacaaatggaaagtccactacaacagcgcttattggctatttattggagcaagcaggatacaattgcatggtagcagggaatataggctatccatttactagagcgttatatgaatctgggccgtgtgagtatgcagttctggaagtaagcagctaccagttagattcgatcaagacgtttcatcctaatgttgcagtcattactaatatcatgccggatcatttgagccgttacaataataactttcaggaatacgtttcatcgaaagcgagaatactggccaacatggctgcagacgatcatttggtctataatgccgatgatacgaatgttgtcacagtagtggaggaggcggaaaccaacaagcactgctatagcagtacggtgcgaggtgaatgcactgcgtataaagtcgataacatgctgatcattggcgatagttcgggatcgatcctcgaaatagatgtcagtaatatgatcctggtgggtgaacacaattatcagaatgtaatggccgcgtcaattgtcgcacggatatgcaatatgtccaaggaggtaatagaagccggagttacttcattcaagggtttacctcacaggctcgagtacataggtgaaacgagctcattgagatggataaatgattccaaggctacaaatgtagcgtctttggctacagcactgaccaccttaagcggttctaagatctgtttaataatgggcgggcaaagtaaaggcgaggattatcgcggcctgttggatttaatgttacaacaggtagtgcatgtgatattgatcggaactgctgcaagtgagatttatgaggtaatacgcgattctatactctctacttttgcggttgacttggagcacgcagtcaacatagcagggagtcaggctgactctgtagacgtaattctgctttctccaggatgtgccagctttgatcaattcaaagattatgaggagcgtggcgataagttcagatatttagttgataggtacattaatgaatgatgttagtgctgtaaaaattggtagaatagacctgtggctctttggcgcagtgcttttgctgctggttttcagcgcagcatcagtttacagcgcaagtattactatctctgaaattcgtcatggagcgccagatgcagtttataagagtcacatactaagagttgttcttgccctcgtagctttgttgattggcgtggtggtagactatcgcatatacatgcgcttgtcgaagattgctataattatgggtgttgcgctgttggtattaaccttgtttgagggtactgtcgtcaatggtgcacgtagatggttggagcttggaccactgaaatttcaaccatctgagttcgtcaagtacgcattggtatttcatatcgcgacgatagctgtaatgaagaatgagagaatcgggactttcaaggatggttttctcaagacctatgcatggataatgatctcaactgtactgattattgtgcaacctaattttagtactgcagctgttgttttactaatcgggacagttatggcttatgcttgtggcgtaaaggtgaaatatattggtgccagtttagccgcagcattaccgttggtggtgttgtatgcctttagcgcaccgtacagagtgcagagaattgtatcgttctttggcctaggtgacggttcagacacaagagtagatgcctcacgatatcaggtggagcaagcgatcattggattgggtagcggcggtattatgggcgtcggtatggggatgagtaaacagcgtgagttgtttcttcctgaatcgtacagtgattttgtctttgctatcgtcggtgaggagtatgggtttatcggcgcattactgatactatttctgtttgcattgattacattgcgtggtgtgagaatcgcaaagaatgttcaggatgattacgggaggtatctggcatttggtattactagtgtgatagcgatatactcgattatcaatgccggtgtgtcggtgggcctgctcccaacaactggtttaccgatgccgtttatcagctacggtggaacatcccttataattagtggatatgtcgtaggcgtactactaaacatatcgacaaatacacggatacggcctcgggcctatgaggaggctgctgccgatgcttaaccggaatccatataaagttgtgtttgcagccggcggtactggcgggcatatatacccggccatagcgatagcaggtgagcttcaattggtttcgccccacattgaggtcacttttatcggtaccacaaacagactcgaatcaaagatcgtcccaagtaacggatacacgctgaagttcatcccggttatggggctttcgagaagcttgagtatcaggaatgtctatgccatcatgcttctcgtttatgccgtaataaagtgtattggtattctcagacgtgagcgagcgagcctcgtcgtaggaactggcggctatgtttctgcaccaacggttatcggtgcactcctatcgggaatcccagtgctcatgctagaacagaatgcgatacctgggatggtgaataaatacttggctaagtacgcagaagaggtgcacttgagctatgaggtgacacagaaacaccttgaccgtaaaacacattccattatttcaggaaatccaataagacgactcagtgaagttgatagagagtctgcgcgtcgtgaaattggcattggaggggataatcgaactgtacttgtcttcggtggcagtcttggagcctctgccattaattcggttttgttagaacacattgatgacattgtagagtcatctattcaaatgatatggcaaacaggctcgaaagactaccaaaaggtggtcgatcgggttgatcagccaaatatcagagtctatgagtatatagatgatatggcgtcagcatactctgcatgtgatcttgttgtatgcagggcaggagctacgacaattgccgaactgcaagagatgaacaaaccagcgctgcttataccatatccacatagcacagataaccatcaatattacaacgcaaagggctacgaagagatggggatggggcttgtgattgaagaaagtgaaatacgtgaacttgtccccaggatgatcgagtatgcaatcgatgacggtgggctggaattgaaaagaagagatggaacatcaagcggatcaatgaacgcacgtgaagaggttactgctagtgtaatgtctctattgaagaataccacggatggtacggtgaatcgatgcggatagccaatatacacaacatacactttatcggtattggtggtatcggtatgagcggcttagctcatttgatgctcaatgaagggtatcatgtgtccggctcagatatgaatgagtccgagaacgtgctagatctacgtaaagcaggtgcgcatatcgaggtaggtcatcgtgccgaaaatgtaacagatgctgatctagtagtatatagctccgccgttcaggaagagaatgttgagttagctgaagccagactacgtggaatcccggccataaagcgcgcagagatgcttgcggaggcaatgcgattatatgatggtattgcagtatctggcactcatggaaaaacaacaacgacatcgatgttgggaagtattcttatagaggcacagcacgaccctaccgtcattgtgggaggtaaactacatgcatttggcgataccaatatcagagtcggaaatggtactacaatggtagttgaagccgatgaatatgatcgatccttcctgcgattgaatcctgcaattgtagtgatcaccaatatcgataatgatcatctcgacacttatgaaacaattgaccagatcgttgaggccttcaaatccttcgcaaataaagtgcctttctatggctttgtgaccatatgccttgacgatgcccagctacagcgattattgccactcataaatagaaaggtagtaagctacggtataaactctcaatccgattaccaggccaaaaatatcacaatgactaccgatcgtactgaattcgacgtcgtgcatgacggagaggtacaggggagaataggcatcagaatgccaggagagcacaacgtacagaacgcaattgccgcaacggctgtagccttggaactaggtgctgatttcggttctattcagacagcgttgaatgaatatggcggtgtatttagacggtttgaattaatcgagcaagtcggtgaaacacagttcatcgatgattatgctcatcatcctactgaagtaatgagtacgctaaaagccgcaaaggcagcaatgaagaaacgtgttgtctgtgtgtttcagccgcatacctactcgcgtactcgagatcagtatcgagaatttgcacaagcctttatacttgctgatatacttattgttttaccagtatatcccgcaagagaggaacccatccaaggaattgatggccatttgatctctgaaacgtctcggcgttatggtcacaaggcatccttcgctgtgcaaacaaaagaggaagctgtgagcaaagtaatagaagttataaaagaaggtgatgtgtgtatcacgatgggtgcaggagatgtttacaagctgatgccagatataatatccaagtacaaagaaggtgtgggataagtgaacactaagctgccatcattgccagcgagtaggatatcctatgattatccgggtagtgcattgtgctctatgcgtaccggtggtcctgttgatatcttggttgatgtgggtagtatatctgaccttaatatactaatgcgagaactgaactgggaatcaactcgatatctcatattaggacgaggatctaatgtgcttatccctgataatgggattcggggtatcgtcataagacttgaaggagaatttacacagcttctttctgatggcgatatactttatgccggtgcaggagcaagaatatccaatctcgtaagctacgccatccgtagggggtattcgggatatgagcgtttagcaggtatcccaggggctgttggcggggctgtgataatgaatgcaggtgcacatggggctgaaatcagcgacaatgtcatatccgtcgaaacttttacaagagaaggtctgagggcgtactcgaaagaagagtgtcaatttgaatatcgtacgtccaacttacaaggtcagattgtattgcgtgcaatattcaagtgtgaagcgggtgatacaaacaagatgaggggaacccgaagtgagattctggccaagaggaatgctagtcaaccagttcaatggcctaactctgggagcatatttaaaaaccctaagtctgggtatgccgcgaagtatctagaagaggcaggacttaaaggatataaggttgggggggcagagatatcaaataagcatgcaaatttcatcattaatactggatcggcacgtactcaagatgttattgagctaattaagcatgcacgtagaaccgtttctgataagtatggtgtcctactagagccagaggtaaaataccttggctctaaaggtgaaatcgttgagggcgaggtgtaaaatatgctgatgcgtagatttcaaagatacgtatttctgtttgtaatcctcctcatattggtcgtaggaggatggttctcgatgagcaagccagccgatagcacaaagaatatatccattgtgggctgtcaaatgttgaacgaatctatactcaaggcacaaatcgattcggcattccaaggcaatgaggagcatatagcagaacgtattcgcgagtttgttgagcaaaaccacattgtggatagagtgattgtaaaggaagagcacttcaatgatatagtagtcgaaatccatgagagaaagccggtcgcgactgtaacatcagcttctggaaaggtccttgttgatcgcttgggtaaaccgatttcgaatgagatacgtggtgctatgaagacacttccaaagatcgttttatcagaagagggcaacgtatctaagaaatcgtcgcagcgtgacacgaagttacttgcaacactgcttcatgaacttcatacgcagcatagacagatctatgacgtcatatcggaggtggtccaataccgatcatcatcatggatgatttatcgttgcgacttccagcacccgattattgtggctcccacaaagaagaacatacattctcttgtgaatactctctctttactgcagagttctccgcatggagatgaaagtgagaccgatatcgaatacatagatcttcgcttcgagaatcaggtcatttatggtaaaaaccaagaatcagttgtaaatagtccccggagaagttaaatgtcggacagaatatacgttgggttagacattggtacgaccaaagtatgtgtcattgtagcagccgtcaatcaagatggtttagtgaatattctaggcgtcggcagagctgataacgagggtatgaaccgcgggactgttacacatattgacaaaactgtccgatcgataaaaactgccgtacaggaagcagagacacaagcgggcaccactataagagccgtgaacatcggtatcgcaggggaccatattcagagctttcaaagccgcggagtagttgcgatcagcaactccgacaatgaaataacgcgccgtgatgttgaacgtcttcttacggatacgaagaaggttgccctgccatctgatcgacggataatacatgttattccgcaggagtttattgtcgatggtcaggacggtatttacgatcctgtgggaatgtccggcattcgcatggaagcaaacgtccacataattactggctctgttacagcaacacaaacactctataaatgtgttgagcgagccgggttggaagtaaacgaccttgtattagaaccactggcttccagctactcagtgctaaatgaagaggaaaaagaagtcggtatcgtcttggtggatatcggtggtggaaccacggatgttgcaattttcgaagacaagacgatcaggcacacttccgtattggcaatcgcaggtaagaaagtgaccgaagatattcgtaaaggactcggtattcttaatgaggatgctgagaagctcaaaagagaacatggttgtgcattcttgcccgaaatcgtgaatgatacaccaatcacactacgtggtatcggtggcaggaaaccgatggagatatctaaaagccttctgtgtcagattatccaacctcgtatggaggaaatatttgagattgtggggctggagattaaacgatccggctatagcaggcatctccactctggcatagtcctgactggcggaggttcgctcataacgggtacaacttcgttagcaagagaagtacttggaatgcctgttaagctcggtctgcctgacggcttttctggtggtctcaacacagaagtagaaaatccgatatacagcacaggcatcggattgatcatgcacggaatgaagtaccaggcttcggtattgtcgaaggagtacaattcgaagttcggcggaaacatcttcaagaagatgatcgactggttcaatgatctttgataataacgtttgaaactatacacgctcaaaaccgaggagggtttatggctattgtttttgacagcacactcgatcagcgcgcgagtattcgcgtcgttggagtaggtggcggcggcggaaattccgtcgaggacatgatcgcacgaggtattaacaatgtggatttcattgttgttaatacagacgttcaggcactcgagagaagcaatgcacagtataaagtgcaggctggaaagaatcttacgcgcggcctaggtgccggcgcagatccgtcggtcgggtaccgcgctgtggaagaagacaaggaggagattgcagcctctctatccggcagcgatatggtattcgtcaccgcaggtatgggcggcggcaccggtaccggcggggcgcctgtagttgctaatatagcaaaaggaacaggttcactcgtcgtaggtattgtgacgaagccgttccacttcgaaggtcgccggcgaatggcccaagcagaagaggggattgaagagctgcgtaaacatgtagataccctcatcgttatcccaaaccaaaaactcctgtcgctggtagataagaatactccagtaacagacgcctttggtatagccaaccaagtgttgtttaacgcaacgcgtggtattgctgaaataattaccgtcccaggattggttaatgtcgattttgcagatgtccggaccacaatgcgcgacatgggcgatgcattaatgggtagcggaattgcgaagggcgataatcgcgcagtcgaagcagctcatcaggcgatatccagtcctttattggacggtgtatcaataggcggagcgcaaggcgttttaattaacgtcacaggaagctctgaactatcgatgctggagatcgatgaggcaagttcgataatcattgaagctgctggcgaggacgccaacgtgattttcggagccgttgtcgatgagacaatggaggatgaggtcatggtgacagtgattgcgacggggttcaataagcggaacgctgcgatatcacggaatcagattgggcaaagacagcccagtacgagctccaagatcaatcatatacccacgggcgtgaatgatcttaaggaccttgatatgcctgcgttcatgcgaaaaggtaccttgacgcttacgcaaaacgaaagcgaagacgatcagcatgatgacgctggccaggaggaaagaagcaaaagcgaccgtccggcattcttgcgtaaaattatggactaatccccagcccgaaaacaagggcaaacaagagtaaatgaaaagtcgtcatatgtggcctgtacggcctgtatatgacgatttttctgtatttggtcgtatcatctttggatgatgctttctgatgatttgttgcacaaatgttgcacgatcgaaaaacgtgcaacaattgttgcatgtttcacctgttttcctatatttggtacatagctgattctcacaggtcatattggcatggagcaggaggactgaatgaaggtgacattaagagagcggacagtgaaatctggaaggacacaactctacttcgatatctactatggcgatggaaagaggaaaacgaaggcattcgggacactatccggcaatagacagcaagacaaagaagcaaggcggatcgcaggtgcagctcgttcaaagctcgaaatagaattattgaatgaatcgcatggcttccacaaacctttccagttagagcgcaacttcttcgaattcttcgatcaagtcatggacaataaaaaggggaactatggatgctggaaatcgactcgctttcacctagtaaattttgtcggtaaggagagccttcattttaaaactatcacgcctcaatggttagagtccctcaaatcttatctcttatcacaagtagctccaaatacagcaagagggtactacgctgcggtacgcgaaactctcaagcgggcagttcgtgaggaaataatccctgacaatccgagcgacaagatcgacaacatcaaaccgcgtaactcatatcgcccttatctgactctcgaagaattaaacgaactagcggtagcgccatgtggtgatccagaagtagaacgagcatttcttttttcttgtctcactggattgaggttgggagacgtcaggcgtctgcaatggaagcacgttcacatgaacaagatcgaaatagttcagaaaaagacctccgaaccgatctacctatcgttaaacgatcaggccattgaattactcggtcaacgaggtgacaatgaagagcggatattcgccataccgagcgattcacatctatctttaatcatgcggacctgggcctccggtacgggcataaacaaaaagattacatttcacactgcgagacacacatttgccactcttgctctaactaatggagtggagatttatacggtttccaaactcttaggccattccagacttgagaccactcaagtgtatgcgaagattatcgacgcgaagaaggaggacgctgtcaagatgttacctaagatcaaggtgaagtgaaacgtgtttctatttacctgctacacaggattgaggattggagttgtgcgctcgttaacatggaatatggtgtacgggaatcagatcgagatagctcaggagaatccaaaggacccagtatatttaccactttccgacacagcgcgtacgtatatgggcaaaccaggaatggacgacaatccagtttttatattacttagtaattcgcacttatcggtaattttaaaaacgtggagttcgccagttggaatgaagaagaaggtgaccttccatgtagctcgtcacacgtttgcaacactggctctctcaagcggtgctgatatatacacagtctccaagctactcgttcattcaagactcgaaacgatacaagtatatacgaagatcattgactataataaagtcgaaacggtaaatatgttgcctgatattgggataggttaactaaatgagggtatgatagctatgaatggattaccagatgattattatcacgaagatcagtttcgaggacactgcaacaaactgatggattcactgcgacaagagtataaggaagagcttgacaaagtaggttcatctgaaataacgcccgaacgcgctggagatatttttagggtagcctgggagaagttcgacaatgaaatgactcctttcttgttttatcgcgctatcactgtaccaaagaatgtgatgagacatcttaatattgacgatcaggaactttctgatagtagatatgcagcattatataagtcaaaacaatggtgggatgccgttgaagaaatttcaataaattcaatccccccacctggttctttaatagacctaatcgcacaaccattgcagttgttttcaaatgtagaaaaaatccaatacgtcgattatgttaaaaccatagtggttcagaggtacttggtaggtgtgggtagtttacaagatatgtacatgaaaggggccgttattgatccatttcctgaattgatcgattggatcaaagtcaatgccaaatattggtccagatactcggagactaaatcatctaacactgtctactcttatggtcattacatcgagaatgagtctggacgtcggttgttcaactggaccgctaaattagtccaattggcaaaggttctagtggcaataaagtatgaagatggttctgagtttgtctcggcctcttccggagaacttgcgagattggcagaagtccgcatcctctaccatggtgataagatcaaggcaaattctcttgagacatctattaagcgggtttttgatggatacgagtccccatctgccatcccagatggtgccgtagtagtcatcaaacaaattttgctaaacagcaacaaatcttaatcccaacaaaattgggaacaatattggtgtagttgctgacctacatttcctgcaagcaaatcataagcatgaacaatgcaggaagacatctctcatggaaaaccaactcaactcacggctcaatgccattgaggagaagcttgaggacctctcagcatcacaacgagacgtgctgaccttccaacaagcggctaaatacctcgatttcagtccttctttcttgtacaaactcacctcccaaggtagaatcccgcatagtaagccgaatggcaagcgtatctacttcgatcgccgggagctagatcgctggttgctgcaaaatcccgtgaaaacgcaggacgagattgaggcagatgcactttccttcacaaagtcggggaagcggagctagtatcctgtgtccctttattaataagtgggacaaggatacagtttctgtatccgtactcgtgtacgatacagtcaaaatagtgcactccaatggtgagtacgaggagattcctgggcgactaacaggcgttgtaaatcgtcgtgatcaatacgataagctactctcctccatagggaatctagtcaacctggacgtccgcgttactgacaagcactgtactattcgaggctcactcagcaggttctatcacggaagcaatctttacattctatccaggcaggaaacaaaggccgcgattgagcagatatctgcactcctgggtctcgatatcagttatgccaaattaacgcgcattgatgtcgcatcaaatctcatcatggatcatcctgtctcgagttacctcaagcttcttcaatccatcccccgttacaagaagtcgctcataggcctacctgaaagtcctagtctctacttttctaccactcaaagaaagctgcttttttacgataaaatccatgaactcaggtctaaaagagtatctgtacctgctgagttcagggaagcgaacctgctccgatacgaacttcgtttcaatcgtcacctgccgcggcagttctcgggaaaacgtgtgacgtgcgctatgttgtacgatgaaaggttttaccaaaagctcgttagccgttggcttcaggagtacaagaagattcgaaaagcccggaagccgaaagttggacacagggatatcaccgattgtcgtgtgttgaattcatacctggcgacgattggattggagaaagttggcgctgacacgatgcttgatgatctttctattcggcgcagtagtggccatatcggcaaaacgcagcactcccgcctcaagtcgaagatatcggctctcaggtcgaatgaggcccacacagtagagcacgagcttgcaagagaactcgatgagaaaatgcaagcagcagcagactacctgcattcgcaggcgtgaggtacctaatttcgatgacgaacgtttgctgggactcaaaaaccgcgcgacaactgacttctcgttgcaatcccaacatttttcgattgaggacgagattgcattcaaagttaggttcttgtaggttctctctctcagcccttgcaatcgacattacatccgtaactggggctgggatgacagtttacgcatacaattctccacagttaaattgcccgccactgtaggcgtatacatcatcacagttgcatgattgcaggctgtgataagtagctactccattcgggtgtcattcggctccccacgtttcttgaaagatgtgtcgtttcgcccgtttatcctctttggcattcaatgcgatactacaagctgtcgtcttcccctcctggctcagtactccaattgcgataccccgaccgcgatatcgattcgggactgtgatcgttccctcttgtaccgatggttcgttttttacgtgccaagtgtcacagatataggctcccagttctcttattataaggagaccttgtctcttatttagccacttccgatcttgaattgctctcactccatcaacagttctcaatgctctatgaactacaatctactcgatgaaccctggatccccgtgctatttagggacgggcgctatgagcgtctcgggattaccgatacactcaccagggcacatgaaatacggcaggtagccgccagcaacccaatggaccgtgttgcggtcctgcggtttctgcttgcactactctactggtgcaagggcaatccgcctcgtgatgcccagacacagctacatgaaccgcttccatcaacctggttcacagcacttacagcacatcgaggtgtgtttgagttgtttggcagcggtaaacgtttctaccaatatggcgggctaggaaagaagaaaccgttatccgtgaactcactcatccatgaggtaccgacagggacgaatattaaccatttccggcactcgatcgacggtgaagacggcctctgccccgcttgctgtgctttaggactcatccgcctgccactattcacaacccagggaggtcagggtaaaaggcccggagtgaatttcaaacccccaatctatctcatcccggctggcgataatctggctgagacgttgcgcttatcctggatgcagattaagaacctcggtgccccaatatggaatcgagacacctaccacatcccgatagacggtgaaatcttgtttttggaggcgctgactgcactcccacgcagggtgtggcttcgcaatccggatatcgaagaccggtgcatctcatgcggtagattcacggaccttgttagggaatgcgatttcgaaggcgccccgaaaagggagctacctaatagctggcaggacccgcacgttgtgtatttcctcaatgaggatgagatccgctcagcgcgtgcagataatactatgaagcctggtgggttcaggaccgaccgtccctggtcgaggctcatggagcgctttcttggtgcagaatcccttgcctccagagataccgatactcgcttcctgatcgtcggcttcgcatctgatcagacgaaatacatcgacgcttgggaacgtacattcacactacctgccaacaccaacaggatagcagcatccgatgcgatagacagatggtcggctgccggcgcaagaatgccgtggcggataaaacatccatccccacagcgcaaaccatcatcgaacgaaaaggctataattggctccatccggccgcatatagaacacacaatttcctcgaacctgacagagcttgttacttgggatgacgaatcctggaacgaggcatccatggagtaccgcaagctgatggagggagttgctgaatcactatccccaggttacagtaccgctgccgttcggcgccggggatacctgtctcgcgtattacctgatttgagccagaaacagaacgacgtttcagagaccgaaccggaggatgaggaagatgcagattcttgaacttgaaactcgaggcactacgggattcgtcggaaaacttacggccctaaaggagggcgatcttgccgtacttcgcggattggcaaatcagccgcttgacacgagcctggaaggatttgatctctttaccggattatggtgggggttgcggcaggcggataaatggaccccaggccgagaggtatcgtggctggcatgtaaactctatgcgcagaacccacaacctcagcaagacggagcggcactcccattccttctgcgccaatatatgatgagtcaatatggaaatgatttggatgggagagaccggttctcgcagaaattggaccgtctactcgcatcctcgtttgcagaactggaatcccaattaacatgggcaatccgactcgtacgcagggacgaaccaaaagcgaaaaaaaacccagagagcaatgtcggcgatccccggggtttcgattgggtacatctcatcaacagcctttctcactgggatagaagcactacacgcactaaatgggcagaacaatttctcaatattcataccggagtatagctatgtacatcacaatccacatgatccaaaatcacagtccggcaaatctcaatagggacgatctcggtgcccccaagacctgctacttcggtggtgctttgcggtctcgcatatcgagtcagtgtttgaaacgcagcatccggctcagcagtgaattccgcgacttgcttggtggtatacggacgcgcaggctggccgatatgcttgtacaagaaattgaagaagcagacatgaagtccggcacccgcaaaaaagccgtgaaggttctaaaaaaatgcggattcgatacaaaagaaaaagcaggcgaggaggggcatgatcatacagagatgctgatttacacaactcgcaatgcaatccgggaaatggcggagatcctcaaaaacgcgaacggcgagagcgatgatgagttagcaaagaaattcggcgagcttatagccgagaggacagcggttcccgatatggcactgagtggaagaatgctcgagcctggcaaggctggcaaagaagtctggaaaaacaggaacacaacagttgaagcggctctccaggtggcgcatgccctctcaacacatgaagcgcgtccggaagtagactattacgtggcagctgacgatgtgcgcgaacacgccgaggatgcgggtgctggctatgttgacgaggccatgtacaactcggcatgcttctacaagtacttctccattaactgggagcaattggtgggcaatctgcaggataagaaggaactcgctgcgcatacagtgggcacattcattctgggtgcagcctttgcgaatccgagcggcaagcaaaacagcttcgcagcacacaatttgccggatggtatcgtggtcgaactccgcaagtcccccgtgagctacgcaaatgcctttgcacggccagttgagagccgtggtgagcgaggcgtcattgaacagagtattgcgcagctggggagctatatgaacgatctggatgcaggatacggaggaccggagcatcggttgtggttctctccgaatggccggcatacattgaatgaaggcgagtcttcattccagagtgaagcgctacgctccattgacgatcttatcaccactacgcttactagactgggcttcgaatgggaaaaagtacgtcaagtgaaggtcgatgctgacgcgctaaaggctgaattatgagtaggcacacactttttctcagactggaaggaccgctccaggcgtggggtggccacgaagcgaaattcgtcatacgcaggtgtgcagaagctcccacaaaatcagccatcattgggatgctgcttgctgccaagggtatcgaccggagcaaagcagtagaggaaaattggctatctgagctatcacagctctcgatgggtgtgaggatcgatagacctggtgtgcgctggtgggattatcacacggttggagcagatataggtacccactctgcgcagggcaaggtgaaacggaccgccgctacaggtgagatcgagacgtttgtatcccgaagggaatacctctgcgacgcgagctttctcgttgctctgcagggtgatgcagatcttatggaaaaactcgctactgcgctggctaatcctgaatggacgccctttctcgggcgtaaatcctgtccaccaagtgtaccgctcctaatgcgtgacaaaaacccctctgagcacgactcactcgaagcagcactccgttctctgccttggcaaccacgcatgcagggagacaagacaccggattctttgcattgcatactggactggaaaccatccgagaatgaaccaaacgcaccgcctgatgcagaaatctggtacgatatacctctcagcttcgatccgccttcacatgctccacggttcatagagcgaatagagctcgctgttggaggtcaggacggtgtcccggttgcaggtgttccgctggtgagcaaaacaccctctcccccccgaccgcgtgcagactacaggaattcagagtaccagactgccaggcagaaccgacttgcacacgaccaatatctctgtgtgttttgcaagtcacctgcaaataccgtccaacacatcacgtataggaatgccggtggcgccgaacagcaggaggacctgcgtgccctttgccgcctatgccatgatgcagtaacgatgatcgagtacggagaaggtatgggtatggatcgtgtggacccgaaagacccgagatggaggaagcagataatcgataaccgagcaaatattgttgagcatcgttcgcgtgagaaaaaacgccgcatgatgatcaaggcagacccggagagagcagccagattcaaagacgaagaggaggacgactgatgtactattcgtatctcatcatcgacactggcggcaaccccgatagaccgagaccgggacggaactggataaaagatgtctatgccgtgcatcgccgcctatgtatgggcttcccgtctgatcagaaacgccagtccgacccgcaattcctggatgagtttgatatggttggttttacatcgaacagccgtaggccggacctccacaacgatactcctcgtgggaaatcaaatcgtccaaatttcctgttcaggatcgaaaacacgatcagaggtaacgaaacccaggctgcaatcgtggttcgctctgagaagcctccagactgggaatacgcattttgtaatgctcggacactgctcgcaaatgttccaataatggagccgcgtgtgtataaccccgaattcagggtagggcagaaacttcaataccggattcgcatgaatctgagtaaaaaaagcaagcttgtcgctgctgaaaacggcgagaagaatgaactctctaaacccaaacgaatggcattcacctgggagcctgaccgaagccgcgatgagcaaatccaggactggtttgtgatgaagacagcagggaaggggctgaatgttctttcctgtgaagtagaacaaattggctgggtacgcggctggaagcctgaagcccggcaaaaggtgaacggcaattttgagaagcacaggcatcgtctgcagtaccgatctgcaatgctaaacggtacgctggaagtgaccaatcccgaggaattccacacggcacttactgccggtatcggctctgcgaaagcattcggctttggcttgctctcagtgcgtgaagtatagcacgatgtttcccacacactcgggacggtgcgcgtcccggcgatttttgacgtattagctaaccatctggatcgactccgcgattctccccacgcccgtggggctgtacctccaagtgaagaggttcaacttgaagcggtgaattcttccccacccttgtggggccctatcccattctaaattcaaaacaggaagttcgacatgaaagaacatgaagtgcctgtaatgccgttaaaatcccgaatatcaacgttcaccgtcgagcgtggtgccgttgaacgtgaagggactgctttgatcgtccaggatgcaacaggagtacgggcacaagtgccagtaggcgcaatcgccgcactcatgctagagccgggtacgacgattacccatgaggcaatcaagctatgtgcggaacataaaacactcattttatggactggtgaagctggagtacgtatctattctgcaggtcaagagggagcggcacatacctaccgtcttctacggcaagcccggcttgcactcagcgagaaatcccagcttgctgttgccagagaaatgtacaggttacgattccgtgaagaagccccgttgaagcgatccattgagcaattgcgagggatggagggtgcgcgcgttcgcaatcgctatcgtgagttgagtcttgagtatggaatcgaatggaacgggagaaactacgaccgaaaagactggtgggctggagatcccattaaccgcgcgatctcagcagcgaatagttgcctttatggaatttgtcatgccgcaatactcatcgcggggtacagtgcagccatcggatttgttcacactggatacccgctagcctttgttcacgatattgctgatttatacaagatggatatcgccgtgcccttggcattccgtctcaccgccgaggatgaacatcatatcagcgcaaaagtgcgccatgcactccgtgacgagttccgctcgactggattgctagaaaagctcatccctcaaatcgaatctgttctgaacgcaggcgaggaggaaggaacgccacctccagagatagccggctcccgaagggatgaagacttggagcccgaggatttcccatggctgctccaccttgatcccgaacagcgatacggtggatatcctcaaagtggtcaggcgggtagtaatgctccagataaagaggtgtgaacatggtagtttattcggtcgaatgcgcaccgcagcggcttcgaggtgtactttcacgttactgcctggagataagggcgggactgtttgttggacgtctagacgcgcgaatgcgcgagctattgtgggaaaagatcctcgatcttgccaaagaggatacaaatgcggtaatgatctggcggactccgaccgaacagggttacagcatgcgccagtatggcgaagacgcccgcaattgcgttgagatggatgggatttggcttatcgaatacgagggggcaaggtcctgagtagcattgtgcgctaccagctcgttcgttgagcaattcttttggaaaaatggcgaatatgacgatatttcaagtattctccccacgcccgtggggctgtaccgtaatacttgatgacggggttggtgcggagctcattctccccacgcccgtggggctgtacccttcaaaccccgccgcctggccccgaaggacgaattctccccacgcccgtggggctgtacctcgttatgcggatacttgccgacgactacggttattctccccacgcccgtggggctgtaccctcattgcttagctcgatgggcgatctgcaggcgattctccccacgcccgtggggctgtaccgacttcgctgagcttgctggagccacgatctaaattctccccacgcccgtggggctgtaccgcagaagatcgagacgcacgcgaaggccctggcattctccccacgcccgtggggctgtacccagcccccagtgctggtaccagagcgagccgtcattctccccacgcccgtggggctgtacccaacaggagtgatcatgcgcacgatactcacaaattctccccacgcccgtggggctgtaccttccatcatctgcacaggaggcgtatgagatgcattctccccacgcccgtggggctgtacccacggaggtacgagatcgtgagatatagcatacattctccccacgcccgtggggctgtaccctctaagccatagcggatgttctttgtttatcaattctccccacgcccgtggggctgtaccccacttgcgctatgaatttctctgcatggaccgattctccccacgcccgtggggctgtacccgcaactacaaacggctcacgcgcgaactcaaaattctccccacgcccgtggggctgtaccggaaaatcgaggcgatgtctccgaggactattcattctccccacgcccgtggggctgtacctacgtgcaagagttcgaggatgaaagcggcaacattctccccacgcccgtggggctgtaccggattataggtgttacgacttcgctggcggtcgattctccccacgcccgtggggctgtaccttcgctccgccgccgtgattcgatatagcttttattctccccacgcccgtggggctgtacccattcgcgtattgctttcgatatgcccgccgctattctccccacgcccgtggggctgtacccaca

SEQ ID NO: 544 - DNA, 32234 bp, Artificial Sequence
  Synthetic Oligonucleotide
caccccgatcgagttcgccaacacggttgcctacaggtactatcagatcctgttcccgacccttcgggccaacagcgatggcaacatgcagatcgcggaagtggagttcctcggcaccgtcgcgccgtagtgaacccttgccaaggttcgccacagtcgaatgtccatgatcaggggcctgcgtcccagtgacgccggcccctttgttgtgcgctcacatggcaacgcacagaagcacaaagacgccggcgaaaacgtgagcgaaccgctcgccccgccattgatgccgcgacaggatcgtggtaggattcgggggcggcccgatcgtggctgcggcaaacacggggctcaggcaacgggaggtgaacatgcgttcgagcgtaaggcagcgatggattccggtgtgttctctgatctgtctcggcgcggtagtcgcctcgggcgcaacggtgccgctgggcgagctggacctgacgaagatgtccaccgggtggggcaagccccaggtcaacaagagcatcaccgcccgaacgctgtcgatcggcgggcgctcgttcgaaacgggcgtggcgacacacgccgaatcgatctgctacatcgccctggacggcaaaaccgagcggttcagcgcctgggtgggcgtcgacgacgccaccgggcctcgcggctcggtccggttcaaggtctatggcgacggcaaggtgctgttcgacagcggcctgatgaccggcaacgacgaagccaagcgtgtcgacgtctcgctggctggcgtgacgcagatgatcctgctggtcagttccggcggcgacggcatcgattacgaccacgccaactgggcgggcgccgagttcatcgtggggggtgacaagccgacgaccgtcgacgcaccacggccccctgccgaggagaaggtgctgctgacgcccaagccgggcccggcgccgcagatcaatgggccgaaggtctacggctgccgaccgggacatccgttcctctaccgcatcccctgcacggggacgcggccgatcgcgtttggcgccgccgggctgcccgagacgctgcggctcgacgcgagcacgggaatcatcacggggaccgtgcccacgccgcgaggcgagtacgtcgtgacactcgaagcgaaaaacgaccacggcagcgaccgccgcaccttcgcgatcatcgtcggcgacacgctcgcgctgacgccgccgatgggctggaacagttggtacatccactattatcacgtcaccgaagagcacatgcgaaacgccgccgacgtcatgatcagctccggcatggccgactacgggtacagctacgtcaacatcgacgactgctggatgaagaggcgcggcgatgagccctaccgcgacgcgaaaggcgcgatcctgcccaacgccaagttccccgacatcaagggcatggtcgatcacatccacagcaaaggtctcaaggcaggcctctacacagggccgggaccctggacgtgcgccgggtacgtcgccagctacgaacacgaacgggtggacgcggagaagttcgccgagcggggtttcgatttcctcaagcacgactggtgctcgtacagtgaggtcgccggcggcacagacctggagcacctgaagcgcccatatcagttgatgggcgacatcctcaagagtctcgaccgggacatcatcctgaacctgtgccagtacggcatgggcaacgtctggacctggggtggcgaggtcggcgggcactgctggcgcaccacgggcgacctgggcctcgaacaaggcggcctgctgcccggcttctaccggatcggcctgagcaacgcccggcactttgagtacgcccggcccggacagtggaacgaccccgactacatcctgatcgggcacatcggcaacgcctatcagcatgatgagccgcccaaacccaccccactgacgccaagcgagcagtacagctacatgtcgatgtggtgcctgatggccgccccgctgttctactcgggcgacatgcgctatctcgacgaattcaccctcaacgtactatgcaatgccgaggtgatcgacgtcgatcaggacccgctgggcatccaggccaggccgctggtgcaggacgacgagactctgattatggccaaggcgatggccgacggctcgctggcggtgggcctgttcaacctggccgaattgcctcgcgagatgtcggtcgactggccgctactgggcctgtcgggcaagcgcctcgtgcgggacctttggcggcagaaggacctgggcacgtacgacagccgcttcgccgccaacgtatcgcgtcacggcgtggccctcgtccgcctgatccccgccccatagacggatgatgggcggccggcggataccgatatctcttgcagacggcaacctctgtcgatagaatggtaaatgccgcgatgcaacgcgatcaggcaccctgactggcatgccctgccgggtgcgcccggagacgggtgggccgagacgataggtctgggtaagcgcttcccgagaacgtggaggaccatgtcatgcggaagtcgaaggcattcacactgatcgagctgctggtcgtcatcgccgtcatcgccgtgctcatggggatcctgataccggcgctaggcaaggcccgtgagctggcccagggcgccgcctgcaagggcaacctgaagaactataccatcgcgatggcgatgtacctcgacgacaacgaccgcaggttcgcggaaccacagagatgctacttcagccaactaacaccctaccccgtcgaggcaggcatttccgagtacctgcatctgcgctggtgcaacggcgacatcgagttgaagagtcacccggagtacggagggatgatggcccggtacctcggcgatgccagggcattcatctgcccaaccttcaagaacctcgcagtgcgccacagcgacgaccagttcttcctcgcctatggcaagaacgtcaagaactacgaaccctggtacaactacacgatgaacgcctatctgggcagcgcccgcagtgacgttcaggagacccgcgttctcaaggacacggacgtcaagcatcctgcgacgacgttttcgttcgcagaggagagcgcgatcgtcgatacggcctacaacatgtccgggctcaatgacacgttcatggcccccggcagcgatacgatggtcaagagttggttcagccagaccggaggcgacctgcgtcgcatcatcccgggtcccgagggggtcgggcaattctgggatgtgatcgcgggtttccaccacgccccttcgggcgacaagctgggcggacgcggcaactgcgcgttcctcgacgggcacgtcgaggccttctcccgtgccgagacgttttactacgcctatccgaagaagtgacggcgttgcgttaaatccgaaatccgaaacacgaaatccgaaatagatccgaaggcaccaaactgcgaattcgaaacggggttcggcacagcgtcagcatttcgttcattttagcttgcggatttcgggcttgtttcggatttcgtgtttcgagtctctgttcagtcattgtagccgggcgagccgccgacctcggcgctggcacgccaggcgcccttcttgtcgagggtggccgaatcggcggtcagggggtcaatcaccgtcagcgagtagccagccccatcggtgaggtcgtaccatccgtccttgtaccggaaggcgaggatcatctggccggcggcatcctgcaactcgatgctttcccccgcattgttcaggctgccggcgtactggccgacgacgggcgactggtccccataccgcgcctcgaacgccccgatgtctttgacaacgagggcatatgcacccgggtcgagagtgacgtcgccgaaggtgaagtcgatcccattcgtgaagcgcaccagatggagattaaccggctgagagccgatgttgagcaactcgacgtattcggtgttcggatcgacaggatgatacatgatctcgctgatccgcaggctctcggccaccggaccgacggcgtagaccgcctcgttcagcgcgctccaggtgctgccgctctgggcacgggcgcggaccatcgcgctggcatcgagccggatcgggccggcgtagcggaccgccgtcggcgcgacaccggctggaacgtccgcgcccccctgcgacgcgaccagctcaaccgagatcaggaagtcggaactgttggcacctgcgttgagcccctggatcgccaggaggttgcgtcccaggcgaagccggctgatatggccggagaggtcgaaccgctcgaactcgaccgcgtcgaggtcggagtggttgtcggtggcgccggagttccaggcgggcgtcccctcgaacatgacgcgctggacttcgacgccgttgaggtaagcgatgaaaccgtcgtcgtaccgcgccttgagcgtcaggccgccggcgtattgcaacccctcgggtgtgacgtcgaacggaatgcggatgtagcagctctcgttgcggttgtacatctgggcctggacgtcgatgtcgaagaacgcctcgtagccggtgctgcgttcgtagccgacgccgccggagccggcgatccaggcggaatcgtcgaaatccacctcgctgcgccaggcgctgccgatatccgtggtggggacgaacgcgcgcttggccgccgcttccggcacgaggaccagctcagcgcccgtgctgccgctgacgccggggcgccgcggatcgctgccgtcgagcgtgtaccagaccgttgcggcgttggaagtcattgtgagccgtgagccctcggcgatgtggccgccgtgctgatagacaccgtcgatatggaagaccggcgcctccacgctcgggtagagccccagggctttgaactgcgacagtgccacctcgttgcggcgagggaaatagttgtcgagcagattctgacgttccacgatccagaaatcgttgcgggtgtacaggtaataggggcccgaactgtaggaatgcacatcccggcgatagtcgccccagcgggccgactcggcgatgacagcggcgtcgatctcgtcggcccgtcgggtccatcgcgcgatgttgcgctcggtcgtcagggcgccgccgttgaacagatgcttgtgcacgcgatcaccgaagcgaacgcggaattcctcgatttgcgaaagggggcgatacaggccggtcgggtccaacgtatcccttatcacggtctcggtcgccttctcaagaactcgttcgccgtcccagctatagaagcgccagggcttgttgtcggcgccgcctccggcggcgcgccagtttccgtcggtcttgagatcctggttgccggcgaacaggttcaggagcgtgaagtcgatgaagttgtcgatgtcgatgacctggcagatccgggcccaatcgccgccggcggcgatgctcctggcctgttgccaggtctggggggtgacgtcgtgggcgtcgcgtcctccgttaatcgaatcgagtcgatccgggtcgcctccgttgtaggcggcgtagtgcgaggcgaccggccgctcctggaccagatacaggccccagtaaatcccgttgaggtacaagtgcacgtagaacccgcgtccggcgtcggcctgccccatctcgagcaacgagtcgcgcatccactggtcgcgaatgtactgcgcccgctggcgctggccgggatcccagtgcgtccaggcgttgttaaagaagccgcgcagttgaagcgaatcgaacgtttccacggggctgccgtcgaacaacgggaaccggagcttcgacgagccgtagacgtcgcgaaagcggaggctgaaactgtgcttgggacacttgggcgggttgcggctttcgccgccctggatgcgcaggccgcagtcgatctgaaattccttggcgccgtcgatgctgaacagctcggcggacacgggccgttcccaatcctggccgcccgtgctgctgtgcccggtgtagatgtagatgccgccggtctgcgcatcattggtcttgctgaacaaatggtccctgtcggtcaccagagacaacgtcggaatcgccagcagcgcatcgtccatgacgtcggcatatgcggggctgttgtagatctcggggtccatctcgtagtcggccgggtaggagccgaaccacgtgctcggatagccacgtgccagcacctcggactgcgagcgcctcgccgcatcggccaggaagatgtacgtgtgcgtgtccgcgttgctgggtacgcactgcggcttgaccgcctgggcccgcaggcacgtggtcctggtgatccggatcgggccgttgtagacactgccggcaggaacctgccgagcctgcgaatacggcgcgctgccgtcgagggtgtagtagatggtcgcgccgggcgtctcgcacgtgatcgtcacgtcaaacggcatatcgtagaaaccgcggtcatggctgaacttcgtatcggcgacgagaccgtcgtacaggccgctgttgcgcgagccgggcgtgggcgtcagcaggaagccgtacggcccggtgccgtcgggcgagcggccataggagatgtcggtcctctgttcttcgaatgcaacgctgtcgatgagcgtggtcccatcgggggcaaacagtgccagggtgtccccgtcggaatcgagcgcaaacgacgcatgcagcccgctgtcgcttgtggggccgtcgagccagacgatgagatatccccccgccggaacggtggccggctgcgaggcaccgcctgggaactgccattttgtcggttcgcccggatcgtccgtcaggtacatgcgggccaggtcgatcggcgcatcgctgtaattatggatctcgacccagtcgtcgtactggccttgggggtcggccttgacactgctgttggccgccatcagctcattgatcgccagcggcagacccgccccccggcctgccggggtcgccgagacaggaccgacactcagaagaaacgaagccagcacaagacgagcggcccgacgggattcacgcgtcacactcattcctcactcccgacaatccaagcggtgacaggcgtgcaagtacgctggtgttccagaatccgggaccgtcgtcgatccccaatgacctcgcgactccgcccgccgtgaaggcatattcgcacatgcgcatcagactgtattctaccattcgcggcctgaaaatcaacgttatttgccccgccgggccgccaagtctacaccgccgacctcgtcgagatcgagccgacgccttgccggatacgatccgaccggttacgattcgctatgcaatcgtggccttgacgccaaggccgccgacagagttcgggagaatgtcgccatggcagcatttcgcgatccagccaatccgatcctcaccccacaggacgtaacgccgtcgcgtggcgatttcgaggtcctcggcgtcttcaatcccgcggtggcccgccttggcgaggaaatcgtcctgctggtgcgcgtagccgagcgtccgatccagactgacccggaggtggtgcagaccgcgtttctcgacccggcctgcggccggatcgtcaccaaggcgttcactcgacccgacccggccaacgatttctccgatcctcggttgatcgtgcgccggggcaggacatacctgacctcaatatcgcatctgcgcgtggcgagaagcaaagacggtatccgcttcaccatcgatgagcatcccacccttggtccggccgacccctgggagagcttcggtgtcgaggacccgcgcatcacgcggatcggccagacgtattacatcagctacgtcgcggtctcgccgctgggggtgaccacggcgctggcgtcgacgtgtgatttcgcgaccttcgaacgtcacggcgttatcttcggcccggaaaacaaggacgtcgtcctcttccccgagacggtcgacggacgatactacgcattgcatcggccgcactcgccgctttgtcacaccaacaacatgtggatcgccgaatcgcccgatttgctctgctggggccgccatcgccacttgatggggctgcgcgacggattctgggacgaggcccgcatcggggccggcgcaccgcccgtccgcctcgacgaggggtggctggagatttaccacggcgccgaccgcaaccatcgttactgcctcggcgccgtcctgctcgacgcccgccagccctggatggtgcgggcccgctcagcgcggccgattctcgagccgcagaccgaatacgagtgctccggcttcttcggccccgtggtcttcacctgcggcctgctcgtcgaacagacgactttgaaggtctactatggcgcctccgacacaacggtctgctgcgccgcattgtcactcgaagacgtgctcgcgtcgatgcagtcgtaagtcgctgggtttctctcaattctccgcaacaccgtgcgcgccgtggtcggcaacctctgtgagtccggatcggccagccggtcggcccgctggtccacccgacgctgacccgatcctgtgcggcgcctcatcatccgatgggacacggaatctcgaaaagaaaccaatgtcaccgacagtcttcccatgtcccccaatcttcccacatcaaaataagcattttcctccgtggaattgcttgcagggcgtcccatattgcgcgtatatttaacccggatggggcggtgatgaatacacgtgtggttctgctcacgcggaatagctacacgcagacgctatgtggacatagagagtgtctggatgagtaaaatccgtgcgggcgaggtttgtccggacggagtaaaggggagatgtacggatgggtgggagaaacccggagaaaggaggtgcctgggggttccacggatacaaggtaagctgacggtttccacagagtcacacacggagtgtaaggagacacaagatgagacggttacctgcaatactgccggcgctggcgctgctcgccgtcgtcggcaccgccagtggtgcgctgacgctttccagcgccagcggcacctggagcgatcctgtacttcagtccttggcccctgcccctgcctactggtcttctttgatgggcgaacagctcatatcctggggcactccggcctatctgtttggtctcaagagcagcttgggcttcacacccgtcgcgacgcccaccgacgtggtgctcgatacgccctttgtcgtgggcgcgctgcgccattacaatacgcccatagtcgtcggcaccggcatcacggcggtcgatctggacctggcgatggactttgaggggacgccggtcaacacgtccctgacgctgggcgttacggaaacggtcggcccgggtggccatcctgcggatgtcatcacgctgccgacgtcgttcgatcccatcgcgtttgaggtcgggggcgcggactacgagttgtgcgtgctgggtttcggcagttgccccagcagcatcatctcgtcgcttagcacggaagaatgccgtaccacctgtcctccgctcccgctctgggcgaagatctgcagcacgacgccaccaattccggcgccgggagccctgctcttggccggcatcggtgtcagtgcggtgagctggctgcgccgacgccgaacgctctaaagctcggcacatgaggggcgatgcgatattgtccgcccggcatcgggccgggtagggccgcgagcaacccgcagcagtacgcctggacttgacgccacggtcctcgcttactgctgcggggccggctcgatggtgatctcattgccgccagcctcggcacgcacctgtggttcgtagtaggagtatgcctggctgtcgggaattgtcgcgcgcaccgggaagcgggccttgacttggaagtgcagggtccgttgttcgccgcgttccaggccgtcgagatagaagatcaccttgcgtccggccacctcgtaccgcgtgacgagattgtcggcaagcagcgcatcgagcgactcggcgacagcggcgaagcctgtaggcacaccgacatccacgatcatcattcctgtcgagtcctttggcccgaggtaccgcaccgtcgcggtgacgttgacgatatcatcgacctccacgtggtcggcgtcgtacatcacctccagggtcatgtccttctggaccggatcgtcacgcagcagaacgttgaaccgtcgaaccagttggaatcgcacctgccccgagccgacagcgctgatttcgacggccgattcgagcggcagctccgccgtctgaaggacgtcgaagttggtgctgttcacggtgaactgcgccagcgtttccccgccccgcgccttggcggtcaccgtaaggtccacgttgcggctctgactgcgggccgccatcatcagggccttcagccccatgaccgtatcctgcgtactgccgtagccgcccaggctgttacgctggagcgaaagccacttgaccgcttcgttcgcctgcggccattccttctcgatcatcgccagcgccgcgtaggcggttgtctccaccgggtgaggttgccagtgcagaccgtcggcatcggtgacggcgatcgccagcagccgttcgagcgccgcgtcggcggccggatcacctacccgcgcgaaggccagcgccgcaattgctagggcatacgcatcgtcccggaccgacgcgaggttgtcacgcagatattgcgtcgccgctccctgcacgtgcggatcggccataccgtaatccgccatcgcaatcgacacgaacgcggtcagcgcgtacgtcccctgcaccccgccgaccatttcactgtggcatacgaaccccaccggcggccacgatccgtcggatgcctggtgcgaggcgatccacgcggccgcctcggccagaatcgtctcgtcgatcgtcgtcacctcacgcgcggcgctgaacgtgccgagcacgaatgccgtcagccagaggctgccctcggcatcgctctggccgaaggcggagaacgaaccgtcctgatggcggaatgtcagttctcgctggtagcccaccgtgatgaagtgctcggccttggcccgcacctcgggcgtgagctggccggtcgcgttgagatagcgcagaatctccacgtccggggcgaagaagatcatgttctgctcgccgcagccgtagggcattccgagcaggtcatccacaccgttgatgctctgggcaaccaggctgggcgtgatgctcaggagaatcttctgcgaatcgggcacggcgaattccggcgtattcgcgtcgaggaccaccgtctcgcccgctcggatcgcgccgttggtgaccagctcacgccgggtgccttccggctccacgagcacttccttgcgcacggcatcggcccgccggaccgaacgcagacggacctccagcggatgatgtccgagcttcgtcggctcaatgacaaacgaaacagacgacacggaatttgcatttacctgcacctgctgttcgctgatgtcgagcaggttgaaccagtcggcgtccgccatctccacatagaccacctgaggttcgtcgaggtagttgaacacctggacccggaccgggaattgctcgccccgcgtcaccgcatacggcagatcgggctcgccaaagaactcctggaacacgcggactgacgactccgtcacgccaagcccgttgtcgctcgtggacaccgcatgaagccgccacgtcgtgatgctgtccggcgccgtcaggtccagcatcgcggtcccattgggctcggtgagcagatccggcatccacacccacgtctcagggaagaactggcggacccgatcgacctccgccaacccatctcctttgccggcgttctcggcaacatcgtcggcgccaccccttcggacgaccggaccaatccaccacagcccgttgattcgccggccctcgggaacatccagcccgcgcgaagtcaccacggcaagcccggcgtcctcaaatatgttgcgggcgccatagctgtacggctggtcgtgcgtttccgcctgcggctccatgaaccgctgttccagctcgccgaacacctcctgcatgttgagccggccttcgttcagcgcatagaccgactcgtcgacgatggccaggccgaccatcgactgaccctccgaacgaaccgagacgcgaaccggctcacccggcccgacctcttcggcactgactcccagggccaggctggctgcgtggtccatcgtcacctcgaactcgatcgtggcggcggaaatctcgttgttcgggttgatcacgtacgccaccacccgggcggccggcaccatctgctgcgtcgcctggaaccggatcgccgagccggtcaccgcgtccgaccagacggtatggccgttcgcaaagacatcgtagtagatggttgcatcgtgcgtgcgaaacacatcgatcgtgactgtgtcacccatgccgacggcgccggtggattcgcgactcagatgaaggaagctgtcgctgggcgagtatgtcgcatagacgtacaactccgcctgcccgctttcgccatcgcctcgaacctcgctcttcagtgtggcccaggaagccttctgcggcgccctcagggtgatcgaggtcgagccttcgaacgccagcgaatgggcctccttggagatcatctcacccgattcggcgtagtactcgccgatcaactgtcctgtcacggagacgggcacaccgtcgggcgtctcggccaccaccaaaacgtcatacgattgcgcgggcgtgaacgaccgagacgaggcgatcagccggtgctcgattcccgacgagacgatcttcagcagcttggtcgtcttctcctggtgatccgacgtgtcggtgacggtcacgtcgagctgcacgctgcccgcaccgccggctcccgtggtcccgctgacgtacttgacctcgggcagcgagaactccgcccgcccttccgtcagcggcgccgtgtagcgagcgtattcctcccagacaccgacgtagcgactggcgctgatctgaacctcgccgtcgacgggcttgccgaagaaatacgtcgccgtgacggtcccggggattctctcgtcggtgcggaagtaatcccgtggcgtgtcgagcttgacctcgaatcgcggcagcacgtactcctcgactcgcaggtcgatggttccccggccggcccccgattcggcggtgatcttccacgtgccgtagttcagctcgctggccagatcgaggttgaacggcgcgacaccgaaggcgttcgtcgtgaggtccttgcggaagattttgacgcccttgccgtcggtgatctgcacggtcacgtcggaggcgctcggacgaagctcgttcgtcagcaccagcacgcggccctggatcgtctggcccggcttgtagattggcttgtccgtttcgatcaacaccacgggcatccgccggatcatgatctgagttgtcagagtctcctcggcgccatcgacgtgtgcctccaggatataggagccatccgccaagttgggcgtgtcgaatcgggcgacgaaccgccctgcctcatcggtctgcccggcggcgaggtctacgttcccttcatgggccttgaggcgcagactcacgccgatccctgccgacgactggcgtgcgctgaccaccgtgatcgtcgccgaggtcgaggcgccactgtacaacgtcttggggacgaccatcatcacatcgacggtccccgcccgggcgactgccgccaccagccccaggaccagaaaccctgcaaacctgattctccgtgccattgtgccgctccttagattgggatgaatgaatggataataaccgtaaatccagcacctgccttctcttcgaccagacagggggcgtacctttggctgatagtgcgggcgaatcatcgttcgccgccatagtttgtggaaccgccgcccgtgccccgaaaatccctcaagccacgctgagctatctccgcaaggtctccgaaggtgccggtgcgatgatatgcgacaataatatgatagcgacaagcacggatatgatggtcaattccggccggccttcgaaccttgattcactgcggccattttatcggaacgtgcgtctgggttcaagctttttcgcccaggcccgcaaagagccggcggacgtactcggtgcttctggtgaacgcttccaggggcggcatggtgttgggcgagccgttttcgatcgcctgttccaggacgatgtgcgggcgaacgccctcctggcgcagggcatcggccagggcgcggtaatcgatatcgccctcgccaaatgtctcggtccagacgccgccctgggactgccgcaggtgcagctcgcggatgcgcttgccgtagagcttgacgatgtcgaacagggcgacctgcgagttgcccgcgccgcgatagacccagtgggcgtcgaggcagagtgtcacatcggccggatcggtgccgagcatcatgtggtggaactcgcgtgcggcctgccgcagttccatgttgtgattgtggtaggccagcgtcaggccgagcttccgcagttcggccccgagccggttcagtgcggccgcctggaccttgagctgttcgtcgttcttgtcctgcgcgccgccccaggcgagcggattggggttggtcacgacgatccgcgctccagcgtcccgggccctcggagcaatcgtgaggatctgccggatgctctcatcggcccggccggcctcatgcagcaggctgttgacgtaaaaagaccgcatcccgaggcggtgcttcttcagcagaggcgccagacgctcgacctgtgcgacgtcgccgaacgacggctcaaacccgtcaagaccgctggcagccacctcggccagaccttcatcgagcgactggtcgaaattgcgcccttgacgctgatagaacacggtccaggagtacgagttgcaggcgacgtgcatccgctcaccctcggagcccgccgccggacgaacttgagccggcgaaagtgcgatcgcccctgtcgccagaaccgcatccgcaagaaacgtccgccgcgttgtcaatcgatctgccatagtgcaaacctccgtcgccccaatcggggcttgccgcctgcgtgccatcccctccgaaccccgcacgctgagtatgcggccttcgccgggcaaatgcaagggcgcttcctcgcacggacgcggcatggtaggctgtgcctcgtgaatggtcaggtcataaggagaacatcgcatgcgatgcaggatggtttttacccacgtgttcgcgggctgtctggcggcgtccggcagcctccttgccgcaccgcggctggtcgccatcgggccttgtccggcccatgtcggcaagtatgacaagctcgaactgacactgacgccggagcggacgtacgacaatcccttcgacccatgtgaggttgcgatcgatctgctgatcgattgcccgagcgggcgggcgctcgttctgccggcctttttcggccaggattaccaacggcgagatttccccagcgatggcaaaaccgtggcctggtgctacccgatcggtcaagggacgtggaaagcacggttcgcacccacggagacggggacatacacgatccgggctcgcctgaacgaccgtgagggccaatcgctgtcgcagaccatccggatcgagtgcgtcccttccacaaataagggatttttgcgcgtcggccgcgaggacccgaggtttctcgaattcgccgaaggccagcccttcttcgccatcggccagaacctcgccttcatcggcgagagccagtatgtcaacgtcccgaaggccgaggcgatcttcgcggagatggcgcgaaacggcgcgaacttcgcgcgcatttggacgtgttgccatgactgggccctcgccgtcgaggctcccaagagcgcgtggacccgttcatggaaccggcaatcgcccgtggttcccctgcctgaagccgagggcaagtgcgtacaactgcagggccaggacggcgcttcgatcgaggtttcgccctcgcaccgggtggcgctgcggccggacacgcggtacacactccgcggaaggttcaaggccgacggagcggacggtttgcgaatccaggtcggcagacacgattggcgggtgccggcacacaccgccacctggcaggacttcgcagaagaattcaccaccggccccgatgagtactggctgggccacaccacagttgcactttcgggcgaaggcactgcgtggctgaccggtctgtcgctgaaggaaagcgacgacagcgcggagctgctatgggaagcggatgtcaatcgtcccgtgcggggttactacaatccgctcgactgcttcatggtcgatcagatcgtccaggccgccgagaaacacggcatctatctgatgctttgcctgctgacgcgggatctttacatgaatgagcttggcaatccgaacaatgtgccttacgaccgagccatcgcggatgccagaaagttcatgcgctatgccgtcgcccggtggggctactcgaccagcgtcggcgcgtgggagtacttcaacgagatcgacccgggcaagccaacggaccacttctatgaggaggtgggcggctacctcgacgaaatcgacatctaccgccacctgcggaccaccagcacatggcatccgtcggcgcgcgactgtggcctcgcagccctcgacgtcgcccaactgcaccactacttgcgccctggcgaagcagacttcaaagacgaagtccaggccatcctcgaaaaggcggcctttctgcgagagcacgcgccgaacaaaccggcgctgatcggcgagttcggcctggccaccgacaagtggggcctgagcgagcacatgagacaagacaccgatggcgtgcacttccataatgctctctgggcgtcgaccttcgccggaccgtcgggcacggccatgttctggtggtgggagcaattggaccagcaggacgcctaccgtcactatcggccgctggcggcatacctgcgggacatctccttcgagggattgagagcgacaggcgcaactgtgtccgacgcgcgtctacgcgtgctgggctatcagggaacggatcgcacctatctgtggctgtccagccgggacgccacgtggtggaaggtcgtcgcggggcagacacctcaagagatcgaaggtgcgaccctcgaaatcccagacttttcgccgggcgagtacgccgttcagtggtgggatacaagtcagggcacttgcatcaagacgcaccgcgttcgacacgaccaggaccgattgagtgtcgccgtgccggtggtgcgaagtgacatcgcctgtcagatcgtgcgactctgattcgaacggttcagcgtcagacggcaccggccaaatcgttctccaactgggtcaggatcgtctgaaggcagcggtcgagaccggcgaccagcccttccggcccggcggtcgccacgtcggccgtcgcggcgtaggacttggccaggatgatctccgggtctacgccgctttcggtccgcagcaggaagaaacgaatctccatgaccgccttcggcgcgcgcctgtcgcgaaagtcaccgtagagagcggcaatattggcttcgattcgatgcgtgggctcggcgccgctgcccgagccgagaacctgcgcgaacagacccgactgggtcaaccagtcgcgtgtcctctccgtgatcatcacggtcggtgaaacaagaaactcgttgtaagcgtcggattcgtatcgatgttcgtcgagccggtagaccagccccctgccggcgtacgccgcatcgatggtgaaccgtggaaccgccagaacagccttgccttcgcgaacggccggggacaacgagcgagacgtctgaagcaagtagaagcggctgttggccgactgcggcctcgcgcaacccgtcaggacaagcgcgaacatggtcagggccagaaacagggccggccgggtccccttacatatcatttgtatgcctccgattcacgtgggggtttgctgaagatcagctccgaaggacgctccctgagactgtcggtcaggtcgcgcagattgtcggaaatctcccggaaattgccgatgatgatttcaatctctggtttctcggtcgtcaccagccggtcgatgctcgacagcacccggttcagccgcgcgacaacctccggaaggttggacccgcccgcggtccccgtcggcgacgccagcagacgccgaaggccgtcgttcgtgatgcggatttcctgaacaaaccgcgtcagttcggcgctcagttccggcacgttggcatccgcgacggtccgctccagcgaggccagcaaacgctgcgtcgcgtcgttgatgcccgctacgtcgagggcctggaccttctcccgtgtttccgccagcaggctcgtggcttcctcgctgatccgggccagattcgcatcccccaccgccctctcggcggccaccagggtccgctcgaaagaatccaccagcccttcgaaatcaatctcctccagccgggtgaaaatcttttcgagcgagtctttcaacgtcgtgatctcactgggcgccgacggcatgtaggtgtacaccggcgtccacggcacctcgaggatcgggaagcgattcggatcgagatagtcggcctccaggtagccctggcccgtcaggatattcgaattgacgcgaacgcgcaggccgcgagcaatcatcttttgaagcatggcaccggccttttcgacgccgagttcgggcatcgtctctcgcggcaccgcgtagacgacgcggacgataggctggaagacggacaatcgtccgctgtccggcgggatcgcatacacactgccggcgaatgtgatggtctcgacctgaccgatgcgcacaccacgaaactctaccggtgacccgaccgtcagccctgtgatggactcgtcgaaataggtctcgaatctcagcttgtccttcgcaaacacgccggaaccgaacaggatcacggccgtcagcagcaaggccgttgcgagaatcacaaagacgccgatcttgaagtagcttggtttccttcccatcaggccgatccgtcccaatctctctgttgaccggttccaaacatgcctacctcctgattcctgcagccgacgactctcgatggaagaactgccgcacccacggatcgtcgctgcggtcacgaagctcttcgggcgagcccctggcaacgatcgtctgccgttccttgtcgagcatgattacatggtcggcgaccgcgaagatgctcgccagctcatgcgtcacgataacgaacgtgatcttcagggtctgcgacagttcgacaatcaggtcgtcgagctgcgccgcagtgatcgggtccagtccggccgaaggttcgtccagaaacagaatcttcgggtccagggccagcgcccgcgcaatggccgccctcttgcgcatgccgccgctgagttcggagggcagtcgatcgccggcgtcctgaagcccgaccaccttcatcttcatccgggcgatcgtctgcatggcctgtcgcggcaggctcgtgaactcttccaggaccaggcagatgttctcgatcaggctcatggagccgaacagcgcgccgttctggtacgccacaccgatccggcccagcagcgcacgccgctcctcgccttcggcggtgacgatatcggtcccgtcgatgaggatgcgccccgtcagcggccgatgcagtccgatcatgtgcttgagcagcgtgctcttgccgcagccggaaccgcccaggatacagaagacctcgccggcgcccacctcgaaggtcacgtccttcaggacgatgtgatgatcgtagcccacggtcacgtcgctgacctgaatgatcggcggtgcgtcggaccccatcgtcatacccccaagtagtagtacagcacggcgaacacgccgtcagcaaccacgatggcgacgatgccgctgacgacggcgcgggtcgccgaatcgccgacggcgctggggctgttgcccgtctgcaaaccgcgcagacacccaatgccggcgatcagagcgccgaatacaaaggtcttgaccagcccgccgaacaggtcgcccaggctggcggcctcctgaatctggtcgatgtaagccgccacagggaaaccgaacgatcgcatgaccagcccgcagccgatcagaccgaacagctcgttgaacagtgtcagcagcggcatcacgcagatcgcggcaaccagccggggcaaggccaggaactgaacggggtccacgcccatcgtcaccagcgcatcgacctcctcgttgaccttcatcgtgcccaattcggccgcaaaggctgatccgctgcggctggtcaggatgaacgcagtgattaaaggtcccagctcgcgaaacagcaccagcacaacgaggtcggccacgtagatctcggcgccgaacttgcgcataccgatggccgactgaaaggccaggatcagcccgatcagaaaacccatcaatgcgacgattccgaccgcattggctcccgccttctcggcgatcaggaatgtatcggcccagcgcagacgacgcgggcgaaccagaacactcagcaggcggacgaaaatctcccccaggaaagcgacctgcgtgtgaaagcccacaagggatccatgcgagatctcaccgacacgatggatcgcgcggaccagccacggcggcgctggcttaggcggcgcgggcgggcccggatcgaaccgcctcatcagttcggtcagatcgtcccgcaggccctgaatccgaaaacctcgctgccgctgctcctgtccagccttcaattcgagcagaagggccatgcccgccgtatccaagctttccacacctccggcatcgacttcgatggcggaagggtcacactgcgccaccttctgcataacctggggccagaaccgctgtgcgtcggcggcgttcaacgtcccctttaggacaagacgcaatccgcgttcttcaaattgctcgtagtccagacttgccgcacccgaatctaccacagctttccttgcccagaacccttcttcccatccatgttccaacgcgcccaggcggcgccgcactctcacggcccgcgcggcgagcccacttacatacatagctcccacggagcagccgcgaggacctctaactataccgtcgccccagggccgaggcaagttccataaacggctctggtctgagtacttggacgtgggacccatcggcaagctgccgctggcccctgcgacgagatcgaatgcggcaagcggcagaacaagaggggaaatcggggagacaggatttgaacccgattcgtggggtaacagaatcaccacaggaccgctccaattcctgcacagaatgcgaccgaaagccatttgaaggggatttcgagggacagactcttgcacttcccgaacagcgaaatgatactcccgaacacagaataggtgcgcatttggtgcgcgagattgcgtcgggtgaccccgacttggctcagatcgtggcggcctggccggacctgccggaggatgtgaagcggaagatcctgcacctggtcaggagccacaggccgacccctgaggcgcctgcatagaacgtaaccctgtgccggccgggcctctcgtgcgagcagccggcggcgcggaaccccttttgacggaggctgagcgatggaaagtgaacgagacacgatgaccccgcagaggcagccgaaagacctgatcgcgacgtggctggagcagcggccgctggagacgatgctggccgtgagcctgtcctgggccctgtcggacggcgaccacggcgacccggacttgctcaatgctgtgctcgacaagtaccacgaggccctgatggaggcggccaagcagggcgctgcggagctggacgaggaaagcaggatgatgctcggggcatggatggcggcggaggcactgacgggcgagtaagaaggtatcccggggatgtgccgttccctggctctcggagccaagaagtctcgcgcccgggcgcgcgaggaggcaacgggaaaagacaacacgttttgtcgtgtttcggtcccggcccggcaacgggcttcacgattgcggcccggaccccaccggggggagcccccccggcacccccggccccacagtactatctctcgctcttgcggtgcggatctggtaatgcgcggacggtttgtgaatcgctgtggttgacgaacggcccgagatcgggcctcagagaggagccaacatgccaagagacgaatggaagaatctggacggtcaacgaatgaggttccgtgccatcttcgagcggtatggccagaagagtgcctatcgaggagcgcccctcaagacgcttttgtttcgtgaggtgtgccctgtggatgggggcgtccgtgtgaccgatcatctctggttcacggagacgaaggggttccgggccctgggcgtgctgcaccagggggactgcgtggagttcgatgctcgtgtgacgacctaccggaagggctactacgggcgccgggaagatgtgtacaagccgagcggccaagactggcgtttgagcttccctacgagaatcaggcgaaaccctgcgctggacaggcctgtacccgagcccccgtccaagccccacgaggacgctgccgcgagcagaagccaacccgaccaaagaccgggggccttcccacgcgcggagcttctgattccgccggcgtggcgcgaggccgccagccgatgcgtcggaatcggggcactgcgggtgtttggctggctctgtgaatggacggacggcggaagacaaccgtgtgaagcgccgatcatgaggctggctcggctctgcgcaccaccggagcaagggatgctacgcacaaaggccatcaaacgccatcttcgaaagctgagcgaagcaggcatgattagccgggtccggcgccagggagggaaacgcccccagtggtacgtccggccgcccgagatgtggaatcaggccggcgatgccgccgacgagagccagtgacatcagcaaagacgacggacatggggcatcggccccttttgacggaacggccgaaggagatccaacagcatgacggacagagatgtgccaagacgttttcagaggctctaccggctggccatgaccggacgcagccaaagtgctgccatccggtcgttgtgtctggagtgcatggcttacgtggcgaacgcggttcgggactgcaccgacacgggctgccccttgttcgcctacagactgacggggcgcaagacgcccacggccgtcgagacgactcacagcgtcgccccaactcgaatacgtgtgcgattcgcgacggaattagccacgatctggcccggacccgacccaagggccgtctctgtgaattggaacgcccagaaggcccgtggcgagctctgtgggcctctgtggagcgggtcccatgcggtacggtatgtttcgcacggggcgggttggttctgcgaagggcaaggcaaggtaggattcacaggcggcggtcgggccaggacgccggcgaaaggatggtggcttcatgcgtgaggtcagtttcgacaaggacagagcggaggcattgatggcggccaaagggcgccgccagccgctcgtgggggaagggcgggatctattcctgctggcgggcgggctgaaaggggtggcgtccccgccgcagggagagcacatcgaccacctggaactcgaagtcgaacaaggctgccaggacctgctcgccagcgtgatgtttgtgagcacctgggtgctcgatctgcggaccgatgagtacgatgagcacttcaaggcgaaggtggcggccgagatcgagctgacgcagaagccccgatacttggtccgggacctgtggtgattccgtccgtttggcccggaggcgggctgacgcccagcggcgtatggtggacgggtcccctacgacgcggggtgtcttgacaaatgctgccccacggagatcagatggccaaattgccccggatgagggaatcctcatccctcacagcatccagaggcaacctgtgtgtcgacgtgccgttcgaggacatgcagaatggagtgacgggctttacgcaggccgagtgggaagtcgaattgcggctgtgcgaggatacgaacaactccccggttcacccccacgtgcgtggggacaatccgcggagccctcccagtccatgttcatctggcggttcacccccacgtgcgtggggacaatgtctcgccgccgggagcacggcggcggcggtcggttcacccccacgtgcgtggggacaatccgtgtgcgacgttctcgtcggccgggatcaccggttcacccccacgtgcgtggggagaattttgtggtgattgcttggagaagctggctgagcggttcacccccacgtgcgtggggacaatcaaatctccccttatggccgcccggcccacaccggttcacccccacgtgcgtggggacaatgaccgaaaactcccatccagcacactcagcacgcggttcacccccacgtgcgtggggacaatagatacggagcacccacaggcagagaaaccgtcggttcacccccacgtgcgtggggacaatctgtggatcgggcgggtaataacagtcgtggacggttcacccccacgtgcgtggggacaatagcagtcgccgtgtgtacatcgcttgcagtgccggttcacccccacgtgcgtggggacaatctgtgtctgcattaaaagaagtattgccatatcggttcacccccacgtgcgtggggacaataccacggcattgtatgccgggactgggcagacctcaagatgttgatacctggctcggcctacgcttgtctttgtaagccaccaaggcaatgccctcgaagtcttgcagttggcgagacgattcgccttcggaccggaagctgtagccctgcgggctggaatcagaccatatctgaaggacgtagccgcccttgcgcttcttcagggcgttctgccacagcttatcccgtattctggccgtcggacttccaaggaaaaccccagccttgggctcgatcagccagcgagatagctcgcccctcaagctcatcggcacgttctccaacatcatcacgagcatcgagcacctccgcaatatcaggcaagatacgccgtatcagcttggcctgtttgaacatgtctcgacaggccagtcgggttcgtctttcaacgtcgtccttggagccggatacggtctggaacgccagcggaatcgtgatctccgtcttgtacaggtcggccacatcgtagacgaagctcagcaccttgcctgtgtggatgaagccgatggcggggctgtaaccggcggacagaatcgcggcgtggcacaagctgtagaggcaagaattggcagacgacagcgcccgattcagcgggtcggcggtgtaccaactgctctgatcgtagtcgcgcccttcccacttcacgccgcaggttgccgccatttgctcgtaggtcttgcggacccgcgccccttccatccccctgagctgctggatggtcacatccgccgagactggagacgggaatcgcttcaggtacatccggcgtgcgacgagttcccgctgctgcggagaggcatacaattcggcctgccggagcagtcggtgggcgctgtgcgttcctcccgtgccgaaggcgtacatcttgacgccctcctcaccgacgaagcacatcaggcagttgttggccgccagcgccttggctgcttgctgggtgatcgacgtgcccggccccagcatgaccagggacaactggtctatcggaatgagcgttcgtccttcgccctgacgaaagaccaggccttctttgtccttgtccaggccgccgcgctccaggtagaggtgcgtccagcggtcctcgaacttcggcagttcgtgcagatcagccataggttctcctaagcgcgggcaatgcttagcagacccatccccagtcccttggccgggccaatgccagagcagagcgtctgaaaaaacttctgcgtatccgtcatttccagaatcccttcgtactggacagcaaagatcgcgattcgatgggcagatacgccatccgcattacacccatcggctattcgaccgggaaactctacctgaccggcgcgatggacaagagcccgaaaccgaacgccttggctggaccgattccgcattcgagcaactgcttcagcaccttcagattacctacccggaagctcccctcaaacagtacggaccaccactgcatgcgctggctgggctgcggttcgtgctttgaacgccatccgtaagcccaaccggtgacgaagttctccaaacagaccggggaatccgccgcatctcccaacttgcctttcaaccagtcggcgtgatcgaccagcgtcgggcaaatgcgtttgcggctgccgttcggcgatccgtcctgcactttccgcgttggattggcgcgcaggcggaaacgcaccagatcgccgggagcgattcgatgattctcctttgggctgccaattacaaacacatcgtcattctcaaggctcatggtgatccttctggtctgtggtggcgcggccaacaagaatccggcattgccaatcgggcgtccgccatcatccacggcatcttcattcaacccgaaggcatagtgccaatccggcggctcgttccccgccgactggacgatgatgaggggtcgtcggacgccccggctgtgatcgacagggtaatcgatgcggaagaggaatccggcctgatcgctacgggaatggtgcacgtccgctgtatccggctccccgggcaagttacgcagatggtccagtcctgtgccgctgtagggtgcgcagtacgctgcaaggcgttccttatgtgacaccgggaccttcgacggaaaggccatacacaagcgctggtgaactcgatacagatttcgcagccagcgccgggtgatgctccaatccgggcggtcagggttgtcaccaacattgatgagcaggtgggagtggtacatgattcagatatcctcttcttccaaagcctcgcggcgaatcttctcgggagcactgcgcagtgctcgccgccgggtttcctcgctgcggaaacggataatgtcggcgcgggtccggagaatgtcatcgcgccaccgcacgtcgcacgggtcaatccggtccaggcccatgcccatgccgtactcgatcatggtcacggcatcgtggcagagccggcagagagaccgcaggtcttcctgtgcctcattgcccccggcgcggcgataggtcacgtgctggacagtcgtggccggcgacttgcagaagacgcagaggccctgatcggattgtagacgctcagcacgatgcttcttgtactggtcgttattgtagtccgcgcggggacgaggtggtggcggcgtatgctgctggagcgcatcgccgaccgtgaccgtgacctgacctcgtcttaccaatcgcggatgatgcaccggcgggtcgaacgaaaagggtgtgtcgtaccagacctcggcgtcaggcggagctgtatccttgtcatttcttctgcgccactcgatcaggcagggcaactcaatgttctcgtagcgtttcccatgctgatcgcgcggggcatcgtcggcatatcgcggatgccacggcattatctggagcgcagcctcgatatcaccatcgaccgccattgggttggtccatgtctcatccttgcgcggctgggcgaataccggcatggacggtggacacgacttgcgaccgaggtacaacggccacttcggggatcgcaacgcttctgcgaccgtggcgatcaatatcgcatcgccctgcaaagcgaccagaaaactggcatcagccagatattccagtcgtttgatgaccgtaccctgcgcaccggtcttgagcccacctgccgctgtcgtcaagccaatacccgccccaacggtgtgatagtcccaccagcgagcgccgggccggtcgatccgtacacccatcgtaagcgtgttcaaggctggaagcttctcgcgcgcccccggtcgcgataaacccatggcgcagcaaatcagccccagcacacccgatttcgtcggcgagtccatgcttcgacgaatcacaaacttggatgtatcaccccacgcctggagcgggccttcgaaacgcaggaagatcgtccgagagtctgtcatagtctccctcccgccggcgccgtgcttcttttgccgacctcctccatgatagcggtcacgaagtccgggaactttccgaattccttcttctcgtccacaacggactgctcttgctcaggctccctcttgcttttgtcgatccatgtcaggcgatggcgtgagctcggggaaaaccagaagcgttcagccgagagggcatagccgtcgatgagatcatgtgcatactggccaaggcgcgcgatgctctcgccgatcagacctcgcacagacttctccggaaccgggtcggcaaaggcatttgcataacttacaggggtggcggtctcggccttgacctcaaccaagatgccgtcagggtagttgaacgcgccgtatgcgtgttgctttccagaggggttcgcctttgcggcgccttcgaggaagcacctgacggtcgtcgtggcaagctccacatcgccgccaagattcttgagcagctgctcccagtcgatgcagaaatgcttgtagaagcaggccgaattgaacatcgcctcgctgacgtgtcccgcccccgcgtcctggccgggaatgtcgtctgctgccgtgaagtaatccacctcgtttacgaccgcgtgagtggagatggcgtgtgctgcggacagtgcagcttcgacggtaaatttgcccttcagaccttcgaacgggcccttcgcatcaaactccgtcatgcgtccgcacaaggcgatgtccggcgtcttgacgaacttgccgatgacttcggcgaacttcttacctaaatcaccgttaccggcgctcacggcgacccccatttctttgatggctgatcgaggcaggaagaagaggatgtcaaaagtgttctcatccttcaggccgacaccgccctctttgaagacttcccggacggctttgaggtgttcttctttgggctcgttgccatcacggccggccgctttcgcaatctcctcaatcagtcggcgcgtgcgaaccccgccgtctttctccagtgccgctgcgaattccgggctgcgtcggatgcttcgtttgaggcattggctggaaatgcgcgcgcgggtgacgccgccgaagatgcacgtcttgggggcacccagatcgtcccggttgaggttcgacggactgtggttctgaatcatgtggatttcaatcagcatagtcgcctccttgtggttgaacagttgcgttcaggtactcgcacgcccacaggtcctgcggcgtgcggtgagtttcacggcaacgagcgagccgttggtgagcattcaaccggctcttctgccatgtgtcgtccatgttgaactccctgtcccagagcgacaggtcgtcgagcagcagcgcccagtcgatgccggtcacagtctccgcgtggaccacacgacccgcaactgccttggcaacctcgcgcaagccccactgtagtcgtggttcgatgtcagaaaggcttgagcaaatcacggcgtcgaatcgccggcgaaaggtattgcgggcgcggtaatccggcggatcgcacggttcgcatctgccaagcaccgccgggagtgataccccaacatccgattcaggccgaacatacggaaccgaggatgcacaatacagcttggcgatgagccatgagatttcacgccgcggagttcgcgcatttgtcgcacgcagcggccaccacaggccggtgaacagatcaaatcccgaaagcgtcttgtccagcggctggcccgccagccaacgcaggcgagaacgatcgccttctttgagattctccagtctgttgatgaattcaatggtcggggtcatagcgtagctcccttcttgcgacacgcgcctgacttccttgctcttgtcttcttgttgatgagcttctcaagttcggcgtacgcctcggtcatcgccacgcggcgctgaaacgaagaaccgcgagcagtggacgcaatgatcttctgtacgaccggcttgaacgttgagcggaggaagtccctgtcatcgcccgcgacattgcttttgtccaagatggcgcggattcggtcttctgtttctggtgcgagcaacgccaaggcagcgcggatttcaggatgctcgcgtttatgattcggtgtgagctgcttcaacaggtctagcaattcgtcgccaacatcgcctgaaagacgcacctgtgactcggcagacgtatcgggaatggaaagcgtcgttgcgtcttgatacacaaactggttgaccacggggcctatcgcaatgcgcttgcgtccctgctttcctgcggcggcacgaaacgccgacctccagaacctggcgtgcgcttcggcatcggcttccaagcggggaagcgcaagcgcctcattcttcgacaccagaagctggggatccgatccccagaacttcttctgccggaggtcttcttgtccgattgccgcttcttcctttttgttcggcttcttaacgaggtcctggaacatcttctcgtttgtcttcaagacatcatcaagggcgttcgctatcgattccgcgagttgttctcttggtaagcctgcgtcaagtgttcctcgcagtttgtcactgcatgccttctgcaactcggccagtctgcagttgaggatgatccacgcggctttcacctccttctttgtcttggaatcctttgcattatgccccaggttcttgagatgttgctccacgcgtttggcgaacgcctgactttccgttagaggtgttgcccagcccgcagcaaacgcgagcgttgacctgccctacggatggtgggcgcggggcgagcttgatagactgggctgccatagacacgaaaggaactatctatggcagacaagagtacacgaccgaaacgctacagtgaggagttccggctccaggccgccaagctcatcgtcgagggcgggaccacctaccaccaggcctcgcagcaactgggcgtcagcgactgggccctgcggtgctgggtcaaggccttccgcgctaacggccacctgccgcccaaagggcagatggtcccgttggccgaagaactcaaagcggcccggcgggaattggcccaactgcgtctggagaacgaaatcttaaaaaaagcggcggcgtacttcgccaaggagtccctgtgaggtacgcctggatccacacccaacgggactgctatccgctgaacctcctgtgccgggtcttgcaggtctcgcggagcggctattatgcctggtgtcggcgtccgccgtcggcgagggcgcagcggcggcaggagattgcccgggccgcccaacgctctcacggcgattcgcacgggacctatggttaccggcgggtgcaccgcgacctgatcgaagaccaccagatcgcctgctgccgggagaccgttcgtcacgtgatgggcgatctgggccttcgtggccggcataaacggcgtttcgtcaagacgaccgactcgaatcacgacgagccgatcgcgacgaatcggctgcaacgcgacttcgccgccacgcgtccgaatcagaagtggctggcggatatcacgtatattcgtctggtcgagggctggctgtacctggcggtggtcctggattgcttctcgcggcggatcgtgggctggagcctgagccggaccatcgatgcgtccctggtctgtgcggcgttggagatggcgttgcgtcggcgttgtccgcaagacgacctggtccatcactcggaccgcggcgttcagtacgcctcgcaggcgttccgcgatttgttgacacgcgagggtctgacgatgagcatgtcacgcaagggcgacccgtgggacaatgcgatgatggagagcttcttcgggtccctcaagaccgagtggatcgacagcgattacgccacggaagaacaagcccgcagggaggtgttcaaatacatcgagatgttctataatccgacccgacgtcacagtgccctgggctatctcagtccggccgaatacgagcgtcggtatgaagccggaccgttgacccctatggacgaggcagcctagccgttagcggttcccgcgcccaccgtccgtagggcaggtca

SEQ ID NO: 545 - DNA, 31871 bp, Artificial Sequence
  Synthetic Oligonucleotide
cacccttgctcctctttcttttttttacaacgcgagggcccccacggagatctaccctggtccgctgggcggcggcgcaagatgtgtataggagccaggctatatattgtgtcatcccgggcaagcgcacgcttgacccgggatccagtcttttagaaacacccgtggaaaggtggaaatggcggttcagcgaccgccagtacaaagtagcggcgcttgccatagcgccgtttgggattgccgtccatggggggggatggcaaagtccgtttgccacagagaccggaggtctcttccaagcaggcaactccgttgcctctgccgaacggacttcggcaacccttatattacaccaatccgcgacaatctgcgccttttatccgcgtatatctgcgtgaaccgtggaacccgggatccagtcttttacaggaaagtttgaagtccgagccggcttcaggactggcataagcatgaaacccatattgccggctcgaactctaaacacagccagcatggagttcaagagccttttcagactgaaaaatgccaccatacaagttggctcttggacttcatgcgtaacatattgctggctcgaactctaaacacaaccagaatatatttcatccgcgaggcaaataatgcttgacatagaatctaaaccacacaaaaatagatttgagagggtaaataaagaaaggagcaggaaagatgagcaagagcttagtttttgtgctggcgttcttatgcctggcggctgcgtgcctggggtcggaagcggccgcgcctgaccctccggagccactccgcgcggtggaactgacgcctccgccttcaccggtaagagcgttgccagggcagaagtccgtgcctccctggaacttcagcgtcaatccaaacccgatcataaacaactattacgactacatgatcggcggctacaacaacctgcctctgaacctcgtccccgagagccagggcggaggctatttcctcacctggacggggcgcaacagccccaccagcgaccgcaagtcctattacggctatctgtactcatccggaatgccaatcttcgttaaccagatcgttacccagggagaaggcgagcacggcatgccggcattggtggtggatcccgttgatggaaatcctttctacgcctggacccagaatgtggacacggacccggtgtccgagattgtgctgacctccgatgccttcatagccggaattgccggattgttcaacaccacccagatcgtgatcgacaaccccgtcaccctcaccgcgccggacgggacggagaccacaaacaacgttttctactggcccagcctggccatcggcccctcccctctggcgggcaagcgcaggctctatctgctgggacggcaaaactgcaacgtctatctggcaatggctgatttctcccgcgatgatgtcgaaaatggaatccccctcaactggcagtactccagcgttccgcaactcaacacctgggaactgaatgccgtgccaaacaaaacctatctggccctggaaactgactccggcgggaatgtcatcctggccggatatcacaacagctactcgattgagaatgatatcatcgtcttcatctgcggcaacttcggacagggggaatggacgttccacagcttcaacagcaggatgcccacctggaaccccacctatcccggcagcaacggcggcttctttatagatgatgaggggcaaccctttcaggatcaagacctgcactggaaactgttgaactccggacatctgaacgccaccctggatagcggtggcaggctgcatatcgtggggatttgggccttggccggcggggacggcgtatttttccctcatttccagttcgtgaaagaagctgtttacgacccgacttggaataatttcgagatccgcgacatctttccccaaaaaaattgtgacgaccttttcaatgcctgtttcaccccctgggacatgctgccgccctacggcgaggttgacgaatggatctacgatgaggaatatggttactatccatacacgttcactgactggcccttcccccactgggaccaggcagcacacgaaaacaccatgatgttccactataacaacgtcaagatcacccgcgccaacgactatggccagatggctgtggtctggcaggattccaaacgcgcctttgactggtgcgtgtatcattatcccggctatgaggcctgggaacacggcacggacatctatatcgcctatacaaactatggcggctcggagtggcaggacccgatcgtgctcaacaatgtcgatactcccgaactggcgggcatcaagccgatgtgggtgtatccggctgaccggatgatatacactggcttcaaccagtacggaattaaagagggaaaactgggcctgatgttttacgatgacttcacctggggctcgaattctctcccgccaccctaccaccccgatcctgacggcggccgggtgatgttcatggaactgcatatcggatacctggacgccaacgatcccagccaggcgccagctccggccatcctggcgcagaattggcccaaccccttcaatcctaacaccaacatcagttttgaactgcctcagcccggccctgcccggctggaaatcttcgacctccgcggaaggctggtaagcaccctactggacaaggagatgggagccggaaaacatagcctgaactgggacggcaccgactccaacggcgcccaactggcaagcggagtctatatctaccgcctcagcacgggaaggacgagcgccagccgcaaaatgatattgctgaagtgacgggcatccgcccttccaagtccgatctttataccgagccgccgcgtgtattgcgcggcggtttgctttccgcagaccaagtattagcagcgggaaaactgcaatgaaatagccgctggtggggctccgtaaaatgggagtggaagccgccgcatggaacaccttgaaagtaacaagagaccgccccaaattgacctttcctgacctaataacccctcaaagcaaatttcttgacaatgatctttggctaaaatataaggttcccatcgagcaaaaggagcatgttatgtacaatcttctttgtgataattgggtaaacgtggtctatctttcgggcaaaccagatagaatatctttagttcaaactcttaaagacgcacactgtctgcaactggcatacagcaatcctatggaccggttcgctgtcttcagattcctgcttgctcttggctactggtgtttcgccaacaccaacgtggagcctgaacctgataagccgcttccggtctcctggataccctggctggaagaaaacaaggagtatttcgagctttttggtgatggaaagagatttttccaagccgatcccagttccaggatcagagccattaccgaccttattcatgagataccaacagctcacaacctatgccatttcaaacatgtcaccgactatatcgatgggctctgcgaagcttgctgcatcaagggactgctgagattacctgtctttaccactgtcggtggcagagggataggcgctggaatcaacaacactcctccattttacctgctctggcatgcaaatgatctcgctggcatgctggctcaaaattggcaaccctgggataatatggggattccggcatggttgggttcttttcaaaaagaaagcagggaagtaggcttacttgctggaatgacctggctgccgcgcaaggtgtatctgcatgatcctgtcccaggtcaggcagcatgttgttcctgcggcttaccctccaaagctctcgtctattcctgcagcataaaacctgaaccagtgccggaaggccttaaatggaaagaccctcatggtgtttacaccgatcagggaaaaagtctccagtccaaaatcaaactgatgtccaatgatagatacactttcgcggaccgggattggtatagcccgttgttcagctatttgcacgcggaaggaaactccagacaaggaaaactatggttggttggatttgccagcgataaagcaaaaagcatagacatctgggacaagatcatcgagcttgagggaactgatacaaatgatgagctactggctcaattggcaaacagggctactgcccttaatgccatgcgcaagaagcctctcagaggtgatttcaaaaagtcagtgggcactccccagattgctgacattatcccccacgccgaaagcagaattgccatcaatgcgggtaaaatgactgagaacaggggctattcctggcaggatgccgatactgaatacggagaactgctcaccaaggttgcatgctctttggagccggctcaaacagtggacgccaggctcaagagaggtaaattcatttcccgcaagccctggccagttataccagaatccaaaacaaaacccgcagaggaggaccagaatgaatagaggaaccgttgacttcattgcaagcctggagaacctcaaagaaggcgatttgggcattcttagaaaactcaggggagcccggcttgatgaaaagcttcccggatttgacctgttttccgccctatggtggcctttgcggcaaaagaatcaacgcgctcccaagcgtgaagtggcttggttgatcgccaaactttttgctgaattccgctttgaacagcgcgagggagccacattgcccattcttatgggaggcatctgccggaagttggaacccaaaaaggaattaccccgggtattggcacgctttgatcaactcgcatcgcttgacattatgcagatggaagagccgctgtcggtcatcatgggtattttgcgcaagcaccagcaggtctgcctggactgggtagggcttactgatgttctgtcattttgggagcaggaacctgtcaaaagagaatggtcggattcatttattaaagcatacaagatcaacaaggaggattcagatgttgattgaaattcatatgattcagaatcacagtccggcaaatcttaaccgggacgacttgggcgcccccaagacctgttatttcggtggagtattacgttctcgcatctccagccagtgcatcaagcgcagcatccgttttgccccggaattcgcggaccttagaggaggtatccgaacaaggcgtctggcagagaaactcgaggaaatgctggaaaacaaagataagaagctggttgccaagtttcttgaagcctgcggaatcaaaaccaaatcttccaagaaagctgcaaaaaagtccgaaaagatacccgcggaagccgatgaagatcaggatgagcagcaggcggctgatacatctgacatgctggtttttaccacttatgatgccctgcgccaaatggcaaagctgctttccgactccaaactaagtgaaagcgaaaaactgctgcagttcaaagatctgctcacaaactgcgtccattctccggatatagcactttgcggcaggatgctggagaccaaagagcttaaaaacactggcgttgaaggcgccctacaggttgcacatgcgatctccacccacattgccagacctgagatagactattttgtggcggccgatgatgttcccggtgaagacgccggagcgggtcatattggcgaatccatgtttgcctcagcctgtttctacaaatacttctccattgattgggaacagttggtcaagaacctgaaaggggacacgaatctggcagcccacaccgtgggtgcctttctcctcgccgctgccaaaaccaaccccagtggcaaacagaacagcttcgccgctcataactatcccgatggcatccttgttgagttcaagaattcccctattagctacgccaacgcattcgtcaggccagtttccgtggtcaaggaatcggacctggtggaacaaagcatcggccagctttccaactacgtgaacgacatcaggcttggctattatgatgagcaatccccagttatcagcttctggttttctccaaacaatcgctattcccttggcaatgagcattccaaactggcttccagaaacattggcaacctcaatgagcttgtaggcgctgtgttggattatattggcggcttcaagtgggaagaagttcagaaaagcaaggcttatgttggcggctgacatgagtgcgccacccaacaccttattcttgcgcttggagggggctttgcagtcttggggcagcaacgaggctaagtttgctttgcgcaggactaccgacgctcccacaaaatcaggtgtcctggggctgctttgcgcggccatgggaattgggcgcgcggaggctgctgattcatggctcccaaaactcgccaacctgcgcatgggcgtgcggatagaccgccccggcatacgctggtgggacttccatactgttggagcgggacaaagaatgcgcatggcagagctgaaggcacccaaaaaaccttccatggttggagctgccctggctgataccctgacaccaagcaaagtaaaaaccagggcagagaccttgctctcacgccgcgaatatcttgccgacgccagttttctggtcgccttgcagggtgagccggaacttgtggaaaagctctccgccgctctggccaagccggtctgggcaatttatctggggcgcaaatcctgtcccccttcacgtcccgtgggcgagcatgctccgggcttttataacactttggaggaggcgctgtccgcggttcccctgcaaaagcgctggcacaatgaacccctgccgcaaatactgccttgcgtcatggactggatccccagccaggacggagaacatgcgcctgatgacgcggagattcattacgatctgccggtttcttttcagccgccccgccatttgccgcgcttcgtgatcaggcgtgagctggttgtgggagaggatgtgcaagtgagcagggaaaccggaaccagcgtttggaggcccaaaggaacccgggcggattataacaattccgagtataagaaggtcagggcggagcggcttgtgatggaccatgccgcgtgcatggtatgcaaagctcccgccacgactgttcaacacgtgaattaccgcagggcgggaggcaaggaaataccggaagacctgcgggcgctgtgccgcctctgccacgacgcctgcaccatgctggaatacggttccggcatgaccaccgaccgcatcgacccctgcgaccccatatggcgggagcgaatactggcaaagcgcaaagatatagtcgagttccgttcgcgcgggcagcgtttccgcaaaatgaagccagaggaggaaaacggatgatctacttgtccaagctattgatcgatactggaggcaatccagaccgtccccgccccggcagaaagtggctggacaatatctataacgtccaccgccgcctttccatggcgttcccttcaggtttgcgccgggagcaggatccgcatttcctgaagcccttttcgccaaacgacttccaaaaaactcccttccttttccgggtcgataacaacatcgacggaaacgataaaagggcgattattatcgtccagtccgttcttgagccggattgggattattgcttccaaaacgcgcttgatttcctggcagcgccaccggaaacaaaggagtataatccagagtttcaagcgggacaactgctccggttcaggctgcgggtaaacgccagcgtacgccgtcatattcctgagaaggtgcaacaggacggtcaaaccatagaaactggcaacatcctgcacaaaagggtttctctcacctgggatccctcttccaccccggatcaggcccttgccgactggctggctgccaaaagcccaaagctgggcttcacccttcagcgctgtgagcttcttcaactgggttgggtttatggctccaagcctgaacctaaaaatgtcaaagcaaaggaacagggacagggctactggcgtgaacacacatacaatcctctgcgcttccgttcggctctactggagggaattctcaaagtggatgacccgaaactgttcctggaaacgcttagaagcggcattggaaaagcgaaaagcttcggctttggcctgctgtccgttctgccaatcaggaatgatgaataaagacctgcactctatcccccggatcagagatcggcttagctatctctatgtggagcatgccaaaattgatcagaacgggcaagccatcgccattcacgatgccctgggagaaaccccggttccttgtgccggcttggctatgctgatgctgggaccgggcataaccatcacccatgcggcaatactttcactggctgcctgtggctgtctggtagcctgggtgggggaacatggcgtcaggttctatgccgcaggcacaggtacaacccgtagcgccgtcaatcttatgaaacaggcaaagtactgggcagacccggttttgcatttacgggttgtgcgctccatgtatcagttgaggttccaggatgagctttctcctgatttaactttgaaccagatcaggggcaaggaaggtgcccgggtgcgcgatacatatttccaactctcccaaaagtatggtgtgcccatgcagggcagaaactatcaaagagacaactggaataaagcggatcccataaaccgggcattatctgtggcaaactcctgcctctacggcatatcgcacgctgccattgttgctgcaggattctctcccggattgggctttgtccacactggcaagcaactgtcatttgtctatgatatcgcggatctatacaaaatggaaatggctgctcccgccgcattccgggcgaccgctgaagggatcggcgaactcgaccgcagagtcaggcttgcctgccgtgatgaattccacaggcagaatctactcaaacgcattgtcgcggatattagttctctcttcggtgatattatgccagaggatagcccggatgactgttttgccgaagaaccagccttgcctggaggactctggtctccagatggagaagtttccccaggcggcatatcttacgggcaggatgatctgccaaaggaagattgatggtggttttagtattggaaaatgtgccaagctccctgaggggtaagatcacacgttggctgctggaagtaaaagccggggtgtttgtgggtaaagtctcagcaatggttagagataaactgtgggataaggttagaagcaattgcagcggtggaacttgcctgatgatctggagtagtcagaccgagcaagggtttgatatcgaattctggggtgccgcatcaagagtcgttacggaatgggagggtatcaaacttatgaccaagcatccttaaactaaggcttgaaggtgttcaatgacctcttagacctctattgatcaagtgtattccccatgcatgtgggggtgaaccgtagatggcacaagtgcaagcgccgcaaccacagtattccccatgcatgtgggggtgaaccgtgatggcgtaagcaatgtgccagaagttaatagtattccccatgcatgtgggggtgaaccggaattgccattgatgcggcaaataatgatcttgtattccccatgcatgtgggggtgaaccgggagagtagctctcttcggaaaaaacagcgaagtattccccatgcatgtgggggtgaaccgagtcacgctgttattgcgtataggcagggtgggtattccccatgcatgtgggggtgaaccggtcaaacgcggtttcaaggaggctgagtatgtgtattccccatgcatgtgggggtgaaccgggcggctggagccattgagccataaggagatagtattccccatgcatgtgggggtgaaccggcatccaatatctattggggcgtttcaggatagtattccccatgcatgtgggggtgaaccggttacctcttaaggtttaatgagattgtggcgtattccccatgcatgtgggggtgaaccgaaatgagagatgttaaacaggagaatacataagtattccccatgcatgtgggggtgaaccgcggtttatagaccgatgcaagccgatattagggtattccccatgcatgtgggggtgaaccgaggttcccgccataactgcccaacaccagtacgtattccccatgcatgtgggggtgaaccgattgacgacaaacataaagccatgatgaactagtattccccatgcatgtgggggtgaaccgattgacgacaaacataaagccatgatgaactagtattccccatgcatgtgggggtgaaccgttatgcttacccaagctgagggggttgctggggtattccccatgcatgtgggggtgaaccaggtggacgcatacctggaagcggaggcggagaggtattccccacgcatgtgggggtgaaccgccggctaacgcgtgtttttttaatgttagttatgtattccccacgcatgtgggggtgaaccggggcagatggacgtgaaggcgctgctgaagctgtattccccacgcatgtgggggtgaaccgtccttttgcttgttggagatacctaccagcgcgtattccccatgcatgtgggggtgaaccgtggtagtgcctctcgtgaagcatcacaacgaagtattccccatgcatgtgggggtgaaccgacgccttcgcggaggtcttttttaagagtgatgtattccccacgcatgtgggggtgaaccatgggcgcaaaagatgtttgcgggtgagcccttgtattccccacgcatgtgggggtgttgcgatttcctcgcgcgcgggcgactctcatttgcatctggcgctcagaccttggtcttcctggggtcaaccttaacctttatatggatgacctaaggatgatggcaccaaagccagtagcagcaagggagagcggtatgaagcaatatgaggattatcacgggaattattttgaagggacaagcatccagtctgggtagtttgttggtattttgtcggttgtctaaagtggtggttttgtaattgacctgaaatcggtgtgacggggttttatggttttttgaagttcttttttgtatcggattgtaaaattttcaccctctttctatctgtgtaatttgtggttttattaaaagactggatcccgggtcaagcaagcttgcccaggatgacacagtatatagcttgggggtggtttgtttcaccattccacctttccacttctaacaattcgtgttagtttgtgtaatttaagggctgccgaagtctgttcggcagaggcaacagagttgcctgtttgggagagacctccggtctctgtggcaaacggattttgccacccctggacaatggatcacggctcgcagcccgtgatgacacagcatatagcttggcggacttgtttcggggctgatgcttgtttttgggttggacgtttgtccttattctgttcttttaatccgtataatttgtgtaatttgtggatatttttaaaagactggatcacggctcgcaggccgatatagcttggtggacttgtttcggggctggttgactgacccaaacggcgctatggcaagcgccgctacagtaaaggcggtcgctgaaccgccttcagggcagattcttttgtcctttaccttatccggcaaaattaacttgacataatttattataggtgattatctggtgactgtcattaagtttcgttttgaaatctccaaggaggcagatatgaaacgatcgcttcttatattggcgctgcttgccgtcacggcatcagccttcgccgccggagtacttatcaacaagcaaaacactcagtttcagattgctcaattgcggagctgcagctatgaggtgcaaatcaccaatcaggttgcggaagtgcaagtgaacgaaacatttgtcaacaacagcaacggttttttctatccccgctactattttcccatcccgcgaggcgccaacgcgacccgcttgagatggagctatggcgacacctggcaggaagcgtcaatttcaccggtgccgcaaaacccacagggcggcccgtcctcttttccggatgaatttgtcgtttatatccagttgatgccggtagttttcgacgtggcagactccatggccgtgaatgactccctgcggctggaactctcctacgtgatgatgttgagttacaatttcggcagcgtaaccctcaacctcaagaacgactacagcttgttgcagagcactcctctggatttgcagtccctggatgtgaatgtctcgtccgacaaagagattttggatttcaacatcctgaatgtgacagccagcacccaacacacggggcacagcgccagcgggcattactccctcgccaatcaacccgccaccgccaactatgcctgccagatactgctatcgaccgccgaactgggctcctggggcttgagcaccttactggatgatgtccccgatgaggaggcgccggggtttttcgtcttcaatcttgaggaggaaagccttccggcggattccactttattcctgcggctgaacatcgtgatcgacgtatccggttccatgacctttgaaaaccgcctggaaaacgccaagaccgccgcgatctatgtgctaaaccatctggaacccgaggattacttcaatatcatcctctttgaccaccgggtgcgccctctctgggattatctccactccaatacagacagcaaccgccaagccgccatttcctatatccagaattatgagattaccggtttgaacggaaccaacctctccggtggtttgcaaaacgcgctgtatcagttttcaccaactcccccgggagtcaaaaactgcgtgctgctcctttccgacggccaaccgactgtcgggatgacggatacctaccaaataatcaacaatgtcaaccaacacatcaccaactataacatcgatccccgcatcttctgctttggagtcggcaccgaggtcaactatcatctgttaagcgcgctgtcacaatacacagacggcgtcaccatctttctggagagctccgagatcgtcaatacggtcagcagcttctacgacgtcatgcgcaatcctctgctcctcgatcccgaactggccatcgtcccgcccgggatcacggaggtgtatccctatcccatcccctccatttatggaggaatccagtatcgcatcgtgggcaggtattcgactccgggaacctatcagatgacgatcagcggcgggcaccagggcacgcagttgaacctgaactattcccaaaaccttagcggagaggaagcccccggtttgagcttcattcccaagatctgggctgcttccaagatcgacaacctgatggtggagtattattcctatccgcccaattcggcggaagcgatcgccctgcgtgatcaaatcaccgagatcagccagagtttcggggtggtctgcatcttcaccagtttcacttccgatccgcccgacacggatttggatgacgtggtccaacccgtggtaaaaatgcccctccgcctgctgcctaaccagcccaatcccttcaatccctccaccctgctctgttttgaagtatccgccgaactggagggactggcagagatcagaatctataacctgaaaggacaactggtgaagatcctcacggtgaaggttgacggcaaaggcaggtacagcgtgccctggaacggcaccgatctgactgagcggtcggtttccagcggggtttatgtctatactgtcagatttggtaagtacctgctccacggcaagatgacacttgccaaatagagccggacaaatgccctttgcggcgctatggcaagcgccggtactttgtaaaggcggtcaccacaccgccttttttctatccctttttaagctcttttacttcgtgttaattcgtgttaattcgtgtaattcgtggatgaacttccaaaagtccaacctgcttcagccccagtatttgcggtccaggctgcggtattggatggcttcggagatatggtcggatttgatggcggccaggccttccaggtcggcgatggtgcgcgccaccttgaggatgcggtcgaagacccgggcggaatagcccagcttgtcgatcgcgtgctgcatctggctttggctgggggcatccagcgcgcagtgtttgcgcagcagtttggagttcatctgggcgttgcagaagatgccgtcattggcatagcgttcccgctggatggcgcgggcgcggttgaccctggcgcggatgtcggcggagctgtcgccggaaggcaaagaggccagatcggaataggtgaccgagggcacttccacgtggatgtcgatgcggtccagcagcgggccggagattcggctgcggtagcgttggatggcgccgtattcgcaggtgcaagggtgattggggatgctggagccgaaatagccgcagggacaagggttcatcgaggcgatgagcatgaactccgcgggaaaggtgaggctttgggaggcgcgggagatggtgacgatgccatcctccaggggctggcgcagcacttccaacacgccgcgcttgaactccggcagctcatccagaaacagcacgccgcgatgcgccagggatacctcgccgggacgggggaaggttcctccgccgatcagggcgatatcgctgacggtgtgatgcgggctgcgataggggcgggtggtgaggatgccattgtgaaaatctttggagtatcccgccacggagtggatcttggtggcctccagggcttcatccagcgagagttccggcaggatggtgggcacgcgccgggccagcatggtcttgcccgaaccgggaggacccagcatcagcaggttgtggcctcctgcagcggagacctccagggcacgcttgacctgaaactgccccttcacgtcgtgcatatccacgggaaaggcgttcagagaggaaaaaatccgctcacggtccacctcggcgggcggaatcttggcctcgccgcgcagaaagagggccgcctccttcagcgaggtgaccgggatcacctgtaatccttcaatgatggcggcttccccggcattttcccagggcaggacgagggtgtcgatgccatcccgtttggcagctaaagcgatgggcagcactcccttgacggggcgcaggttgccatccagggaaagctcgccgatcagggcggtcttggtcaggtattccaccggaatctgcttgatggactgcagcacggcgatggcgatgggaaggtcgagggcggcgctgtccttgcggatgtccgccggggcgaggttgatggtgaagcggcgcacggcggcgtcccagccggaattgcgcagggcggcaaagatgcggtcctggctttccttgaccgcgttggatgccatgcccacgatggtgaccgcgaaaacctgagaggtggcgtcacactccacagtgagctgttgcccgtctatccctatcgtggtgtaagtgcgcactattccaaccatttgaacctacccttgtttggtattttgctttgttttgcagtaaaatagcggtcggcgcaacggtcaagggaaaagtgcgggaggagggtgactatccgcaaattacgcgaatttacacgatttattagaagtggaaaggtggaatggtgaaaaggagcctcgaaataaacccgaccaggccatataccgtgtcatcacgggctcgacccgtgatccagtcttttagaaacaaccagccagcccggaaacaaacaaccccagactaaaagagtgtcatcacggccttcgagccgtaatccagccttttggaaacagcaaccaagccccaaaacaaacattccacctttcctccaattctacaattcttcccccatatatataggtgctacgacccctttatcccaggcaggaagcggattccagggcaagtatataaatatacttgcccgtaattgcgcggccatgtatcggcctcttccctttccctcgcgcgtgggtggccctcatttgcatcaccttctccggcgtgggtcttcctggggtcaaccttataatttataaggatgacctaaggatgattagctaacctgttgatggtgcaaatgatagcaacatgggaggcaaaaaagtatgtcttggagtttgcccgttggtttccgggctggctggttgtttccaaaagactggatcccgggtcaagcacggcttgcccgggatgacacagcatatagcttggtggacttgtttacaggctccatttcacctttccgcctttccacctttccacctcaaaaacacctttccacgtataataattcgtgtaattcgtggactattatctaacaggcttgctccagacgcgcccatcttcgcggatgatccagtccggggagccgcccttgccgggcagggtgaggtcaaatccggcggaggtggtttccaggcgtggtttaatctttttgccatcccgcagataggggcgcgcgcccagttgacgcagctttccagcccagcgtccgtgatccataaaatactgtttttggaggtaatagatctgcctcagatattccttttcccgctcggaggcaggcggcgaaaaacccgggtctgccgagccagcgggcgcggcggagaagaacagataaccccaacgctctggatagtgcatcgcgatcagtccctggggactccaaacccagttgcgttcaggcataccgggcactttggtgtagttgccgtccagccactcggtatcccattgcacgcgggagaagttgagccgccaataatcgccgtcccggggcgggcaggggacatgggcgaactcctcaaaggccggccagggcagaaacatctccacgctccagccgctgtcgaggtcactggggtcgttgagggtgccgtcgattccgatggcaaagcttgctcccttgatgtcccagccgttcagggggctgtgggcgtcgcggtaaggcttgaggatgaagaggtcccagagggtgcccagggcgttgatctccagttcgtaatactcgtgggtgtcgccgttggggtcgaggaagacctcaaaatcgttgtcgtaaaagatcaccgcgtcacgctcggtgaggcttgcccagatgtggggctcctccagccaggcgccgatgtagagtccggagtcatcccagagcatcttgacccaggtatccagatggggcgcgggtttgaggtcgccctcgatatccgtgaacagctccgtgggcagggcaagttgccagtcgatgtcgtccaggctgccatccaccttgatcccctccaccgttctgaacgcggtgtaggagcggggcgcgaactcgcccacgggcaggggaaaggtctcggcggcaaggacggaaaggatgaacaagagaacggggacaagcagttttttcatgggatagctccttatggttcgcggcaggctgccagcagctcacccgcggtggcgacggccagaccgacacaggtgtccgccgcgccgtaatagatgaagattctggtgccgggcaacactgtgccgtcggcttccacgctttcggggatggcggcggagggaaagaccacattgggcacttggccactcagttcccaggattcacgcggttccaggatgttttgcgcgctcctggcggttacgttccagggcaaagcgccatcgtgcagcgaaactcccgcctgatatatgtttacgctggcaaagtgggtcgcaacgccgtggtagatatgcagccagccctcggaggtcttgagcgggggcgggccggagccgagcagttcgtcccaatagtggggacggccgctgaagacgggggccacgggctcccaattaagcagatcgggcgaggcgtagcagacgatggtggctccggaacgcactccatccgcgcccagatggtcattgggacgggcaaagagcagatagctgccgccgatccgttccggaaagagtaccgcgttgcgcagatcggcatccgccagcaggcccagatagcgcaggctgcggcagtcttccgtttcaaacagcgcggagcggcagcccggggcgcaatcgatggcgcaggtgacgtagatgcgcccctccaggcgggtgacgcgggggtcgtagaggtggtaaatctcatagggaaaagcttccagcccgctcaccgccacgggatggccgtccacgcggaaactgacgccatcggctgacgcggcgcggacaaacagggtgcgcctgccgcgatcctgcacgcgcagcagcagaacatactcgccgccaagcttgaccccaccggggttgaagacagagctgacatcgcgcggcaaggcatccgaaacggggatatccgcccgggtgaggacgggattgcgcggatggcggatcatagcaggcctttcagctctttgacgcgccgctcacactcggcgaaatccctggaagggaaatcgctccagaacagctccgccatgtaaagcatgcggtcatagaccatttccttcagacggcggctattggaaatccgctccgtccagaggttggcctgtccgcccaggaagagtccggggttggaaaacctgaacttgccgaggtccagcccatagacatcccggctggtggtgactccgaagcctccgggacagtccgggtcttcgttatagcgccagtcaaaatagaggcggttgttggggcagatgatgtagcggttgccgttgtcatgagccatgcgggcggcatccaccccgtctccgcgccagcacatggcgatcggccggctgtcgatcccgccgtccagaatctcatcccaaccgatcacatccctgccgcgtttttgcacatgagccaccagttgatgcaaaaaccaggcctggaggtgttcttcatcccgcaaaccctcttcccggatgcgccgctggcaacggggacactctttccagcgctccttgggcacctcgtcgccgcccagatggatgtattggccgggaaagagttccaacacctcatccagcaattctttaaggaaatctatcacgctgtccttaccggcacagaggatgtccgtggaaatgccccagacgttgagcggctcaaagtcccgggggaagcaggccagatccggataggcggccaggatcgccatggcgtggccagggatgtcgatctccggcaccacctcgatgccgcggtcccgcgcgtaatccagcaccaggcgcacctgcttccgggtgtggaaaccgccgtaaaggctgccatcctcctctttgcgccaggcgcccacttcatgcaggcggggaaagcgtttgctctccagccgccagccctggtcatcgcttaggtgccagtggaatttgttcagtttgacggccgccatccagtccagatagcggcggataaccttgtagtcaaaatagtggcggctggtgtccagatgcagtccccgccaaggaaaggagggccagtcctccaggtcgaagcagggcagtcgcgcggagtcctttttgccttggcgggcagccttgtgccaaatctgccgcaggctctgcacgccatgcaccaggccgggatagtcctgcgcgctgatcaccgtgtcctggggacggctgactatcttgtaatggccgcctggacgctttcccttgcgcggggtaagttccaggcttacgctatgcggggtttcgctgtctggatccatgaagtccaacagcttgctgtaactgctttccaggctggaggagagatatctgtgggcactggcggagagttggggacagcacatgataataagcaacgggctggggcggaacgtctctttgagggggtgatactttttgggcttaggaagcatgtttcctaccttatcaacagggttttgatctggaagggcttgaaactgaggcggatgccccgctcgccgatgggctgcgcttcgctgtccggcaaggggttttccaacaggtcgcagacgctccagagatggtggccgggtgccaaaagagtagcctcggcggaacctcccgcgcattcatggaggcggacaacgatgccgccgccggattcagcgggcttgatccaatcgagggtcacggcatcggaaagcaggcgcacgggcggacggggcagagggttggcgagggcgggcacttccaggcagagcagatcggcgcaaaaggcctcggcagcctgccagagccgggagccggcatagtctccgctgtggaagtaaaccgcgtaggaatattcgtgttcgcccaaatctgccagggggtcaacgtcggcgggagagcgcaagaggttgaggtccatctcgttgtcgcgcacatggcagccgaacttgtcggcgcagaaaatggcgcagccgcggtctgcctgggaaagatcgaagaacttttggaaaggcacctcgaagcgcgcttcctcccaggcgttgcggggcttggcgctgcgtcccagcatgccggactggatgccaaagctggcctgggcagagcggacatcgggataccagtgcgcgcgcagcatcttgtgcttttcctgccagtcgatgtggtgcgagacgcgcagcaggcgctctccccggcgcagttccagggtctgccgcaggatggaggagcccacgcgcaaggtctggacaaggcgggcaaattccccgggcagggtgtagttttgcgccgcttccaggctgatcccctccgcaggcgtgggtgtggttgtgcggtaaaagtggttgatatcccaggcgccccagttgttgggttcatcctcccagagcagcaggcggtttgattctgaggcgaggagcggcgttccggactccttgtcccacacctcgctcacgcttccctgctgggttacggtcacgcgcaggaactcattttccaggcaatagccagccagaggaataggcttgggaatctcccccactccggctttgaaggcgatggaacccactccccaggcgggcaggctggccttgaccagcgttccctccggggtggagcaacaggtgagggggacgccgtcttccccgcagggcagcaggccttcggcaggggcgggaagcggcagccattccgtcttggatgcgggagagggattgagcagcagccagccctggccgggtgaggcttccccggaggtggtaagtccggcggcgcgctggttcagaaagtcatccaggattttgcggttaccggcgcagatggcactggcatcgttataaaccatgccaatcgaggagccggggatgatgtcgtgaaactgcagcaacagggtatcctgccacacggggcgcagttcccggggatattcttccccgccggtgagcgcggccaggtattccgccgccctgagcagcctttccgcccgcgcattgtcccgcttcatccgcgcctgggtggtgtaggtgccgcggtgatactccagataaagctcgccgggcatcacaggcagcagggagcggtccagagccttcagatgctcgaaatagtctgacgacctggcaaagcggaacttcggcacgccctccagatcgcgctgccggaggccatactccagatgcgcctcggtgggcccgccgccaccgtctccgatgccatagaggttgaggaaggcgtcgcaaatctcgctctgggcgaagcgttcctccgtcttcaggaaggcggagggattgttggaaaagttatagtcgtgggtgggcagttgttgcgccagtacccggctgccgtcgatgccctcccacaggaagaggttgtgggggaaggcgttgctttcgttccaggatagcttttgggtcataaactgctccacgccgcagcccttcatcagttggggcaggttgccgctgaagccgaagcagtcgggcagccagaggacatccggctccacgccgaactcctcacggaaaaagcgtttgccgtacatgaactggcggatgacggactccgcggagatgagattggtgtcgaactccacccaggacgccccctgcacctcccatctgccttccgccacgcgctttttaacctgcgcgtagagagcgggatacagctccttcatccagagatagagctgggcttgggaggcaccgaagatatagtccggataccgttccagcaggcgcagcgcgttggcgaaggttctgccgcccttgcgtttggtctcgcgcaggggccagagccaggccagatccagatgggcgtgaccgacgctgaacgcggtgagcgcgctggcattagctggcttggcgagcaggtcgtccagaatgcccgcgcaggcttccctgtcgctgttccagaggtcgcaaacccggttcagtccatacaggatacgctgcctgcgggtctgcccattgggcaggctgagcgcaagatccagcagcagttcgatgtcccagagtagcttgcgcagccggggatcacgccagaccaggctgcactcccgcagcctatactcgctttttcccccgccgaaaaggtcgttggcggcggcctcgatcagcagttccacccgttccccctcttgcaggggcaggggaacgaaatacttggcggcgttgtgataccagtccaccttgggggtcaggccctgccagggagtttggcctttgaacacgcaggcttcgccgtcacaatcgaaccacagccccagttccatgcccgcgggggttgccggagcctgcccgctgatcctgaaccaggcgctctgccagggtttgccccacagtccgccgacttcgatctccttgaaactcatcgaggcgagcttttcctgcgggatgggatccgccgcgctcacatactccgcccgcacgggcagcttttccccgtgcagcagcgctttctgcctctccacgaggcgtttgatccgctcgatatggatcttttcgttgtgcattatttctccatggggaccacgatgccccggataatgatattctggaagaagacaaacaccgccagcgtggggatggcggcaatcaccagggcggcgtagcccactccgctgctggcgcgctgcaacagctcgtagatgtgcaccatcagggtccacatcgactgatcctggcagaccaggaaggcaaaaaggaagttgcggtaagccgcgttgaaggcccccagagcgatcaccgccaggatcggcttgctgagatacatggtgaactgccagaacatgcgcagctcccccgctccgtccaggctggcgctttcatagatttcccgcggcaggctgtcgaaaaagcccttgagcaggaagatgaagtagccatccgccgcagcgggcaagaccagcgcccaaaaggtgttgagcaggttcaaacgcttcaacatcagaaagttcggaatgcccatcaccatcgccgggaaagccatggtgagcatgaagatcatgatgacctgatgcgtgaagcgcggtttgaagcggctgagcgcgtaggcggccagcgggttgaccgtgaccgcgaagaagatggagagcagcacgtagatcagggtgttgcgcagcgagcgggagtccgccagcatctgatccagcgccatggcatagttgcgggtgagaaactcccgccggatggcgcccttgcgctccataaaagttcccctgtcgatctccgcgctggggaaagggactttcccaaagcccgtgtagctgcttccccaagcccggttgagcgcgccgagggagccatacttatcctccaaccagtccctgaaccccgccgccacgctcactatcctgagttcttcgggagccgccctggtctggatatacagggccagatcgtccacttgcgcgccgctgtccggcaggcggacgggaatgccgacctgctcgaaactgctgtaagatgcctgccaggcggtgttcagcaggctgatcccgccgtacttttccttcagcgcccggcggaatcccggctccgcctccggggaaagccgcagatgctggatggaaagcacttcccgcgcatattccagccagtaggggcgcagcgggtcgccccgggcgggacagctttcgggcaggatcacctggctccaggtggcgtagctggtgcccaactccttgttcagcttgtccagattgccctggaaggtggggatcaggatggcgttgacaaaggttccgtccgggttcatatagagccgctgccagtccgggcgttgctccttgaagcggcggaacctgcccagatagccttgggtggagctggcaaagttgcgcaaaaagatgtccttttcctccaccgaaatctcttcccagcttttagccccggtgttgtagcggcggttgaaggccgccaggtcgccgccgttttcctcgcgcagcagcttgcggtattgcctctgcgccagcggatagacccctcttccgtaatgctccgacacatagtagaaattgactccgtagtccccgccgcgttcccgcagaaagcgcttccaatcctcatacacagcgggattgccgtccgagggcagttccacctcggaaaaggcgatccagccgcccggatagttgtccatcagacggctgctttcctcgttgtagcggctttccagatacttttggtagagcgcgccgtcccggtaaacatagcgcggcaccagatccagctgggtgctgtccaccgcgctcttgaacgatgaggaaatcatcagcaaaaagggatagaccatcgtgaccgagccaagcagcaggatgacgtgcaaagacgcgttcagcgcccgcaccttgaagctttgcctgcccaccctgccgatgatactcattcgtcctcccggcccgccacgcggaactccatgcgtgagatatagcgtatctgcagcaccgtaaagcccatcagcagcaggctcagcatccaggccatggttgtcgccagcccgaaacgcagatagaggtaagccttttcaaagatcatcaggtctgccacccgggtcgcctcgttgggcccgccgaaggtcatcaccaggataaagtcgctggattgcgccgccacgatgaaggccgcgatcagttgcacgatgatcagcatcttgaggctgggaaacacgatatggcgaatcttggcaaaaaagcccgccccatcgatgtccgccgcctcgtaaagctcattggggatgttcttgagcgccgccaggtagatcagcgaacccggccccactcccgcccaaaccacaggcagcaccacgcaaagcatggccagtttttcatcctgcagccagcggctcttgggcaggccgaaagcggtcagcaactggttcagggcgcccacgtcacccggggcgtagagcagtttccagaggtagatcacgatcaccccgctgatcaccgccggcaggtagtagatcacccggtagatcatcttgccgcgcgaaacctcctgcagcatgatggccaggatgatgggcgggaaaaagcccagtcccaggttcaacgccatgtaatacaaggtcttgcccacagaggaccaccaactgggatcgaaaagcatctccgcgaaattggccatgcccacaaaggggctggggcccaccaggctgtaatcctgcaccgccataacgctgccgctgatcaggggcacatatttccacacaaagatgctgatcgccgcgggagcaagcagcagcaggacgcagcccaggcgtttggtctgctgtcccccgccactcccccgctccggggccagaatcttccacacccgccacagcgtgaagcaaaaggcaaaaaggatcagcgccgccaccacggccgcccatcgttcccgggctttgcgcgtggcttccggcagatggccgatcatctccgcgttggtgcgctgttccgcccgcgccagcacccgcttgatggcggctttgcgtgccgcggggtcggtgccgagcttgcccgccagttgcaggccgatcagctcgtccagcggataggtcatgtattcataaactttctggcagttgtcgccaaagggttcgggacgcccctcgcgcatcgcggtctcaaaggtctgcagccagcccgccggggcgtagcgcaggtattcgccatagccatagcgctgcaggaacaccggattctgcatcttgccatagccgttttccaccatcaccttcatgcggatgcgccgcgcttcctcgctgtcgtagaagcggatgaaagtccaggccgcctcgcgcacctcccgcgggtcacgctgtcccagtccggcgttgttgctgattccggcaccggaaaagattcccatcatgcggcagttgatttcgctgcctccgcgtccggaaggcccggcggggcttggcgcgaagccgtagaggttgggatcgtatttgccgcccatgttctgctgcgaaaggtagtccatgcgcatcccgatcttgccttcctgccagaggttgccccagttgccgtcgcggatggcgaagccctgctggagcttgcccgcggagtccgtccaggggcgcgtggcgaggtcgaggtaatactccatcgcctccacacccgcctgcgaggcgaaggaagcccgccactgcctgttgtccgcgtcgtaggtcaccgcgtcgccgcctgccgcccacaaaaagggcagccagtcataagctgcctgcgggccgatggcgaggatggtaccataggttccggccttgggatcggttagctgtttcgcataggcggcaaactccgcccagtcgcgcgggggacggttgggatcgaggccgcatttcttgaacaggtctttgcggtacatcaggacgcgcaccagggtctcatagggcaaggcccagacccgctctttgctatccccctttttctgcctgcgaatcacctgccagacgggtttttccacccgcagggcgaggtcttccgcgctttcccgcgccataaactcatccagcggatagagcaggttgttttggatataggtgtcgctctggcggaaatttacatacatcacgtccggcgccactccccccgcgatcgccagcagcgggccggaatccaggtccatgccctcgatcttgatgccggaaaaggagcgcagttcgatccacggatatttctggcggaaggcgttgatcaccgccaggtcggctttgctgttggcatcggtatgccgggcgtcgggcagttcaaaaaccttgagcaccaccgttttgcgctgcgccgccgcggaaaagggcagcaggcaaagcagcagaaccagcggcgccagacggcggataccagcggaacgccgtccccgcgtggctttggaacactgtaaagctctgaacaaactcatcattttaccaaccgctgcatcctgcccgggcccgctctacaggtcaagtaaaatcaggttcgtgctttttcagcccctctttctccagaacaggcagcagggcgcggcggtattgctccagccggaaggcggccaggctgggccaggcgccgggattggccctgtaaaaggggtcacgtgccaggctcttgaaggcttggggcgaaggcgagatcagcgtgtatatatccagcttcatgtcctccaactccacgtgcagcaagcgtctgtcaccaggatcaaccgcgagggcgcgaataccgggatcgacacgcatttgtttgattaacaaatttttaacatagaaactggtgcagaatatccgttcaatctggggcatgaggggcagtatacccccgacgggcacggtggaaaacacctgcagggaactgtcggaggcagagtttccccgcctggcagcggtttgaatgatgtcaacgacaccgacgttatgtttgcgcaaccaactcttgatcaagtgcttgggtatttccttgtccgctgcgtccaaagaccagttttgcccaaaaacctcctgcagcaggctccagaacgcgttgttccggctgccgtaatagtagtccatgtctccttccggcaatctttgcctcagttgcccgccaaagctgacgtaccgcgggggcggaaaactgcccacgatcagccagcgcgttgtgtccgacaggagcgtctcatcatgcaacccgttgtagggatgcttccccaccgggaaaatcaatatgtttctgtcttctgtttcatgctgttgcttcatgctgttctccatatcatgctgcagggcagcttatctgatccgccccgcaagtcaagtgaaatattccgcttttgcttcacgccgccatcccttgctgctcctcgctttggtgccatcatccttaggtcatcccttaccgggttaaggatgactgccggaagacccccggcaagccagatattgcaaacgcggcccccatatatataggtgctacgattaggccgtggaaaggaaatagaacgcggataatataagggctgccgaaatccgttcggcagaggcaacggagttgcctgtttggaagagacctccggtctctgtggcaaacggactttgccaccccaaggcactggctcccgggtcagtcagctcattcatctcccgcaaaaaggttgtccgccacatcggaaggcaggatggagggggttccgcggcgggcggcaagtttttccgcggtgcgtcccagcaggaaggaagcgttgatggcggcttcggggatgctcaaaccctgcgccaaaaaggagatgatgatgccagccaggacgtcgccgctgccgccggtggcgagcccatcgttgccgctgctgtttaccatagtggtttcgccgtcgtgatagacgctgaagtgggatttgagcagcacgcgggccttatggcgggcgacaaattcacgcagaggggagaggcagtccgtttccaggctgtccttggggatgcccgccaggcgggagaactcgccccagtggggtgtgatgaggatgtttggcttggccagatacttgagcagggcggggttgtcggcaatcaggttgaggccgtcggcgtccaccaccagaggccgcttcacctggcgcagggcgatctccagcagacgcagggaatagctgtcgcgtcccaggccgggcccgatcagcaccgcggaggcttcgcccagcaagctggcaagctgtttggtatccggcatggcgcgggagttttccgggatggagaggctgagggcttcggtgagcctgatgaagtagaagggctgcagttcaggccgatggagcatccagacatatccggcaccggcgcgcagagcgccccgggcggccagcagcgaggctccggtgtagcccggcactccgccgaagatatagaccttgccgaagtcgttcttgtggctgtccggatggcgcatgggagggcagaaatcctcttcggtgaacagtttgacgctgggcaggccgtggtagtaaaagtggggaatgccgatggggacaaagctggtggggccgcagacttccctgccgtagcccaggacgtgtcccagcttgagagaggcgatgcagagggtggcatcggcgtaaatcgcgtcgccgcaccagccggtgtcggcatccagccccgaggggatgtccaccgcgatcacgcgggaggcactggtattgaccacttcaaaaagggtgaggtgaaagtcgtccggctcgccgtggaagcctgtgccaaagatggcgtcgatcaccaggtcgctgtcggagacgatctcttccagcaggggcaggtcttccaggctggaaatctgcagaatggggatgccgagggcgcggcaaagctccagattggccttggcgtccggggagaggtcgcctttcccgatccgcaggatcaccacttcgcagccgccctggtcgagccagcgggcaatcacggcgccgtcgccgccattgtttccgcggccgcagaggatgcaggtgcggccttgcagccattggggatattgcgcggcgatcaggtcggcgcagcctttgccggcggtttccatcaggacccgggaaggcaggccgaattcctcggcgcagcggcggtccaggtctttcatttgggaggaactgagcaggtattgcatggtttacctcttgctattggattggatgggcagtttgatctcaaaggtggtgccttcgttgggaacgctttggacaacgcgaatctgcccctggtgatattcttcgatgatgcgtttggccaggctgagtcccagtccccagccgcgggtcttggtggtgacgccgggatcgaagattcgtttccattgtgagcgggggatgcccttgccttcgtcgcgaatctgcaaatagatgtgccgttcggatttggaggcggtgatgatgatgctgccgccctttttggccatggcgtccacgcagtttttgatcaggttttccagagtccatttgaagagctcgggatccagcatgacctggacgccctcgatcttggaaatgaggtggatgtcgatgcgggagcccagatggggcatgcgcttttggaagtaatccaccgtctccaacaggatggtgttcaattcggtggggacgagattggtctgggagcccacctttccgaagcgggaggcgatcatgcgcaggtggttgaggtcggcggtcatgtattcgatgatgcggtccattccgggacggtcctgccctgtcccgggggattccttcaggtagtcgatccagcccatcagggaggtgatcggggtaccgaactggtgcgcggtttccttggccagcccgatccagagggtgtccttttcggtgcggtgcagcaggaagagcccgtaggaactgaaggcaatgagcagcaaagccaggatgatttccagcacgaagacgctttggatgcgggaaagcgacttgggcgcggtgaagtagatgtagccgaggctgtccgccgcgttgctgaggggaatctcggtcatcctggccagcctttcggacacctgctcacgctggaaaggcgggatatcataccaggggagggattcggggatgtccatgttgcgccagtagagggggtttttatcgcggtcggtgaccaccacggaatagtcgatattgctgaggaactggcgcagggaaatgggcttggcgaagaagacatagttggtgagcacgccgttggcgtcgatgggtatcctttccatgctgcccagatgcgaaaagaggatttggcgggaagccgggctgagttcggcaaagctgctgtctgaagaaactcccaccctgctccagtagaggggttccagatcggtatcggtgatgatgatgggcagtgggttgtggggcatgaattcgtaaaggatgtagtctccgatggaggagttgaagttaggcttctgcaccgatttgaagtagtttgagctcagctcgccgatcatcagggaatactgttccgcctggcgcaggtagtcatctgaataggcgatgtactgagcgaagatgcggggaatatattcctgctcctgcttggcgttgtggatcagaatctgggtgtaaaccgcaaagatgccaaagactacaatgctgccaaagatcaggtagaggcgcagggtgcggaagctattggtcttctttcgcgaggttccagagggcgtcgagttcttcgaggcttgcttcatggatattggctccgttttggcgatagtgctcctcgatatagcggaagcgttggtggaatttccgggtggtttccttgagcgcgccttcggcgtcgatattcagcttgcgggcaaggtttaccagggtgaaaagcatatcgcccagttcttccttgatcgcggcggcatcctgggaagccagggcggattgaaactcgtcctcttcctcccgcagcttgtccaacacgggtttgacggaggcccaatcgaagcccaccgcggcggccttttcctggctgcgttgagcttgaatgagggcgggc

SEQ ID NO: 546 - DNA, 31125 bp, Artificial Sequence
  Synthetic Oligonucleotide
caccccgatcgagttcgccaacacggttgcctacaggtactatcagatcctgttcccgacccttcgggccaacagcgatggcaacatgcagatcgcggaagtggagttcctcggcaccgtcgcgccgtagtgaacccttgccaaggttcgccacagtcgaatgtccatgatcaggggcctgcgtcccagtgacgccggcccctttgttgtgcgctcacatggcaacgcacagaagcacaaagacgccggcgaaaacgtgagcgaaccgctcgccccgccattgatgccgcgacaggatcgtggtaggattcgggggcggcccgatcgtggctgcggcaaacacggggctcaggcaacgggaggtgaacatgcgttcgagcgtaaggcagcgatggattccggtgtgttctctgatctgtctcggcgcggtagtcgcctcgggcgcaacggtgccgctgggcgagctggacctgacgaagatgtccaccgggtggggcaagccccaggtcaacaagagcatcaccgcccgaacgctgtcgatcggcgggcgctcgttcgaaacgggcgtggcgacacacgccgaatcgatctgctacatcgccctggacggcaaaaccgagcggttcagcgcctgggtgggcgtcgacgacgccaccgggcctcgcggctcggtccggttcaaggtctatggcgacggcaaggtgctgttcgacagcggcctgatgaccggcaacgacgaagccaagcgtgtcgacgtctcgctggctggcgtgacgcagatgatcctgctggtcagttccggcggcgacggcatcgattacgaccacgccaactgggcgggcgccgagttcatcgtggggggtgacaagccgacgaccgtcgacgcaccacggccccctgccgaggagaaggtgctgctgacgcccaagccgggcccggcgccgcagatcaatgggccgaaggtctacggctgccgaccgggacatccgttcctctaccgcatcccctgcacggggacgcggccgatcgcgtttggcgccgccgggctgcccgagacgctgcggctcgacgcgagcacgggaatcatcacggggaccgtgcccacgccgcgaggcgagtacgtcgtgacactcgaagcgaaaaacgaccacggcagcgaccgccgcaccttcgcgatcatcgtcggcgacacgctcgcgctgacgccgccgatgggctggaacagttggtacatccactattatcacgtcaccgaagagcacatgcgaaacgccgccgacgtcatgatcagctccggcatggccgactacgggtacagctacgtcaacatcgacgactgctggatgaagaggcgcggcgatgagccctaccgcgacgcgaaaggcgcgatcctgcccaacgccaagttccccgacatcaagggcatggtcgatcacatccacagcaaaggtctcaaggcaggcctctacacagggccgggaccctggacgtgcgccgggtacgtcgccagctacgaacacgaacgggtggacgcggagaagttcgccgagcggggtttcgatttcctcaagcacgactggtgctcgtacagtgaggtcgccggcggcacagacctggagcacctgaagcgcccatatcagttgatgggcgacatcctcaagagtctcgaccgggacatcatcctgaacctgtgccagtacggcatgggcaacgtctggacctggggtggcgaggtcggcgggcactgctggcgcaccacgggcgacctgggcctcgaacaaggcggcctgctgcccggcttctaccggatcggcctgagcaacgcccggcactttgagtacgcccggcccggacagtggaacgaccccgactacatcctgatcgggcacatcggcaacgcctatcagcatgatgagccgcccaaacccaccccactgacgccaagcgagcagtacagctacatgtcgatgtggtgcctgatggccgccccgctgttctactcgggcgacatgcgctatctcgacgaattcaccctcaacgtactatgcaatgccgaggtgatcgacgtcgatcaggacccgctgggcatccaggccaggccgctggtgcaggacgacgagactctgattatggccaaggcgatggccgacggctcgctggcggtgggcctgttcaacctggccgaattgcctcgcgagatgtcggtcgactggccgctactgggcctgtcgggcaagcgcctcgtgcgggacctttggcggcagaaggacctgggcacgtacgacagccgcttcgccgccaacgtatcgcgtcacggcgtggccctcgtccgcctgatccccgccccatagacggatgatgggcggccggcggataccgatatctcttgcagacggcaacctctgtcgatagaatggtaaatgccgcgatgcaacgcgatcaggcaccctgactggcatgccctgccgggtgcgcccggagacgggtgggccgagacgataggtctgggtaagcgcttcccgagaacgtggaggaccatgtcatgcggaagtcgaaggcattcacactgatcgagctgctggtcgtcatcgccgtcatcgccgtgctcatggggatcctgataccggcgctaggcaaggcccgtgagctggcccagggcgccgcctgcaagggcaacctgaagaactataccatcgcgatggcgatgtacctcgacgacaacgaccgcaggttcgcggaaccacagagatgctacttcagccaactaacaccctaccccgtcgaggcaggcatttccgagtacctgcatctgcgctggtgcaacggcgacatcgagttgaagagtcacccggagtacggagggatgatggcccggtacctcggcgatgccagggcattcatctgcccaaccttcaagaacctcgcagtgcgccacagcgacgaccagttcttcctcgcctatggcaagaacgtcaagaactacgaaccctggtacaactacacgatgaacgcctatctgggcagcgcccgcagtgacgttcaggagacccgcgttctcaaggacacggacgtcaagcatcctgcgacgacgttttcgttcgcagaggagagcgcgatcgtcgatacggcctacaacatgtccgggctcaatgacacgttcatggcccccggcagcgatacgatggtcaagagttggttcagccagaccggaggcgacctgcgtcgcatcatcccgggtcccgagggggtcgggcaattctgggatgtgatcgcgggtttccaccacgccccttcgggcgacaagctgggcggacgcggcaactgcgcgttcctcgacgggcacgtcgaggccttctcccgtgccgagacgttttactacgcctatccgaagaagtgacggcgttgcgttaaatccgaaatccgaaacacgaaatccgaaatagatccgaaggcaccaaactgcgaattcgaaacggggttcggcacagcgtcagcatttcgttcattttagcttgcggatttcgggcttgtttcggatttcgtgtttcgagtctctgttcagtcattgtagccgggcgagccgccgacctcggcgctggcacgccaggcgcccttcttgtcgagggtggccgaatcggcggtcagggggtcaatcaccgtcagcgagtagccagccccatcggtgaggtcgtaccatccgtccttgtaccggaaggcgaggatcatctggccggcggcatcctgcaactcgatgctttcccccgcattgttcaggctgccggcgtactggccgacgacgggcgactggtccccataccgcgcctcgaacgccccgatgtctttgacaacgagggcatatgcacccgggtcgagagtgacgtcgccgaaggtgaagtcgatcccattcgtgaagcgcaccagatggagattaaccggctgagagccgatgttgagcaactcgacgtattcggtgttcggatcgacaggatgatacatgatctcgctgatccgcaggctctcggccaccggaccgacggcgtagaccgcctcgttcagcgcgctccaggtgctgccgctctgggcacgggcgcggaccatcgcgctggcatcgagccggatcgggccggcgtagcggaccgccgtcggcgcgacaccggctggaacgtccgcgcccccctgcgacgcgaccagctcaaccgagatcaggaagtcggaactgttggcacctgcgttgagcccctggatcgccaggaggttgcgtcccaggcgaagccggctgatatggccggagaggtcgaaccgctcgaactcgaccgcgtcgaggtcggagtggttgtcggtggcgccggagttccaggcgggcgtcccctcgaacatgacgcgctggacttcgacgccgttgaggtaagcgatgaaaccgtcgtcgtaccgcgccttgagcgtcaggccgccggcgtattgcaacccctcgggtgtgacgtcgaacggaatgcggatgtagcagctctcgttgcggttgtacatctgggcctggacgtcgatgtcgaagaacgcctcgtagccggtgctgcgttcgtagccgacgccgccggagccggcgatccaggcggaatcgtcgaaatccacctcgctgcgccaggcgctgccgatatccgtggtggggacgaacgcgcgcttggccgccgcttccggcacgaggaccagctcagcgcccgtgctgccgctgacgccggggcgccgcggatcgctgccgtcgagcgtgtaccagaccgttgcggcgttggaagtcattgtgagccgtgagccctcggcgatgtggccgccgtgctgatagacaccgtcgatatggaagaccggcgcctccacgctcgggtagagccccagggctttgaactgcgacagtgccacctcgttgcggcgagggaaatagttgtcgagcagattctgacgttccacgatccagaaatcgttgcgggtgtacaggtaataggggcccgaactgtaggaatgcacatcccggcgatagtcgccccagcgggccgactcggcgatgacagcggcgtcgatctcgtcggcccgtcgggtccatcgcgcgatgttgcgctcggtcgtcagggcgccgccgttgaacagatgcttgtgcacgcgatcaccgaagcgaacgcggaattcctcgatttgcgaaagggggcgatacaggccggtcgggtccaacgtatcccttatcacggtctcggtcgccttctcaagaactcgttcgccgtcccagctatagaagcgccagggcttgttgtcggcgccgcctccggcggcgcgccagtttccgtcggtcttgagatcctggttgccggcgaacaggttcaggagcgtgaagtcgatgaagttgtcgatgtcgatgacctggcagatccgggcccaatcgccgccggcggcgatgctcctggcctgttgccaggtctggggggtgacgtcgtgggcgtcgcgtcctccgttaatcgaatcgagtcgatccgggtcgcctccgttgtaggcggcgtagtgcgaggcgaccggccgctcctggaccagatacaggccccagtaaatcccgttgaggtacaagtgcacgtagaacccgcgtccggcgtcggcctgccccatctcgagcaacgagtcgcgcatccactggtcgcgaatgtactgcgcccgctggcgctggccgggatcccagtgcgtccaggcgttgttaaagaagccgcgcagttgaagcgaatcgaacgtttccacggggctgccgtcgaacaacgggaaccggagcttcgacgagccgtagacgtcgcgaaagcggaggctgaaactgtgcttgggacacttgggcgggttgcggctttcgccgccctggatgcgcaggccgcagtcgatctgaaattccttggcgccgtcgatgctgaacagctcggcggacacgggccgttcccaatcctggccgcccgtgctgctgtgcccggtgtagatgtagatgccgccggtctgcgcatcattggtcttgctgaacaaatggtccctgtcggtcaccagagacaacgtcggaatcgccagcagcgcatcgtccatgacgtcggcatatgcggggctgttgtagatctcggggtccatctcgtagtcggccgggtaggagccgaaccacgtgctcggatagccacgtgccagcacctcggactgcgagcgcctcgccgcatcggccaggaagatgtacgtgtgcgtgtccgcgttgctgggtacgcactgcggcttgaccgcctgggcccgcaggcacgtggtcctggtgatccggatcgggccgttgtagacactgccggcaggaacctgccgagcctgcgaatacggcgcgctgccgtcgagggtgtagtagatggtcgcgccgggcgtctcgcacgtgatcgtcacgtcaaacggcatatcgtagaaaccgcggtcatggctgaacttcgtatcggcgacgagaccgtcgtacaggccgctgttgcgcgagccgggcgtgggcgtcagcaggaagccgtacggcccggtgccgtcgggcgagcggccataggagatgtcggtcctctgttcttcgaatgcaacgctgtcgatgagcgtggtcccatcgggggcaaacagtgccagggtgtccccgtcggaatcgagcgcaaacgacgcatgcagcccgctgtcgcttgtggggccgtcgagccagacgatgagatatccccccgccggaacggtggccggctgcgaggcaccgcctgggaactgccattttgtcggttcgcccggatcgtccgtcaggtacatgcgggccaggtcgatcggcgcatcgctgtaattatggatctcgacccagtcgtcgtactggccttgggggtcggccttgacactgctgttggccgccatcagctcattgatcgccagcggcagacccgccccccggcctgccggggtcgccgagacaggaccgacactcagaagaaacgaagccagcacaagacgagcggcccgacgggattcacgcgtcacactcattcctcactcccgacaatccaagcggtgacaggcgtgcaagtacgctggtgttccagaatccgggaccgtcgtcgatccccaatgacctcgcgactccgcccgccgtgaaggcatattcgcacatgcgcatcagactgtattctaccattcgcggcctgaaaatcaacgttatttgccccgccgggccgccaagtctacaccgccgacctcgtcgagatcgagccgacgccttgccggatacgatccgaccggttacgattcgctatgcaatcgtggccttgacgccaaggccgccgacagagttcgggagaatgtcgccatggcagcatttcgcgatccagccaatccgatcctcaccccacaggacgtaacgccgtcgcgtggcgatttcgaggtcctcggcgtcttcaatcccgcggtggcccgccttggcgaggaaatcgtcctgctggtgcgcgtagccgagcgtccgatccagactgacccggaggtggtgcagaccgcgtttctcgacccggcctgcggccggatcgtcaccaaggcgttcactcgacccgacccggccaacgatttctccgatcctcggttgatcgtgcgccggggcaggacatacctgacctcaatatcgcatctgcgcgtggcgagaagcaaagacggtatccgcttcaccatcgatgagcatcccacccttggtccggccgacccctgggagagcttcggtgtcgaggacccgcgcatcacgcggatcggccagacgtattacatcagctacgtcgcggtctcgccgctgggggtgaccacggcgctggcgtcgacgtgtgatttcgcgaccttcgaacgtcacggcgttatcttcggcccggaaaacaaggacgtcgtcctcttccccgagacggtcgacggacgatactacgcattgcatcggccgcactcgccgctttgtcacaccaacaacatgtggatcgccgaatcgcccgatttgctctgctggggccgccatcgccacttgatggggctgcgcgacggattctgggacgaggcccgcatcggggccggcgcaccgcccgtccgcctcgacgaggggtggctggagatttaccacggcgccgaccgcaaccatcgttactgcctcggcgccgtcctgctcgacgcccgccagccctggatggtgcgggcccgctcagcgcggccgattctcgagccgcagaccgaatacgagtgctccggcttcttcggccccgtggtcttcacctgcggcctgctcgtcgaacagacgactttgaaggtctactatggcgcctccgacacaacggtctgctgcgccgcattgtcactcgaagacgtgctcgcgtcgatgcagtcgtaagtcgctgggtttctctcaattctccgcaacaccgtgcgcgccgtggtcggcaacctctgtgagtccggatcggccagccggtcggcccgctggtccacccgacgctgacccgatcctgtgcggcgcctcatcatccgatgggacacggaatctcgaaaagaaaccaatgtcaccgacagtcttcccatgtcccccaatcttcccacatcaaaataagcattttcctccgtggaattgcttgcagggcgtcccatattgcgcgtatatttaacccggatggggcggtgatgaatacacgtgtggttctgctcacgcggaatagctacacgcagacgctatgtggacatagagagtgtctggatgagtaaaatccgtgcgggcgaggtttgtccggacggagtaaaggggagatgtacggatgggtgggagaaacccggagaaaggaggtgcctgggggttccacggatacaaggtaagctgacggtttccacagagtcacacacggagtgtaaggagacacaagatgagacggttacctgcaatactgccggcgctggcgctgctcgccgtcgtcggcaccgccagtggtgcgctgacgctttccagcgccagcggcacctggagcgatcctgtacttcagtccttggcccctgcccctgcctactggtcttctttgatgggcgaacagctcatatcctggggcactccggcctatctgtttggtctcaagagcagcttgggcttcacacccgtcgcgacgcccaccgacgtggtgctcgatacgccctttgtcgtgggcgcgctgcgccattacaatacgcccatagtcgtcggcaccggcatcacggcggtcgatctggacctggcgatggactttgaggggacgccggtcaacacgtccctgacgctgggcgttacggaaacggtcggcccgggtggccatcctgcggatgtcatcacgctgccgacgtcgttcgatcccatcgcgtttgaggtcgggggcgcggactacgagttgtgcgtgctgggtttcggcagttgccccagcagcatcatctcgtcgcttagcacggaagaatgccgtaccacctgtcctccgctcccgctctgggcgaagatctgcagcacgacgccaccaattccggcgccgggagccctgctcttggccggcatcggtgtcagtgcggtgagctggctgcgccgacgccgaacgctctaaagctcggcacatgaggggcgatgcgatattgtccgcccggcatcgggccgggtagggccgcgagcaacccgcagcagtacgcctggacttgacgccacggtcctcgcttactgctgcggggccggctcgatggtgatctcattgccgccagcctcggcacgcacctgtggttcgtagtaggagtatgcctggctgtcgggaattgtcgcgcgcaccgggaagcgggccttgacttggaagtgcagggtccgttgttcgccgcgttccaggccgtcgagatagaagatcaccttgcgtccggccacctcgtaccgcgtgacgagattgtcggcaagcagcgcatcgagcgactcggcgacagcggcgaagcctgtaggcacaccgacatccacgatcatcattcctgtcgagtcctttggcccgaggtaccgcaccgtcgcggtgacgttgacgatatcatcgacctccacgtggtcggcgtcgtacatcacctccagggtcatgtccttctggaccggatcgtcacgcagcagaacgttgaaccgtcgaaccagttggaatcgcacctgccccgagccgacagcgctgatttcgacggccgattcgagcggcagctccgccgtctgaaggacgtcgaagttggtgctgttcacggtgaactgcgccagcgtttccccgccccgcgccttggcggtcaccgtaaggtccacgttgcggctctgactgcgggccgccatcatcagggccttcagccccatgaccgtatcctgcgtactgccgtagccgcccaggctgttacgctggagcgaaagccacttgaccgcttcgttcgcctgcggccattccttctcgatcatcgccagcgccgcgtaggcggttgtctccaccgggtgaggttgccagtgcagaccgtcggcatcggtgacggcgatcgccagcagccgttcgagcgccgcgtcggcggccggatcacctacccgcgcgaaggccagcgccgcaattgctagggcatacgcatcgtcccggaccgacgcgaggttgtcacgcagatattgcgtcgccgctccctgcacgtgcggatcggccataccgtaatccgccatcgcaatcgacacgaacgcggtcagcgcgtacgtcccctgcaccccgccgaccatttcactgtggcatacgaaccccaccggcggccacgatccgtcggatgcctggtgcgaggcgatccacgcggccgcctcggccagaatcgtctcgtcgatcgtcgtcacctcacgcgcggcgctgaacgtgccgagcacgaatgccgtcagccagaggctgccctcggcatcgctctggccgaaggcggagaacgaaccgtcctgatggcggaatgtcagttctcgctggtagcccaccgtgatgaagtgctcggccttggcccgcacctcgggcgtgagctggccggtcgcgttgagatagcgcagaatctccacgtccggggcgaagaagatcatgttctgctcgccgcagccgtagggcattccgagcaggtcatccacaccgttgatgctctgggcaaccaggctgggcgtgatgctcaggagaatcttctgcgaatcgggcacggcgaattccggcgtattcgcgtcgaggaccaccgtctcgcccgctcggatcgcgccgttggtgaccagctcacgccgggtgccttccggctccacgagcacttccttgcgcacggcatcggcccgccggaccgaacgcagacggacctccagcggatgatgtccgagcttcgtcggctcaatgacaaacgaaacagacgacacggaatttgcatttacctgcacctgctgttcgctgatgtcgagcaggttgaaccagtcggcgtccgccatctccacatagaccacctgaggttcgtcgaggtagttgaacacctggacccggaccgggaattgctcgccccgcgtcaccgcatacggcagatcgggctcgccaaagaactcctggaacacgcggactgacgactccgtcacgccaagcccgttgtcgctcgtggacaccgcatgaagccgccacgtcgtgatgctgtccggcgccgtcaggtccagcatcgcggtcccattgggctcggtgagcagatccggcatccacacccacgtctcagggaagaactggcggacccgatcgacctccgccaacccatctcctttgccggcgttctcggcaacatcgtcggcgccaccccttcggacgaccggaccaatccaccacagcccgttgattcgccggccctcgggaacatccagcccgcgcgaagtcaccacggcaagcccggcgtcctcaaatatgttgcgggcgccatagctgtacggctggtcgtgcgtttccgcctgcggctccatgaaccgctgttccagctcgccgaacacctcctgcatgttgagccggccttcgttcagcgcatagaccgactcgtcgacgatggccaggccgaccatcgactgaccctccgaacgaaccgagacgcgaaccggctcacccggcccgacctcttcggcactgactcccagggccaggctggctgcgtggtccatcgtcacctcgaactcgatcgtggcggcggaaatctcgttgttcgggttgatcacgtacgccaccacccgggcggccggcaccatctgctgcgtcgcctggaaccggatcgccgagccggtcaccgcgtccgaccagacggtatggccgttcgcaaagacatcgtagtagatggttgcatcgtgcgtgcgaaacacatcgatcgtgactgtgtcacccatgccgacggcgccggtggattcgcgactcagatgaaggaagctgtcgctgggcgagtatgtcgcatagacgtacaactccgcctgcccgctttcgccatcgcctcgaacctcgctcttcagtgtggcccaggaagccttctgcggcgccctcagggtgatcgaggtcgagccttcgaacgccagcgaatgggcctccttggagatcatctcacccgattcggcgtagtactcgccgatcaactgtcctgtcacggagacgggcacaccgtcgggcgtctcggccaccaccaaaacgtcatacgattgcgcgggcgtgaacgaccgagacgaggcgatcagccggtgctcgattcccgacgagacgatcttcagcagcttggtcgtcttctcctggtgatccgacgtgtcggtgacggtcacgtcgagctgcacgctgcccgcaccgccggctcccgtggtcccgctgacgtacttgacctcgggcagcgagaactccgcccgcccttccgtcagcggcgccgtgtagcgagcgtattcctcccagacaccgacgtagcgactggcgctgatctgaacctcgccgtcgacgggcttgccgaagaaatacgtcgccgtgacggtcccggggattctctcgtcggtgcggaagtaatcccgtggcgtgtcgagcttgacctcgaatcgcggcagcacgtactcctcgactcgcaggtcgatggttccccggccggcccccgattcggcggtgatcttccacgtgccgtagttcagctcgctggccagatcgaggttgaacggcgcgacaccgaaggcgttcgtcgtgaggtccttgcggaagattttgacgcccttgccgtcggtgatctgcacggtcacgtcggaggcgctcggacgaagctcgttcgtcagcaccagcacgcggccctggatcgtctggcccggcttgtagattggcttgtccgtttcgatcaacaccacgggcatccgccggatcatgatctgagttgtcagagtctcctcggcgccatcgacgtgtgcctccaggatataggagccatccgccaagttgggcgtgtcgaatcgggcgacgaaccgccctgcctcatcggtctgcccggcggcgaggtctacgttcccttcatgggccttgaggcgcagactcacgccgatccctgccgacgactggcgtgcgctgaccaccgtgatcgtcgccgaggtcgaggcgccactgtacaacgtcttggggacgaccatcatcacatcgacggtccccgcccgggcgactgccgccaccagccccaggaccagaaaccctgcaaacctgattctccgtgccattgtgccgctccttagattgggatgaatgaatggataataaccgtaaatccagcacctgccttctcttcgaccagacagggggcgtacctttggctgatagtgcgggcgaatcatcgttcgccgccatagtttgtggaaccgccgcccgtgccccgaaaatccctcaagccacgctgagctatctccgcaaggtctccgaaggtgccggtgcgatgatatgcgacaataatatgatagcgacaagcacggatatgatggtcaattccggccggccttcgaaccttgattcactgcggccattttatcggaacgtgcgtctgggttcaagctttttcgcccaggcccgcaaagagccggcggacgtactcggtgcttctggtgaacgcttccaggggcggcatggtgttgggcgagccgttttcgatcgcctgttccaggacgatgtgcgggcgaacgccctcctggcgcagggcatcggccagggcgcggtaatcgatatcgccctcgccaaatgtctcggtccagacgccgccctgggactgccgcaggtgcagctcgcggatgcgcttgccgtagagcttgacgatgtcgaacagggcgacctgcgagttgcccgcgccgcgatagacccagtgggcgtcgaggcagagtgtcacatcggccggatcggtgccgagcatcatgtggtggaactcgcgtgcggcctgccgcagttccatgttgtgattgtggtaggccagcgtcaggccgagcttccgcagttcggccccgagccggttcagtgcggccgcctggaccttgagctgttcgtcgttcttgtcctgcgcgccgccccaggcgagcggattggggttggtcacgacgatccgcgctccagcgtcccgggccctcggagcaatcgtgaggatctgccggatgctctcatcggcccggccggcctcatgcagcaggctgttgacgtaaaaagaccgcatcccgaggcggtgcttcttcagcagaggcgccagacgctcgacctgtgcgacgtcgccgaacgacggctcaaacccgtcaagaccgctggcagccacctcggccagaccttcatcgagcgactggtcgaaattgcgcccttgacgctgatagaacacggtccaggagtacgagttgcaggcgacgtgcatccgctcaccctcggagcccgccgccggacgaacttgagccggcgaaagtgcgatcgcccctgtcgccagaaccgcatccgcaagaaacgtccgccgcgttgtcaatcgatctgccatagtgcaaacctccgtcgccccaatcggggcttgccgcctgcgtgccatcccctccgaaccccgcacgctgagtatgcggccttcgccgggcaaatgcaagggcgcttcctcgcacggacgcggcatggtaggctgtgcctcgtgaatggtcaggtcataaggagaacatcgcatgcgatgcaggatggtttttacccacgtgttcgcgggctgtctggcggcgtccggcagcctccttgccgcaccgcggctggtcgccatcgggccttgtccggcccatgtcggcaagtatgacaagctcgaactgacactgacgccggagcggacgtacgacaatcccttcgacccatgtgaggttgcgatcgatctgctgatcgattgcccgagcgggcgggcgctcgttctgccggcctttttcggccaggattaccaacggcgagatttccccagcgatggcaaaaccgtggcctggtgctacccgatcggtcaagggacgtggaaagcacggttcgcacccacggagacggggacatacacgatccgggctcgcctgaacgaccgtgagggccaatcgctgtcgcagaccatccggatcgagtgcgtcccttccacaaataagggatttttgcgcgtcggccgcgaggacccgaggtttctcgaattcgccgaaggccagcccttcttcgccatcggccagaacctcgccttcatcggcgagagccagtatgtcaacgtcccgaaggccgaggcgatcttcgcggagatggcgcgaaacggcgcgaacttcgcgcgcatttggacgtgttgccatgactgggccctcgccgtcgaggctcccaagagcgcgtggacccgttcatggaaccggcaatcgcccgtggttcccctgcctgaagccgagggcaagtgcgtacaactgcagggccaggacggcgcttcgatcgaggtttcgccctcgcaccgggtggcgctgcggccggacacgcggtacacactccgcggaaggttcaaggccgacggagcggacggtttgcgaatccaggtcggcagacacgattggcgggtgccggcacacaccgccacctggcaggacttcgcagaagaattcaccaccggccccgatgagtactggctgggccacaccacagttgcactttcgggcgaaggcactgcgtggctgaccggtctgtcgctgaaggaaagcgacgacagcgcggagctgctatgggaagcggatgtcaatcgtcccgtgcggggttactacaatccgctcgactgcttcatggtcgatcagatcgtccaggccgccgagaaacacggcatctatctgatgctttgcctgctgacgcgggatctttacatgaatgagcttggcaatccgaacaatgtgccttacgaccgagccatcgcggatgccagaaagttcatgcgctatgccgtcgcccggtggggctactcgaccagcgtcggcgcgtgggagtacttcaacgagatcgacccgggcaagccaacggaccacttctatgaggaggtgggcggctacctcgacgaaatcgacatctaccgccacctgcggaccaccagcacatggcatccgtcggcgcgcgactgtggcctcgcagccctcgacgtcgcccaactgcaccactacttgcgccctggcgaagcagacttcaaagacgaagtccaggccatcctcgaaaaggcggcctttctgcgagagcacgcgccgaacaaaccggcgctgatcggcgagttcggcctggccaccgacaagtggggcctgagcgagcacatgagacaagacaccgatggcgtgcacttccataatgctctctgggcgtcgaccttcgccggaccgtcgggcacggccatgttctggtggtgggagcaattggaccagcaggacgcctaccgtcactatcggccgctggcggcatacctgcgggacatctccttcgagggattgagagcgacaggcgcaactgtgtccgacgcgcgtctacgcgtgctgggctatcagggaacggatcgcacctatctgtggctgtccagccgggacgccacgtggtggaaggtcgtcgcggggcagacacctcaagagatcgaaggtgcgaccctcgaaatcccagacttttcgccgggcgagtacgccgttcagtggtgggatacaagtcagggcacttgcatcaagacgcaccgcgttcgacacgaccaggaccgattgagtgtcgccgtgccggtggtgcgaagtgacatcgcctgtcagatcgtgcgactctgattcgaacggttcagcgtcagacggcaccggccaaatcgttctccaactgggtcaggatcgtctgaaggcagcggtcgagaccggcgaccagcccttccggcccggcggtcgccacgtcggccgtcgcggcgtaggacttggccaggatgatctccgggtctacgccgctttcggtccgcagcaggaagaaacgaatctccatgaccgccttcggcgcgcgcctgtcgcgaaagtcaccgtagagagcggcaatattggcttcgattcgatgcgtgggctcggcgccgctgcccgagccgagaacctgcgcgaacagacccgactgggtcaaccagtcgcgtgtcctctccgtgatcatcacggtcggtgaaacaagaaactcgttgtaagcgtcggattcgtatcgatgttcgtcgagccggtagaccagccccctgccggcgtacgccgcatcgatggtgaaccgtggaaccgccagaacagccttgccttcgcgaacggccggggacaacgagcgagacgtctgaagcaagtagaagcggctgttggccgactgcggcctcgcgcaacccgtcaggacaagcgcgaacatggtcagggccagaaacagggccggccgggtccccttacatatcatttgtatgcctccgattcacgtgggggtttgctgaagatcagctccgaaggacgctccctgagactgtcggtcaggtcgcgcagattgtcggaaatctcccggaaattgccgatgatgatttcaatctctggtttctcggtcgtcaccagccggtcgatgctcgacagcacccggttcagccgcgcgacaacctccggaaggttggacccgcccgcggtccccgtcggcgacgccagcagacgccgaaggccgtcgttcgtgatgcggatttcctgaacaaaccgcgtcagttcggcgctcagttccggcacgttggcatccgcgacggtccgctccagcgaggccagcaaacgctgcgtcgcgtcgttgatgcccgctacgtcgagggcctggaccttctcccgtgtttccgccagcaggctcgtggcttcctcgctgatccgggccagattcgcatcccccaccgccctctcggcggccaccagggtccgctcgaaagaatccaccagcccttcgaaatcaatctcctccagccgggtgaaaatcttttcgagcgagtctttcaacgtcgtgatctcactgggcgccgacggcatgtaggtgtacaccggcgtccacggcacctcgaggatcgggaagcgattcggatcgagatagtcggcctccaggtagccctggcccgtcaggatattcgaattgacgcgaacgcgcaggccgcgagcaatcatcttttgaagcatggcaccggccttttcgacgccgagttcgggcatcgtctctcgcggcaccgcgtagacgacgcggacgataggctggaagacggacaatcgtccgctgtccggcgggatcgcatacacactgccggcgaatgtgatggtctcgacctgaccgatgcgcacaccacgaaactctaccggtgacccgaccgtcagccctgtgatggactcgtcgaaataggtctcgaatctcagcttgtccttcgcaaacacgccggaaccgaacaggatcacggccgtcagcagcaaggccgttgcgagaatcacaaagacgccgatcttgaagtagcttggtttccttcccatcaggccgatccgtcccaatctctctgttgaccggttccaaacatgcctacctcctgattcctgcagccgacgactctcgatggaagaactgccgcacccacggatcgtcgctgcggtcacgaagctcttcgggcgagcccctggcaacgatcgcctgccgttccttgtcgagcatgattacatggtcggcgaccgcgaagatgctcgccagctcatgcgtcacgataacgaacgtgatcttcagggtctgcgacagttcgacaatcaggtcgtcgagctgcgccgcagtgatcgggtccagtccggccgaaggttcgtccagaaacagaatcttcgggtccagggccagcgcccgcgcaatggccgccctcttgcgcatgccgccgctgagttcggagggcagtcgatcgccggcgtcctgaagcccgaccaccttcatcttcatccgggcgatcgtctgcatggcctgtcgcggcaggctcgtgaactcttccaggaccaggcagatgttctcgatcaggctcatggagccgaacagcgcgccgttctggtacgccacaccgatccggcccagcagcgcacgccgctcctcgccttcggcggtgacgatatcggtcccgtcgatgaggatgcgccccgtcagcggccgatgcagtccgatcatgtgcttgagcagcgtgctcttgccgcagccggaaccgcccaggatacagaagacctcgccggcgcccacctcgaaggtcacgtccttcaggacgatgtgatgatcgtagcccacggtcacgtcgctgacctgaatgatcggcggtgcgtcggaccccatcgtcatacccccaagtagtagtacagcacggcgaacacgccgtcagcaaccacgatggcgacgatgccgctgacgacggcgcgggtcgccgaatcgccgacggcgctggggctgttgcccgtctgcaaaccgcgcagacacccaatgccggcgatcagagcgccgaatacaaaggtcttgaccagcccgccgaacaggtcgcccaggctggcggcctcctgaatctggtcgatgtaagccgccacagggaaaccgaacgatcgcatgaccagcccgcagccgatcagaccgaacagctcgttgaacagtgtcagcagcggcatcacgcagatcgcggcaaccagccggggcaaggccaggaactgaacggggtccacgcccatcgtcaccagcgcatcgacctcctcgttgaccttcatcgtgcccaattcggccgcaaaggctgatccgctgcggctggtcaggatgaacgcagtgattaaaggtcccagctcgcgaaacagcaccagcacaacgaggtcggccacgtagatctcggcgccgaacttgcgcataccgatggccgactgaaaggccaggatcagcccgatcagaaaacccatcaatgcgacgattccgaccgcattggctcccgccttctcggcgatcaggaatgtatcggcccagcgcagacgacgcgggcgaaccagaacactcagcaggcggacgaaaatctcccccaggaaagcgacctgcgtgtgaaagcccacaagggatccatgcgagatctcaccgacacgatggatcgcgcggaccagccacggcggcgctggcttaggcggcgcgggcgggcccggatcgaaccgcctcatcagttcggtcagatcgtcccgcaggccctgaatccgaaaacctcgctgccgctgctcctgtccagccttcaattcgagcagaagggccatgcccgccgtatccaagctttccacacctccggcatcgacttcgatggcggaagggtcacactgcgccaccttctgcataacctggggccagaaccgctgtgcgtcggcggcgttcaacgtcccctttaggacaagacgcaatccgcgttcttcaaattgctcgtagtccagacttgccgcacccgaatctaccacagctttccttgcccagaacccttcttcccatccatgttccaacgcgcccaggcggcgccgcactctcacggcccgcgcggcgagcccacttacatacatagctcccacggagcagccgcgaggacctctaactataccgtcgccccagggccgaggcaagttccataaacggctctggtctgagtacttggacgtgggacccatcggcaagctgccgctggcccctgcgacgagatcgaatgcggcaagcggcagaacaagaggggaaatcggggagacaggatttgaacccgattcgtggggtaacagaatcaccacaggaccgctccaattcctgcacagaatgcgaccgaaagccatttgaaggggatttcgagggacagactcttgcacttcccgaacagcgaaatgatactcccgaacacagaataggtgcgcatttggtgcgcgagattgcgtcgggtgaccccgacttggctcagatcgtggcggcctggccggacctgccggaggatgtgaagcggaagatcctgcacctggtcaggagccacaggccgacccctgaggcgcctgcatagaacgtaaccctgtgccggccgggcctctcgtgcgagcagccggcggcgcggaaccccttttgacggaggctgagcgatggaaagtgaacgagacacgatgaccccgcagaggcagccgaaagacctgatcgcgacgtggctggagcagcggccgctggagacgatgctggccgtgagcctgtcctgggccctgtcggacggcgaccacggcgacccggacttgctcaatgctgtgctcgacaagtaccacgaggccctgatggaggcggccaagcagggcgctgcggagctggacgaggaaagcaggatgatgctcggggcatggatggcggcggaggcactgacgggcgagtaagaaggtatcccggggatgtgccgttccctggctctcggagccaagaagtctcgcgcccgggcgcgcgaggaggcaacgggaaaagacaacacgttttgtcgtgtttcggtcccggcccggcaacgggcttcacgattgcggcccggaccccaccggggggagcccccccggcacccccggccccacagtactatctctcgctcttgcggtgcggatctggtaatgcgcggacggtttgtgaatcgctgtggttgacgaacggcccgagatcgggcctcagagaggagccaacatgccaagagacgaatggaagaatctggacggtcaacgaatgaggttccgtgccatcttcgagcggtatggccagaagagtgcctatcgaggagcgcccctcaagacgcttttgtttcgtgaggtgtgccctgtggatgggggcgtccgtgtgaccgatcatctctggttcacggagacgaaggggttccgggccctgggcgtgctgcaccagggggactgcgtggagttcgatgctcgtgtgacgacctaccggaagggctactacgggcgccgggaagatgtgtacaagccgagcggccaagactggcgtttgagcttccctacgagaatcaggcgaaaccctgcgctggacaggcctgtacccgagcccccgtccaagccccacgaggacgctgccgcgagcagaagccaacccgaccaaagaccgggggccttcccacgcgcggagcttctgattccgccggcgtggcgcgaggccgccagccgatgcgtcggaatcggggcactgcgggtgtttggctggctctgtgaatggacggacggcggaagacaaccgtgtgaagcgccgatcatgaggctggctcggctctgcgcaccaccggagcaagggatgctacgcacaaaggccatcaaacgccatcttcgaaagctgagcgaagcaggcatgattagccgggtccggcgccagggagggaaacgcccccagtggtacgtccggccgcccgagatgtggaatcaggccggcgatgccgccgacgagagccagtgacatcagcaaagacgacggacatggggcatcggccccttttgacggaacggccgaaggagatccaacagcatgacggacagagatgtgccaagacgttttcagaggctctaccggctggccatgaccggacgcagccaaagtgctgccatccggtcgttgtgtctggagtgcatggcttacgtggcgaacgcggttcgggactgcaccgacacgggctgccccttgttcgcctacagactgacggggcgcaagacgcccacggccgtcgagacgactcacagcgtcgccccaactcgaatacgtgtgcgattcgcgacggaattagccacgatctggcccggacccgacccaagggccgtctctgtgaattggaacgcccagaaggcccgtggcgagctctgtgggcctctgtggagcgggtcccatgcggtacggtatgtttcgcacggggcgggttggttctgcgaagggcaaggcaaggtaggattcacaggcggcggtcgggccaggacgccggcgaaaggatggtggcttcatgcgtgaggtcagtttcgacaaggacagagcggaggcattgatggcggccaaagggcgccgccagccgctcgtgggggaagggcgggatctattcctgctggcgggcgggctgaaaggggtggcgtccccgccgcagggagagcacatcgaccacctggaactcgaagtcgaacaaggctgccaggacctgctcgccagcgtgatgtttgtgagcacctgggtgctcgatctgcggaccgatgagtacgatgagcacttcaaggcgaaggtggcggccgagatcgagctgacgcagaagccccgatacttggtccgggacctgtggtgattccgtccgtttggcccggaggcgggctgacgcccagcggcgtatggtggacgggtcccctacgacgcggggtgtcttgacaaatgctgccccacggagatcagatggccaaattgccccggatgagggaatcctcatccctcacagcatccagaggcaacctgtgtgtcgacgtgccgttcgaggacatgcagaatggagtgacgggctttacgcaggccgagtgggaagtcgaattgcggctgtgcgaggatacgaacaactccccggttcacccccacgtgcgtggggacaatccgcggagccctcccagtccatgttcatctggcggttcacccccacgtgcgtggggacaatgtctcgccgccgggagcacggcggcggcggtcggttcacccccacgtgcgtggggacaatccgtgtgcgacgttctcgtcggccgggatcaccggttcacccccacgtgcgtggggagaattttgtggtgattgcttggagaagctggctgagcggttcacccccacgtgcgtggggacaatcaaatctccccttatggccgcccggcccacaccggttcacccccacgtgcgtggggacaatgaccgaaaactcccatccagcacactcagcacgcggttcacccccacgtgcgtggggacaatagatacggagcacccacaggcagagaaaccgtcggttcacccccacgtgcgtggggacaatctgtggatcgggcgggtaataacagtcgtggacggttcacccccacgtgcgtggggacaatagcagtcgccgtgtgtacatcgcttgcagtgccggttcacccccacgtgcgtggggacaatctgtgtctgcattaaaagaagtattgccatatcggttcacccccacgtgcgtggggacaataccacggcattgtatgccgggactgggcagacctcaagatgttgatacctggctcggcctacgcttgtctttgtaagccaccaaggcaatgccctcgaagtcttgcagttggcgagacgattcgccttcggaccggaagctgtagccctgcgggctggaatcagaccatatctgaaggacgtagccgcccttgcgcttcttcagggcgttctgccacagcttatcccgtattctggccgtcggacttccaaggaaaaccccagccttgggctcgatcagccagcgagatagctcgcccctcaagctcatcggcacgttctccaacatcatcacgagcatcgagcacctccgcaatatcaggcaagatacgccgtatcagcttggcctgtttgaacatgtctcgacaggccagtcgggttcgtctttcaacgtcgtccttggagccggatacggtctggaacgccagcggaatcgtgatctccgtcttgtacaggtcggccacatcgtagacgaagctcagcaccttgcctgtgtggatgaagccgatggcggggctgtaaccggcggacagaatcgcggcgtggcacaagctgtagaggcaagaattggcagacgacagcgcccgattcagcgggtcggcggtgtaccaactgctctgatcgtagtcgcgcccttcccacttcacgccgcaggttgccgccatttgctcgtaggtcttgcggacccgcgccccttccatccccctgagctgctggatggtcacatccgccgagactggagacgggaatcgcttcaggtacatccggcgtgcgacgagttcccgctgctgcggagaggcatacaattcggcctgccggagcagtcggtgggcgctgtgcgttcctcccgtgccgaaggcgtacatcttgacgccctcctcaccgacgaagcacatcaggcagttgttggccgccagcgccttggctgcttgctgggtgatcgacgtgcccggccccagcatgaccagggacaactggtctatcggaatgagcgttcgtccttcgccctgacgaaagaccaggccttctttgtccttgtccaggccgccgcgctccaggtagaggtgcgtccagcggtcctcgaacttcggcagttcgtgcagatcagccataggttctcctaagcgcgggcaatgcttagcagacccatccccagtcccttggccgggccaatgccagagcagagcgtctgaaaaaacttctgcgtatccgtcatttccagaatcccttcgtactggacagcaaagatcgcgattcgatgggcagatacgccatccgcattacacccatcggctattcgaccgggaaactctacctgaccggcgcgatggacaagagcccgaaaccgaacgccttggctggaccgattccgcattcgagcaactgcttcagcaccttcagattacctacccggaagctcccctcaaacagtacggaccaccactgcatgcgctggctgggctgcggttcgtgctttgaacgccatccgtaagcccaaccggtgacgaagttctccaaacagaccggggaatccgccgcatctcccaacttgcctttcaaccagtcggcgtgatcgaccagcgtcgggcaaatgcgtttgcggctgccgttcggcgatccgtcctgcactttccgcgttggattggcgcgcaggcggaaacgcaccagatcgccgggagcgattcgatgattctcctttgggctgccaattacaaacacatcgtcattctcaaggctcatggtgatccttctggtctgtggtggcgcggccaacaagaatccggcattgccaatcgggcgtccgccatcatccacggcatcttcattcaacccgaaggcatagtgccaatccggcggctcgttccccgccgactggacgatgatgaggggtcgtcggacgccccggctgtgatcgacagggtaatcgatgcggaagaggaatccggcctgatcgctacgggaatggtgcacgtccgctgtatccggctccccgggcaagttacgcagatggtccagtcctgtgccgctgtagggtgcgcagtacgctgcaaggcgttccttatgtgacaccgggaccttcgacggaaaggccatacacaagcgctggtgaactcgatacagatttcgcagccagcgccgggtgatgctccaatccgggcggtcagggttgtcaccaacattgatgagcaggtgggagtggtacatgattcagatatcctcttcttccaaagcctcgcggcgaatcttctcgggagcactgcgcagtgctcgccgccgggtttcctcgctgcggaaacggataatgtcggcgcgggtccggagaatgtcatcgcgccaccgcacgtcgcacgggtcaatccggtccaggcccatgcccatgccgtactcgatcatggtcacggcatcgtggcagagccggcagagagaccgcaggtcttcctgtgcctcattgcccccggcgcggcgataggtcacgtgctggacagtcgtggccggcgacttgcagaagacgcagaggccctgatcggattgtagacgctcagcacgatgcttcttgtactggtcgttattgtagtccgcgcggggacgaggtggtggcggcgtatgctgctggagcgcatcgccgaccgtgaccgtgacctgacctcgtcttaccaatcgcggatgatgcaccggcgggtcgaacgaaaagggtgtgtcgtaccagacctcggcgtcaggcggagctgtatccttgtcatttcttctgcgccactcgatcaggcagggcaactcaatgttctcgtagcgtttcccatgctgatcgcgcggggcatcgtcggcatatcgcggatgccacggcattatctggagcgcagcctcgatatcaccatcgaccgccattgggttggtccatgtctcatccttgcgcggctgggcgaataccggcatggacggtggacacgacttgcgaccgaggtacaacggccacttcggggatcgcaacgcttctgcgaccgtggcgatcaatatcgcatcgccctgcaaagcgaccagaaaactggcatcagccagatattccagtcgtttgatgaccgtaccctgcgcaccggtcttgagcccacctgccgctgtcgtcaagccaatacccgccccaacggtgtgatagtcccaccagcgagcgccgggccggtcgatccgtacacccatcgtaagcgtgttcaaggctggaagcttctcgcgcgcccccggtcgcgataaacccatggcgcagcaaatcagccccagcacacccgatttcgtcggcgagtccatgcttcgacgaatcacaaacttggatgtatcaccccacgcctggagcgggccttcgaaacgcaggaagatcgtccgagagtctgtcatagtctccctcccgccggcgccgtgcttcttttgccgacctcctccatgatagcggtcacgaagtccgggaactttccgaattccttcttctcgtccacaacggactgctcttgctcaggctccctcttgcttttgtcgatccatgtcaggcgatggcgtgagctcggggaaaaccagaagcgttcagccgagagggcatagccgtcgatgagatcatgtgcatactggccaaggcgcgcgatgctctcgccgatcagacctcgcacagacttctccggaaccgggtcggcaaaggcatttgcataacttacaggggtggcggtctcggccttgacctcaaccaagatgccgtcagggtagttgaacgcgccgtatgcgtgttgctttccagaggggttcgcctttgcggcgccttcgaggaagcacctgacggtcgtcgtggcaagctccacatcgccgccaagattcttgagcagctgctcccagtcgatgcagaaatgcttgtagaagcaggccgaattgaacatcgcctcgctgacgtgtcccgcccccgcgtcctggccgggaatgtcgtctgctgccgtgaagtaatccacctcgtttacgaccgcgtgagtggagatggcgtgtgctgcggacagtgcagcttcgacggtaaatttgcccttcagaccttcgaacgggcccttcgcatcaaactccgtcatgcgtccgcacaaggcgatgtccggcgtcttgacgaacttgccgatgacttcggcgaacttcttacctaaatcaccgttaccggcgctcacggcgacccccatttctttgatggctgatcgaggcaggaagaagaggatgtcaaaagtgttctcatccttcaggccgacaccgccctctttgaagacttcccggacggctttgaggtgttcttctttgggctcgttgccatcacggccggccgctttcgcaatctcctcaatcagtcggcgcgtgcgaaccccgccgtctttctccagtgccgctgcgaattccgggctgcgtcggatgcttcgtttgaggcattggctggaaatgcgcgcgcgggtgacgccgccgaagatgcacgtcttgggggcacccagatcgtcccggttgaggttcgacggactgtggttctgaatcatgtggatttcaatcagcatagtcgcctccttgtggttgaacagttgcgttcaggtactcgcacgcccacaggtcctgcggcgtgcggtgagtttcacggcaacgagcgagccgttggtgagcattcaaccggctcttctgccatgtgtcgtccatgttgaactccctgtcccagagcgacaggtcgtcgagcagcagcgcccagtcgatgccggtcacagtctccgcgtggaccacacgacccgcaactgccttggcaacctcgcgcaagccccactgtagtcgtggttcgatgtcagaaaggcttgagcaaatcacggcgtcgaatcgccggcgaaaggtattgcgggcgcggtaatccggcggatcgcacggttcgcatctgccaagcaccgccgggagtgataccccaacatccgattcaggccgaacatacggaaccgaggatgcacaatacagcttggcgatgagccatgagatttcacgccgcggagttcgcgcatttgtcgcacgcagcggccaccacaggccggtgaacagatcaaatcccgaaagcgtcttgtccagcggctggcccgccagccaacgcaggcgagaacgatcgccttctttgagattctccagtctgttgatgaattcaatggtcggggtcatagcgtagctcccttcttgcgacacgcgcctgacttccttgctcttgtcttcttgttgatgagcttctcaagttcggcgtacgcctcggtcatcgccacgcggcgctgaaacgaagaaccgcgagcagtggacgcaatgatcttctgtacgaccggcttgaacgttgagcggaggaagtccctgtcatcgcccgcgacattgcttttgtccaagatggcgcggattcggtcttctgtttctggtgcgagcaacgccaaggcagcgcggatttcaggatgctcgcgtttatgattcggtgtgagctgcttcaacaggtctagcaattcgtcgccaacatcgcctgaaagacgcacctgtgactcggcagacgtatcgggaatggaaagcgtcgttgcgtcttgatacacaaactggttgaccacggggcctatcgcaatgcgcttgcgtccctgctttcctgcggcggcacgaaacgccgacctccagaacctggcgtgcgcttcggcatcggcttccaagcggggaagcgcaagcgcctcattcttcgacaccagaagctggggatccgatccccagaacttcttctgccggaggtcttcttgtccgattgccgcttcttcctttttgttcggcttcttaacgaggtcctggaacatcttctcgtttgtcttcaagacatcatcaagggcgttcgctatcgattccgcgagttgttctcttggtaagcctgcgtcaagtgttcctcgcagtttgtcactgcatgccttctgcaactcggccagtctgcagttgaggatgatccacgcggctttcacctccttctttgtcttggaatcctttgcattatgccccaggttcttgagatgttgctccacgcgtttggcgaacgcctgactttccgttagaggtgttgcccagcccgcagcaaacgcgagcgttgacctgccctacggatggtgggcgcggggcgagcttgatagactgggctgccatagacacgaaaggaactatctatggcagacaagagtacacgaccgaaacgctacagtgaggagttccggctccaggccgccaagctcatcgtcgagggcgggaccacctaccaccaggcctcgcagcaactgggcgtcag

SEQ ID NO: 547 - DNA, 31107 bp, Artificial Sequence
  Synthetic Oligonucleotide
caccccgatcgagttcgccaacacggttgcctacaggtactatcagatcctgttcccgacccttcgggccaacagcgatggcaacatgcagatcgcggaagtggagttcctcggcaccgtcgcgccgtagtgaacccttgccaaggttcgccacagtcgaatgtccatgatcaggggcctgcgtcccagtgacgccggcccctttgttgtgcgctcacatggcaacgcacagaagcacaaagacgccggcgaaaacgtgagcgaaccgctcgccccgccattgatgccgcgacaggatcgtggtaggattcgggggcggcccgatcgtggctgcggcaaacacggggctcaggcaacgggaggtgaacatgcgttcgagcgtaaggcagcgatggattccggtgtgttctctgatctgtctcggcgcggtagtcgcctcgggcgcaacggtgccgctgggcgagctggacctgacgaagatgtccaccgggtggggcaagccccaggtcaacaagagcatcaccgcccgaacgctgtcgatcggcgggcgctcgttcgaaacgggcgtggcgacacacgccgaatcgatctgctacatcgccctggacggcaaaaccgagcggttcagcgcctgggtgggcgtcgacgacgccaccgggcctcgcggctcggtccggttcaaggtctatggcgacggcaaggtgctgttcgacagcggcctgatgaccggcaacgacgaagccaagcgtgtcgacgtctcgctggctggcgtgacgcagatgatcctgctggtcagttccggcggcgacggcatcgattacgaccacgccaactgggcgggcgccgagttcatcgtggggggtgacaagccgacgaccgtcgacgcaccacggccccctgccgaggagaaggtgctgctgacgcccaagccgggcccggcgccgcagatcaatgggccgaaggtctacggctgccgaccgggacatccgttcctctaccgcatcccctgcacggggacgcggccgatcgcgtttggcgccgccgggctgcccgagacgctgcggctcgacgcgagcacgggaatcatcacggggaccgtgcccacgccgcgaggcgagtacgtcgtgacactcgaagcgaaaaacgaccacggcagcgaccgccgcaccttcgcgatcatcgtcggcgacacgctcgcgctgacgccgccgatgggctggaacagttggtacatccactattatcacgtcaccgaagagcacatgcgaaacgccgccgacgtcatgatcagctccggcatggccgactacgggtacagctacgtcaacatcgacgactgctggatgaagaggcgcggcgatgagccctaccgcgacgcgaaaggcgcgatcctgcccaacgccaagttccccgacatcaagggcatggtcgatcacatccacagcaaaggtctcaaggcaggcctctacacagggccgggaccctggacgtgcgccgggtacgtcgccagctacgaacacgaacgggtggacgcggagaagttcgccgagcggggtttcgatttcctcaagcacgactggtgctcgtacagtgaggtcgccggcggcacagacctggagcacctgaagcgcccatatcagttgatgggcgacatcctcaagagtctcgaccgggacatcatcctgaacctgtgccagtacggcatgggcaacgtctggacctggggtggcgaggtcggcgggcactgctggcgcaccacgggcgacctgggcctcgaacaaggcggcctgctgcccggcttctaccggatcggcctgagcaacgcccggcactttgagtacgcccggcccggacagtggaacgaccccgactacatcctgatcgggcacatcggcaacgcctatcagcatgatgagccgcccaaacccaccccactgacgccaagcgagcagtacagctacatgtcgatgtggtgcctgatggccgccccgctgttctactcgggcgacatgcgctatctcgacgaattcaccctcaacgtactatgcaatgccgaggtgatcgacgtcgatcaggacccgctgggcatccaggccaggccgctggtgcaggacgacgagactctgattatggccaaggcgatggccgacggctcgctggcggtgggcctgttcaacctggccgaattgcctcgcgagatgtcggtcgactggccgctactgggcctgtcgggcaagcgcctcgtgcgggacctttggcggcagaaggacctgggcacgtacgacagccgcttcgccgccaacgtatcgcgtcacggcgtggccctcgtccgcctgatccccgccccatagacggatgatgggcggccggcggataccgatatctcttgcagacggcaacctctgtcgatagaatggtaaatgccgcgatgcaacgcgatcaggcaccctgactggcatgccctgccgggtgcgcccggagacgggtgggccgagacgataggtctgggtaagcgcttcccgagaacgtggaggaccatgtcatgcggaagtcgaaggcattcacactgatcgagctgctggtcgtcatcgccgtcatcgccgtgctcatggggatcctgataccggcgctaggcaaggcccgtgagctggcccagggcgccgcctgcaagggcaacctgaagaactataccatcgcgatggcgatgtacctcgacgacaacgaccgcaggttcgcggaaccacagagatgctacttcagccaactaacaccctaccccgtcgaggcaggcatttccgagtacctgcatctgcgctggtgcaacggcgacatcgagttgaagagtcacccggagtacggagggatgatggcccggtacctcggcgatgccagggcattcatctgcccaaccttcaagaacctcgcagtgcgccacagcgacgaccagttcttcctcgcctatggcaagaacgtcaagaactacgaaccctggtacaactacacgatgaacgcctatctgggcagcgcccgcagtgacgttcaggagacccgcgttctcaaggacacggacgtcaagcatcctgcgacgacgttttcgttcgcagaggagagcgcgatcgtcgatacggcctacaacatgtccgggctcaatgacacgttcatggcccccggcagcgatacgatggtcaagagttggttcagccagaccggaggcgacctgcgtcgcatcatcccgggtcccgagggggtcgggcaattctgggatgtgatcgcgggtttccaccacgccccttcgggcgacaagctgggcggacgcggcaactgcgcgttcctcgacgggcacgtcgaggccttctcccgtgccgagacgttttactacgcctatccgaagaagtgacggcgttgcgttaaatccgaaatccgaaacacgaaatccgaaatagatccgaaggcaccaaactgcgaattcgaaacggggttcggcacagcgtcagcatttcgttcattttagcttgcggatttcgggcttgtttcggatttcgtgtttcgagtctctgttcagtcattgtagccgggcgagccgccgacctcggcgctggcacgccaggcgcccttcttgtcgagggtggccgaatcggcggtcagggggtcaatcaccgtcagcgagtagccagccccatcggtgaggtcgtaccatccgtccttgtaccggaaggcgaggatcatctggccggcggcatcctgcaactcgatgctttcccccgcattgttcaggctgccggcgtactggccgacgacgggcgactggtccccataccgcgcctcgaacgccccgatgtctttgacaacgagggcatatgcacccgggtcgagagtgacgtcgccgaaggtgaagtcgatcccattcgtgaagcgcaccagatggagattaaccggctgagagccgatgttgagcaactcgacgtattcggtgttcggatcgacaggatgatacatgatctcgctgatccgcaggctctcggccaccggaccgacggcgtagaccgcctcgttcagcgcgctccaggtgctgccgctctgggcacgggcgcggaccatcgcgctggcatcgagccggatcgggccggcgtagcggaccgccgtcggcgcgacaccggctggaacgtccgcgcccccctgcgacgcgaccagctcaaccgagatcaggaagtcggaactgttggcacctgcgttgagcccctggatcgccaggaggttgcgtcccaggcgaagccggctgatatggccggagaggtcgaaccgctcgaactcgaccgcgtcgaggtcggagtggttgtcggtggcgccggagttccaggcgggcgtcccctcgaacatgacgcgctggacttcgacgccgttgaggtaagcgatgaaaccgtcgtcgtaccgcgccttgagcgtcaggccgccggcgtattgcaacccctcgggtgtgacgtcgaacggaatgcggatgtagcagctctcgttgcggttgtacatctgggcctggacgtcgatgtcgaagaacgcctcgtagccggtgctgcgttcgtagccgacgccgccggagccggcgatccaggcggaatcgtcgaaatccacctcgctgcgccaggcgctgccgatatccgtggtggggacgaacgcgcgcttggccgccgcttccggcacgaggaccagctcagcgcccgtgctgccgctgacgccggggcgccgcggatcgctgccgtcgagcgtgtaccagaccgttgcggcgttggaagtcattgtgagccgtgagccctcggcgatgtggccgccgtgctgatagacaccgtcgatatggaagaccggcgcctccacgctcgggtagagccccagggctttgaactgcgacagtgccacctcgttgcggcgagggaaatagttgtcgagcagattctgacgttccacgatccagaaatcgttgcgggtgtacaggtaataggggcccgaactgtaggaatgcacatcccggcgatagtcgccccagcgggccgactcggcgatgacagcggcgtcgatctcgtcggcccgtcgggtccatcgcgcgatgttgcgctcggtcgtcagggcgccgccgttgaacagatgcttgtgcacgcgatcaccgaagcgaacgcggaattcctcgatttgcgaaagggggcgatacaggccggtcgggtccaacgtatcccttatcacggtctcggtcgccttctcaagaactcgttcgccgtcccagctatagaagcgccagggcttgttgtcggcgccgcctccggcggcgcgccagtttccgtcggtcttgagatcctggttgccggcgaacaggttcaggagcgtgaagtcgatgaagttgtcgatgtcgatgacctggcagatccgggcccaatcgccgccggcggcgatgctcctggcctgttgccaggtctggggggtgacgtcgtgggcgtcgcgtcctccgttaatcgaatcgagtcgatccgggtcgcctccgttgtaggcggcgtagtgcgaggcgaccggccgctcctggaccagatacaggccccagtaaatcccgttgaggtacaagtgcacgtagaacccgcgtccggcgtcggcctgccccatctcgagcaacgagtcgcgcatccactggtcgcgaatgtactgcgcccgctggcgctggccgggatcccagtgcgtccaggcgttgttaaagaagccgcgcagttgaagcgaatcgaacgtttccacggggctgccgtcgaacaacgggaaccggagcttcgacgagccgtagacgtcgcgaaagcggaggctgaaactgtgcttgggacacttgggcgggttgcggctttcgccgccctggatgcgcaggccgcagtcgatctgaaattccttggcgccgtcgatgctgaacagctcggcggacacgggccgttcccaatcctggccgcccgtgctgctgtgcccggtgtagatgtagatgccgccggtctgcgcatcattggtcttgctgaacaaatggtccctgtcggtcaccagagacaacgtcggaatcgccagcagcgcatcgtccatgacgtcggcatatgcggggctgttgtagatctcggggtccatctcgtagtcggccgggtaggagccgaaccacgtgctcggatagccacgtgccagcacctcggactgcgagcgcctcgccgcatcggccaggaagatgtacgtgtgcgtgtccgcgttgctgggtacgcactgcggcttgaccgcctgggcccgcaggcacgtggtcctggtgatccggatcgggccgttgtagacactgccggcaggaacctgccgagcctgcgaatacggcgcgctgccgtcgagggtgtagtagatggtcgcgccgggcgtctcgcacgtgatcgtcacgtcaaacggcatatcgtagaaaccgcggtcatggctgaacttcgtatcggcgacgagaccgtcgtacaggccgctgttgcgcgagccgggcgtgggcgtcagcaggaagccgtacggcccggtgccgtcgggcgagcggccataggagatgtcggtcctctgttcttcgaatgcaacgctgtcgatgagcgtggtcccatcgggggcaaacagtgccagggtgtccccgtcggaatcgagcgcaaacgacgcatgcagcccgctgtcgcttgtggggccgtcgagccagacgatgagatatccccccgccggaacggtggccggctgcgaggcaccgcctgggaactgccattttgtcggttcgcccggatcgtccgtcaggtacatgcgggccaggtcgatcggcgcatcgctgtaattatggatctcgacccagtcgtcgtactggccttgggggtcggccttgacactgctgttggccgccatcagctcattgatcgccagcggcagacccgccccccggcctgccggggtcgccgagacaggaccgacactcagaagaaacgaagccagcacaagacgagcggcccgacgggattcacgcgtcacactcattcctcactcccgacaatccaagcggtgacaggcgtgcaagtacgctggtgttccagaatccgggaccgtcgtcgatccccaatgacctcgcgactccgcccgccgtgaaggcatattcgcacatgcgcatcagactgtattctaccattcgcggcctgaaaatcaacgttatttgccccgccgggccgccaagtctacaccgccgacctcgtcgagatcgagccgacgccttgccggatacgatccgaccggttacgattcgctatgcaatcgtggccttgacgccaaggccgccgacagagttcgggagaatgtcgccatggcagcatttcgcgatccagccaatccgatcctcaccccacaggacgtaacgccgtcgcgtggcgatttcgaggtcctcggcgtcttcaatcccgcggtggcccgccttggcgaggaaatcgtcctgctggtgcgcgtagccgagcgtccgatccagactgacccggaggtggtgcagaccgcgtttctcgacccggcctgcggccggatcgtcaccaaggcgttcactcgacccgacccggccaacgatttctccgatcctcggttgatcgtgcgccggggcaggacatacctgacctcaatatcgcatctgcgcgtggcgagaagcaaagacggtatccgcttcaccatcgatgagcatcccacccttggtccggccgacccctgggagagcttcggtgtcgaggacccgcgcatcacgcggatcggccagacgtattacatcagctacgtcgcggtctcgccgctgggggtgaccacggcgctggcgtcgacgtgtgatttcgcgaccttcgaacgtcacggcgttatcttcggcccggaaaacaaggacgtcgtcctcttccccgagacggtcgacggacgatactacgcattgcatcggccgcactcgccgctttgtcacaccaacaacatgtggatcgccgaatcgcccgatttgctctgctggggccgccatcgccacttgatggggctgcgcgacggattctgggacgaggcccgcatcggggccggcgcaccgcccgtccgcctcgacgaggggtggctggagatttaccacggcgccgaccgcaaccatcgttactgcctcggcgccgtcctgctcgacgcccgccagccctggatggtgcgggcccgctcagcgcggccgattctcgagccgcagaccgaatacgagtgctccggcttcttcggccccgtggtcttcacctgcggcctgctcgtcgaacagacgactttgaaggtctactatggcgcctccgacacaacggtctgctgcgccgcattgtcactcgaagacgtgctcgcgtcgatgcagtcgtaagtcgctgggtttctctcaattctccgcaacaccgtgcgcgccgtggtcggcaacctctgtgagtccggatcggccagccggtcggcccgctggtccacccgacgctgacccgatcctgtgcggcgcctcatcatccgatgggacacggaatctcgaaaagaaaccaatgtcaccgacagtcttcccatgtcccccaatcttcccacatcaaaataagcattttcctccgtggaattgcttgcagggcgtcccatattgcgcgtatatttaacccggatggggcggtgatgaatacacgtgtggttctgctcacgcggaatagctacacgcagacgctatgtggacatagagagtgtctggatgagtaaaatccgtgcgggcgaggtttgtccggacggagtaaaggggagatgtacggatgggtgggagaaacccggagaaaggaggtgcctgggggttccacggatacaaggtaagctgacggtttccacagagtcacacacggagtgtaaggagacacaagatgagacggttacctgcaatactgccggcgctggcgctgctcgccgtcgtcggcaccgccagtggtgcgctgacgctttccagcgccagcggcacctggagcgatcctgtacttcagtccttggcccctgcccctgcctactggtcttctttgatgggcgaacagctcatatcctggggcactccggcctatctgtttggtctcaagagcagcttgggcttcacacccgtcgcgacgcccaccgacgtggtgctcgatacgccctttgtcgtgggcgcgctgcgccattacaatacgcccatagtcgtcggcaccggcatcacggcggtcgatctggacctggcgatggactttgaggggacgccggtcaacacgtccctgacgctgggcgttacggaaacggtcggcccgggtggccatcctgcggatgtcatcacgctgccgacgtcgttcgatcccatcgcgtttgaggtcgggggcgcggactacgagttgtgcgtgctgggtttcggcagttgccccagcagcatcatctcgtcgcttagcacggaagaatgccgtaccacctgtcctccgctcccgctctgggcgaagatctgcagcacgacgccaccaattccggcgccgggagccctgctcttggccggcatcggtgtcagtgcggtgagctggctgcgccgacgccgaacgctctaaagctcggcacatgaggggcgatgcgatattgtccgcccggcatcgggccgggtagggccgcgagcaacccgcagcagtacgcctggacttgacgccacggtcctcgcttactgctgcggggccggctcgatggtgatctcattgccgccagcctcggcacgcacctgtggttcgtagtaggagtatgcctggctgtcgggaattgtcgcgcgcaccgggaagcgggccttgacttggaagtgcagggtccgttgttcgccgcgttccaggccgtcgagatagaagatcaccttgcgtccggccacctcgtaccgcgtgacgagattgtcggcaagcagcgcatcgagcgactcggcgacagcggcgaagcctgtaggcacaccgacatccacgatcatcattcctgtcgagtcctttggcccgaggtaccgcaccgtcgcggtgacgttgacgatatcatcgacctccacgtggtcggcgtcgtacatcacctccagggtcatgtccttctggaccggatcgtcacgcagcagaacgttgaaccgtcgaaccagttggaatcgcacctgccccgagccgacagcgctgatttcgacggccgattcgagcggcagctccgccgtctgaaggacgtcgaagttggtgctgttcacggtgaactgcgccagcgtttccccgccccgcgccttggcggtcaccgtaaggtccacgttgcggctctgactgcgggccgccatcatcagggccttcagccccatgaccgtatcctgcgtactgccgtagccgcccaggctgttacgctggagcgaaagccacttgaccgcttcgttcgcctgcggccattccttctcgatcatcgccagcgccgcgtaggcggttgtctccaccgggtgaggttgccagtgcagaccgtcggcatcggtgacggcgatcgccagcagccgttcgagcgccgcgtcggcggccggatcacctacccgcgcgaaggccagcgccgcaattgctagggcatacgcatcgtcccggaccgacgcgaggttgtcacgcagatattgcgtcgccgctccctgcacgtgcggatcggccataccgtaatccgccatcgcaatcgacacgaacgcggtcagcgcgtacgtcccctgcaccccgccgaccatttcactgtggcatacgaaccccaccggcggccacgatccgtcggatgcctggtgcgaggcgatccacgcggccgcctcggccagaatcgtctcgtcgatcgtcgtcacctcacgcgcggcgctgaacgtgccgagcacgaatgccgtcagccagaggctgccctcggcatcgctctggccgaaggcggagaacgaaccgtcctgatggcggaatgtcagttctcgctggtagcccaccgtgatgaagtgctcggccttggcccgcacctcgggcgtgagctggccggtcgcgttgagatagcgcagaatctccacgtccggggcgaagaagatcatgttctgctcgccgcagccgtagggcattccgagcaggtcatccacaccgttgatgctctgggcaaccaggctgggcgtgatgctcaggagaatcttctgcgaatcgggcacggcgaattccggcgtattcgcgtcgaggaccaccgtctcgcccgctcggatcgcgccgttggtgaccagctcacgccgggtgccttccggctccacgagcacttccttgcgcacggcatcggcccgccggaccgaacgcagacggacctccagcggatgatgtccgagcttcgtcggctcaatgacaaacgaaacagacgacacggaatttgcatttacctgcacctgctgttcgctgatgtcgagcaggttgaaccagtcggcgtccgccatctccacatagaccacctgaggttcgtcgaggtagttgaacacctggacccggaccgggaattgctcgccccgcgtcaccgcatacggcagatcgggctcgccaaagaactcctggaacacgcggactgacgactccgtcacgccaagcccgttgtcgctcgtggacaccgcatgaagccgccacgtcgtgatgctgtccggcgccgtcaggtccagcatcgcggtcccattgggctcggtgagcagatccggcatccacacccacgtctcagggaagaactggcggacccgatcgacctccgccaacccatctcctttgccggcgttctcggcaacatcgtcggcgccaccccttcggacgaccggaccaatccaccacagcccgttgattcgccggccctcgggaacatccagcccgcgcgaagtcaccacggcaagcccggcgtcctcaaatatgttgcgggcgccatagctgtacggctggtcgtgcgtttccgcctgcggctccatgaaccgctgttccagctcgccgaacacctcctgcatgttgagccggccttcgttcagcgcatagaccgactcgtcgacgatggccaggccgaccatcgactgaccctccgaacgaaccgagacgcgaaccggctcacccggcccgacctcttcggcactgactcccagggccaggctggctgcgtggtccatcgtcacctcgaactcgatcgtggcggcggaaatctcgttgttcgggttgatcacgtacgccaccacccgggcggccggcaccatctgctgcgtcgcctggaaccggatcgccgagccggtcaccgcgtccgaccagacggtatggccgttcgcaaagacatcgtagtagatggttgcatcgtgcgtgcgaaacacatcgatcgtgactgtgtcacccatgccgacggcgccggtggattcgcgactcagatgaaggaagctgtcgctgggcgagtatgtcgcatagacgtacaactccgcctgcccgctttcgccatcgcctcgaacctcgctcttcagtgtggcccaggaagccttctgcggcgccctcagggtgatcgaggtcgagccttcgaacgccagcgaatgggcctccttggagatcatctcacccgattcggcgtagtactcgccgatcaactgtcctgtcacggagacgggcacaccgtcgggcgtctcggccaccaccaaaacgtcatacgattgcgcgggcgtgaacgaccgagacgaggcgatcagccggtgctcgattcccgacgagacgatcttcagcagcttggtcgtcttctcctggtgatccgacgtgtcggtgacggtcacgtcgagctgcacgctgcccgcaccgccggctcccgtggtcccgctgacgtacttgacctcgggcagcgagaactccgcccgcccttccgtcagcggcgccgtgtagcgagcgtattcctcccagacaccgacgtagcgactggcgctgatctgaacctcgccgtcgacgggcttgccgaagaaatacgtcgccgtgacggtcccggggattctctcgtcggtgcggaagtaatcccgtggcgtgtcgagcttgacctcgaatcgcggcagcacgtactcctcgactcgcaggtcgatggttccccggccggcccccgattcggcggtgatcttccacgtgccgtagttcagctcgctggccagatcgaggttgaacggcgcgacaccgaaggcgttcgtcgtgaggtccttgcggaagattttgacgcccttgccgtcggtgatctgcacggtcacgtcggaggcgctcggacgaagctcgttcgtcagcaccagcacgcggccctggatcgtctggcccggcttgtagattggcttgtccgtttcgatcaacaccacgggcatccgccggatcatgatctgagttgtcagagtctcctcggcgccatcgacgtgtgcctccaggatataggagccatccgccaagttgggcgtgtcgaatcgggcgacgaaccgccctgcctcatcggtctgcccggcggcgaggtctacgttcccttcatgggccttgaggcgcagactcacgccgatccctgccgacgactggcgtgcgctgaccaccgtgatcgtcgccgaggtcgaggcgccactgtacaacgtcttggggacgaccatcatcacatcgacggtccccgcccgggcgactgccgccaccagccccaggaccagaaaccctgcaaacctgattctccgtgccattgtgccgctccttagattgggatgaatgaatggataataaccgtaaatccagcacctgccttctcttcgaccagacagggggcgtacctttggctgatagtgcgggcgaatcatcgttcgccgccatagtttgtggaaccgccgcccgtgccccgaaaatccctcaagccacgctgagctatctccgcaaggtctccgaaggtgccggtgcgatgatatgcgacaataatatgatagcgacaagcacggatatgatggtcaattccggccggccttcgaaccttgattcactgcggccattttatcggaacgtgcgtctgggttcaagctttttcgcccaggcccgcaaagagccggcggacgtactcggtgcttctggtgaacgcttccaggggcggcatggtgttgggcgagccgttttcgatcgcctgttccaggacgatgtgcgggcgaacgccctcctggcgcagggcatcggccagggcgcggtaatcgatatcgccctcgccaaatgtctcggtccagacgccgccctgggactgccgcaggtgcagctcgcggatgcgcttgccgtagagcttgacgatgtcgaacagggcgacctgcgagttgcccgcgccgcgatagacccagtgggcgtcgaggcagagtgtcacatcggccggatcggtgccgagcatcatgtggtggaactcgcgtgcggcctgccgcagttccatgttgtgattgtggtaggccagcgtcaggccgagcttccgcagttcggccccgagccggttcagtgcggccgcctggaccttgagctgttcgtcgttcttgtcctgcgcgccgccccaggcgagcggattggggttggtcacgacgatccgcgctccagcgtcccgggccctcggagcaatcgtgaggatctgccggatgctctcatcggcccggccggcctcatgcagcaggctgttgacgtaaaaagaccgcatcccgaggcggtgcttcttcagcagaggcgccagacgctcgacctgtgcgacgtcgccgaacgacggctcaaacccgtcaagaccgctggcagccacctcggccagaccttcatcgagcgactggtcgaaattgcgcccttgacgctgatagaacacggtccaggagtacgagttgcaggcgacgtgcatccgctcaccctcggagcccgccgccggacgaacttgagccggcgaaagtgcgatcgcccctgtcgccagaaccgcatccgcaagaaacgtccgccgcgttgtcaatcgatctgccatagtgcaaacctccgtcgccccaatcggggcttgccgcctgcgtgccatcccctccgaaccccgcacgctgagtatgcggccttcgccgggcaaatgcaagggcgcttcctcgcacggacgcggcatggtaggctgtgcctcgtgaatggtcaggtcataaggagaacatcgcatgcgatgcaggatggtttttacccacgtgttcgcgggctgtctggcggcgtccggcagcctccttgccgcaccgcggctggtcgccatcgggccttgtccggcccatgtcggcaagtatgacaagctcgaactgacactgacgccggagcggacgtacgacaatcccttcgacccatgtgaggttgcgatcgatctgctgatcgattgcccgagcgggcgggcgctcgttctgccggcctttttcggccaggattaccaacggcgagatttccccagcgatggcaaaaccgtggcctggtgctacccgatcggtcaagggacgtggaaagcacggttcgcacccacggagacggggacatacacgatccgggctcgcctgaacgaccgtgagggccaatcgctgtcgcagaccatccggatcgagtgcgtcccttccacaaataagggatttttgcgcgtcggccgcgaggacccgaggtttctcgaattcgccgaaggccagcccttcttcgccatcggccagaacctcgccttcatcggcgagagccagtatgtcaacgtcccgaaggccgaggcgatcttcgcggagatggcgcgaaacggcgcgaacttcgcgcgcatttggacgtgttgccatgactgggccctcgccgtcgaggctcccaagagcgcgtggacccgttcatggaaccggcaatcgcccgtggttcccctgcctgaagccgagggcaagtgcgtacaactgcagggccaggacggcgcttcgatcgaggtttcgccctcgcaccgggtggcgctgcggccggacacgcggtacacactccgcggaaggttcaaggccgacggagcggacggtttgcgaatccaggtcggcagacacgattggcgggtgccggcacacaccgccacctggcaggacttcgcagaagaattcaccaccggccccgatgagtactggctgggccacaccacagttgcactttcgggcgaaggcactgcgtggctgaccggtctgtcgctgaaggaaagcgacgacagcgcggagctgctatgggaagcggatgtcaatcgtcccgtgcggggttactacaatccgctcgactgcttcatggtcgatcagatcgtccaggccgccgagaaacacggcatctatctgatgctttgcctgctgacgcgggatctttacatgaatgagcttggcaatccgaacaatgtgccttacgaccgagccatcgcggatgccagaaagttcatgcgctatgccgtcgcccggtggggctactcgaccagcgtcggcgcgtgggagtacttcaacgagatcgacccgggcaagccaacggaccacttctatgaggaggtgggcggctacctcgacgaaatcgacatctaccgccacctgcggaccaccagcacatggcatccgtcggcgcgcgactgtggcctcgcagccctcgacgtcgcccaactgcaccactacttgcgccctggcgaagcagacttcaaagacgaagtccaggccatcctcgaaaaggcggcctttctgcgagagcacgcgccgaacaaaccggcgctgatcggcgagttcggcctggccaccgacaagtggggcctgagcgagcacatgagacaagacaccgatggcgtgcacttccataatgctctctgggcgtcgaccttcgccggaccgtcgggcacggccatgttctggtggtgggagcaattggaccagcaggacgcctaccgtcactatcggccgctggcggcatacctgcgggacatctccttcgagggattgagagcgacaggcgcaactgtgtccgacgcgcgtctacgcgtgctgggctatcagggaacggatcgcacctatctgtggctgtccagccgggacgccacgtggtggaaggtcgtcgcggggcagacacctcaagagatcgaaggtgcgaccctcgaaatcccagacttttcgccgggcgagtacgccgttcagtggtgggatacaagtcagggcacttgcatcaagacgcaccgcgttcgacacgaccaggaccgattgagtgtcgccgtgccggtggtgcgaagtgacatcgcctgtcagatcgtgcgactctgattcgaacggttcagcgtcagacggcaccggccaaatcgttctccaactgggtcaggatcgtctgaaggcagcggtcgagaccggcgaccagcccttccggcccggcggtcgccacgtcggccgtcgcggcgtaggacttggccaggatgatctccgggtctacgccgctttcggtccgcagcaggaagaaacgaatctccatgaccgccttcggcgcgcgcctgtcgcgaaagtcaccgtagagagcggcaatattggcttcgattcgatgcgtgggctcggcgccgctgcccgagccgagaacctgcgcgaacagacccgactgggtcaaccagtcgcgtgtcctctccgtgatcatcacggtcggtgaaacaagaaactcgttgtaagcgtcggattcgtatcgatgttcgtcgagccggtagaccagccccctgccggcgtacgccgcatcgatggtgaaccgtggaaccgccagaacagccttgccttcgcgaacggccggggacaacgagcgagacgtctgaagcaagtagaagcggctgttggccgactgcggcctcgcgcaacccgtcaggacaagcgcgaacatggtcagggccagaaacagggccggccgggtccccttacatatcatttgtatgcctccgattcacgtgggggtttgctgaagatcagctccgaaggacgctccctgagactgtcggtcaggtcgcgcagattgtcggaaatctcccggaaattgccgatgatgatttcaatctctggtttctcggtcgtcaccagccggtcgatgctcgacagcacccggttcagccgcgcgacaacctccggaaggttggacccgcccgcggtccccgtcggcgacgccagcagacgccgaaggccgtcgttcgtgatgcggatttcctgaacaaaccgcgtcagttcggcgctcagttccggcacgttggcatccgcgacggtccgctccagcgaggccagcaaacgctgcgtcgcgtcgttgatgcccgctacgtcgagggcctggaccttctcccgtgtttccgccagcaggctcgtggcttcctcgctgatccgggccagattcgcatcccccaccgccctctcggcggccaccagggtccgctcgaaagaatccaccagcccttcgaaatcaatctcctccagccgggtgaaaatcttttcgagcgagtctttcaacgtcgtgatctcactgggcgccgacggcatgtaggtgtacaccggcgtccacggcacctcgaggatcgggaagcgattcggatcgagatagtcggcctccaggtagccctggcccgtcaggatattcgaattgacgcgaacgcgcaggccgcgagcaatcatcttttgaagcatggcaccggccttttcgacgccgagttcgggcatcgtctctcgcggcaccgcgtagacgacgcggacgataggctggaagacggacaatcgtccgctgtccggcgggatcgcatacacactgccggcgaatgtgatggtctcgacctgaccgatgcgcacaccacgaaactctaccggtgacccgaccgtcagccctgtgatggactcgtcgaaataggtctcgaatctcagcttgtccttcgcaaacacgccggaaccgaacaggatcacggccgtcagcagcaaggccgttgcgagaatcacaaagacgccgatcttgaagtagcttggtttccttcccatcaggccgatccgtcccaatctctctgttgaccggttccaaacatgcctacctcctgattcctgcagccgacgactctcgatggaagaactgccgcacccacggatcgtcgctgcggtcacgaagctcttcgggcgagcccctggcaacgatcgtctgccgttccttgtcgagcatgattacatggtcggcgaccgcgaagatgctcgccagctcatgcgtcacgataacgaacgtgatcttcagggtctgcgacagttcgacaatcaggtcgtcgagctgcgccgcagtgatcgggtccagtccggccgaaggttcgtccagaaacagaatcttcgggtccagggccagcgcccgcgcaatggccgccctcttgcgcatgccgccgctgagttcggagggcagtcgatcgccggcgtcctgaagcccgaccaccttcatcttcatccgggcgatcgtctgcatggcctgtcgcggcaggctcgtgaactcttccaggaccaggcagatgttctcgatcaggctcatggagccgaacagcgcgccgttctggtacgccacaccgatccggcccagcagcgcacgccgctcctcgccttcggcggtgacgatatcggtcccgtcgatgaggatgcgccccgtcagcggccgatgcagtccgatcatgtgcttgagcagcgtgctcttgccgcagccggaaccgcccaggatacagaagacctcgccggcgcccacctcgaaggtcacgtccttcaggacgatgtgatgatcgtagcccacggtcacgtcgctgacctgaatgatcggcggtgcgtcggaccccatcgtcatacccccaagtagtagtacagcacggcgaacacgccgtcagcaaccacgatggcgacgatgccgctgacgacggcgcgggtcgccgaatcgccgacggcgctggggctgttgcccgtctgcaaaccgcgcagacacccaatgccggcgatcagagcgccgaatacaaaggtcttgaccagcccgccgaacaggtcgcccaggctggcggcctcctgaatctggtcgatgtaagccgccacagggaaaccgaacgatcgcatgaccagcccgcagccgatcagaccgaacagctcgttgaacagtgtcagcagcggcatcacgcagatcgcggcaaccagccggggcaaggccaggaactgaacggggtccacgcccatcgtcaccagcgcatcgacctcctcgttgaccttcatcgtgcccaattcggccgcaaaggctgatccgctgcggctggtcaggatgaacgcagtgattaaaggtcccagctcgcgaaacagcaccagcacaacgaggtcggccacgtagatctcggcgccgaacttgcgcataccgatggccgactgaaaggccaggatcagcccgatcagaaaacccatcaatgcgacgattccgaccgcattggctcccgccttctcggcgatcaggaatgtatcggcccagcgcagacgacgcgggcgaaccagaacactcagcaggcggacgaaaatctcccccaggaaagcgacctgcgtgtgaaagcccacaagggatccatgcgagatctcaccgacacgatggatcgcgcggaccagccacggcggcgctggcttaggcggcgcgggcgggcccggatcgaaccgcctcatcagttcggtcagatcgtcccgcaggccctgaatccgaaaacctcgctgccgctgctcctgtccagccttcaattcgagcagaagggccatgcccgccgtatccaagctttccacacctccggcatcgacttcgatggcggaagggtcacactgcgccaccttctgcataacctggggccagaaccgctgtgcgtcggcggcgttcaacgtcccctttaggacaagacgcaatccgcgttcttcaaattgctcgtagtccagacttgccgcacccgaatctaccacagctttccttgcccagaacccttcttcccatccatgttccaacgcgcccaggcggcgccgcactctcacggcccgcgcggcgagcccacttacatacatagctcccacggagcagccgcgaggacctctaactataccgtcgccccagggccgaggcaagttccataaacggctctggtctgagtacttggacgtgggacccatcggcaagctgccgctggcccctgcgacgagatcgaatgcggcaagcggcagaacaagaggggaaatcggggagacaggatttgaacccgattcgtggggtaacagaatcaccacaggaccgctccaattcctgcacagaatgcgaccgaaagccatttgaaggggatttcgagggacagactcttgcacttcccgaacagcgaaatgatactcccgaacacagaataggtgcgcatttggtgcgcgagattgcgtcgggtgaccccgacttggctcagatcgtggcggcctggccggacctgccggaggatgtgaagcggaagatcctgcacctggtcaggagccacaggccgacccctgaggcgcctgcatagaacgtaaccctgtgccggccgggcctctcgtgcgagcagccggcggcgcggaaccccttttgacggaggctgagcgatggaaagtgaacgagacacgatgaccccgcagaggcagccgaaagacctgatcgcgacgtggctggagcagcggccgctggagacgatgctggccgtgagcctgtcctgggccctgtcggacggcgaccacggcgacccggacttgctcaatgctgtgctcgacaagtaccacgaggccctgatggaggcggccaagcagggcgctgcggagctggacgaggaaagcaggatgatgctcggggcatggatggcggcggaggcactgacgggcgagtaagaaggtatcccggggatgtgccgttccctggctctcggagccaagaagtctcgcgcccgggcgcgcgaggaggcaacgggaaaagacaacacgttttgtcgtgtttcggtcccggcccggcaacgggcttcacgattgcggcccggaccccaccggggggagcccccccggcacccccggccccacagtactatctctcgctcttgcggtgcggatctggtaatgcgcggacggtttgtgaatcgctgtggttgacgaacggcccgagatcgggcctcagagaggagccaacatgccaagagacgaatggaagaatctggacggtcaacgaatgaggttccgtgccatcttcgagcggtatggccagaagagtgcctatcgaggagcgcccctcaagacgcttttgtttcgtgaggtgtgccctgtggatgggggcgtccgtgtgaccgatcatctctggttcacggagacgaaggggttccgggccctgggcgtgctgcaccagggggactgcgtggagttcgatgctcgtgtgacgacctaccggaagggctactacgggcgccgggaagatgtgtacaagccgagcggccaagactggcgtttgagcttccctacgagaatcaggcgaaaccctgcgctggacaggcctgtacccgagcccccgtccaagccccacgaggacgctgccgcgagcagaagccaacccgaccaaagaccgggggccttcccacgcgcggagcttctgattccgccggcgtggcgcgaggccgccagccgatgcgtcggaatcggggcactgcgggtgtttggctggctctgtgaatggacggacggcggaagacaaccgtgtgaagcgccgatcatgaggctggctcggctctgcgcaccaccggagcaagggatgctacgcacaaaggccatcaaacgccatcttcgaaagctgagcgaagcaggcatgattagccgggtccggcgccagggagggaaacgcccccagtggtacgtccggccgcccgagatgtggaatcaggccggcgatgccgccgacgagagccagtgacatcagcaaagacgacggacatggggcatcggccccttttgacggaacggccgaaggagatccaacagcatgacggacagagatgtgccaagacgttttcagaggctctaccggctggccatgaccggacgcagccaaagtgctgccatccggtcgttgtgtctggagtgcatggcttacgtggcgaacgcggttcgggactgcaccgacacgggctgccccttgttcgcctacagactgacggggcgcaagacgcccacggccgtcgagacgactcacagcgtcgccccaactcgaatacgtgtgcgattcgcgacggaattagccacgatctggcccggacccgacccaagggccgtctctgtgaattggaacgcccagaaggcccgtggcgagctctgtgggcctctgtggagcgggtcccatgcggtacggtatgtttcgcacggggcgggttggttctgcgaagggcaaggcaaggtaggattcacaggcggcggtcgggccaggacgccggcgaaaggatggtggcttcatgcgtgaggtcagtttcgacaaggacagagcggaggcattgatggcggccaaagggcgccgccagccgctcgtgggggaagggcgggatctattcctgctggcgggcgggctgaaaggggtggcgtccccgccgcagggagagcacatcgaccacctggaactcgaagtcgaacaaggctgccaggacctgctcgccagcgtgatgtttgtgagcacctgggtgctcgatctgcggaccgatgagtacgatgagcacttcaaggcgaaggtggcggccgagatcgagctgacgcagaagccccgatacttggtccgggacctgtggtgattccgtccgtttggcccggaggcgggctgacgcccagcggcgtatggtggacgggtcccctacgacgcggggtgtcttgacaaatgctgccccacggagatcagatggccaaattgccccggatgagggaatcctcatccctcacagcatccagaggcaacctgtgtgtcgacgtgccgttcgaggacatgcagaatggagtgacgggctttacgcaggccgagtgggaagtcgaattgcggctgtgcgaggatacgaacaactccccggttcacccccacgtgcgtggggacaatccgcggagccctcccagtccatgttcatctggcggttcacccccacgtgcgtggggacaatgtctcgccgccgggagcacggcggcggcggtcggttcacccccacgtgcgtggggacaatccgtgtgcgacgttctcgtcggccgggatcaccggttcacccccacgtgcgtggggagaattttgtggtgattgcttggagaagctggctgagcggttcacccccacgtgcgtggggacaatcaaatctccccttatggccgcccggcccacaccggttcacccccacgtgcgtggggacaatgaccgaaaactcccatccagcacactcagcacgcggttcacccccacgtgcgtggggacaatagatacggagcacccacaggcagagaaaccgtcggttcacccccacgtgcgtggggacaatctgtggatcgggcgggtaataacagtcgtggacggttcacccccacgtgcgtggggacaatagcagtcgccgtgtgtacatcgcttgcagtgccggttcacccccacgtgcgtggggacaatctgtgtctgcattaaaagaagtattgccatatcggttcacccccacgtgcgtggggacaataccacggcattgtatgccgggactgggcagacctcaagatgttgatacctggctcggcctacgcttgtctttgtaagccaccaaggcaatgccctcgaagtcttgcagttggcgagacgattcgccttcggaccggaagctgtagccctgcgggctggaatcagaccatatctgaaggacgtagccgcccttgcgcttcttcagggcgttctgccacagcttatcccgtattctggccgtcggacttccaaggaaaaccccagccttgggctcgatcagccagcgagatagctcgcccctcaagctcatcggcacgttctccaacatcatcacgagcatcgagcacctccgcaatatcaggcaagatacgccgtatcagcttggcctgtttgaacatgtctcgacaggccagtcgggttcgtctttcaacgtcgtccttggagccggatacggtctggaacgccagcggaatcgtgatctccgtcttgtacaggtcggccacatcgtagacgaagctcagcaccttgcctgtgtggatgaagccgatggcggggctgtaaccggcggacagaatcgcggcgtggcacaagctgtagaggcaagaattggcagacgacagcgcccgattcagcgggtcggcggtgtaccaactgctctgatcgtagtcgcgcccttcccacttcacgccgcaggttgccgccatttgctcgtaggtcttgcggacccgcgccccttccatccccctgagctgctggatggtcacatccgccgagactggagacgggaatcgcttcaggtacatccggcgtgcgacgagttcccgctgctgcggagaggcatacaattcggcctgccggagcagtcggtgggcgctgtgcgttcctcccgtgccgaaggcgtacatcttgacgccctcctcaccgacgaagcacatcaggcagttgttggccgccagcgccttggctgcttgctgggtgatcgacgtgcccggccccagcatgaccagggacaactggtctatcggaatgagcgttcgtccttcgccctgacgaaagaccaggccttctttgtccttgtccaggccgccgcgctccaggtagaggtgcgtccagcggtcctcgaacttcggcagttcgtgcagatcagccataggttctcctaagcgcgggcaatgcttagcagacccatccccagtcccttggccgggccaatgccagagcagagcgtctgaaaaaacttctgcgtatccgtcatttccagaatcccttcgtactggacagcaaagatcgcgattcgatgggcagatacgccatccgcattacacccatcggctattcgaccgggaaactctacctgaccggcgcgatggacaagagcccgaaaccgaacgccttggctggaccgattccgcattcgagcaactgcttcagcaccttcagattacctacccggaagctcccctcaaacagtacggaccaccactgcatgcgctggctgggctgcggttcgtgctttgaacgccatccgtaagcccaaccggtgacgaagttctccaaacagaccggggaatccgccgcatctcccaacttgcctttcaaccagtcggcgtgatcgaccagcgtcgggcaaatgcgtttgcggctgccgttcggcgatccgtcctgcactttccgcgttggattggcgcgcaggcggaaacgcaccagatcgccgggagcgattcgatgattctcctttgggctgccaattacaaacacatcgtcattctcaaggctcatggtgatccttctggtctgtggtggcgcggccaacaagaatccggcattgccaatcgggcgtccgccatcatccacggcatcttcattcaacccgaaggcatagtgccaatccggcggctcgttccccgccgactggacgatgatgaggggtcgtcggacgccccggctgtgatcgacagggtaatcgatgcggaagaggaatccggcctgatcgctacgggaatggtgcacgtccgctgtatccggctccccgggcaagttacgcagatggtccagtcctgtgccgctgtagggtgcgcagtacgctgcaaggcgttccttatgtgacaccgggaccttcgacggaaaggccatacacaagcgctggtgaactcgatacagatttcgcagccagcgccgggtgatgctccaatccgggcggtcagggttgtcaccaacattgatgagcaggtgggagtggtacatgattcagatatcctcttcttccaaagcctcgcggcgaatcttctcgggagcactgcgcagtgctcgccgccgggtttcctcgctgcggaaacggataatgtcggcgcgggtccggagaatgtcatcgcgccaccgcacgtcgcacgggtcaatccggtccaggcccatgcccatgccgtactcgatcatggtcacggcatcgtggcagagccggcagagagaccgcaggtcttcctgtgcctcattgcccccggcgcggcgataggtcacgtgctggacagtcgtggccggcgacttgcagaagacgcagaggccctgatcggattgtagacgctcagcacgatgcttcttgtactggtcgttattgtagtccgcgcggggacgaggtggtggcggcgtatgctgctggagcgcatcgccgaccgtgaccgtgacctgacctcgtcttaccaatcgcggatgatgcaccggcgggtcgaacgaaaagggtgtgtcgtaccagacctcggcgtcaggcggagctgtatccttgtcatttcttctgcgccactcgatcaggcagggcaactcaatgttctcgtagcgtttcccatgctgatcgcgcggggcatcgtcggcatatcgcggatgccacggcattatctggagcgcagcctcgatatcaccatcgaccgccattgggttggtccatgtctcatccttgcgcggctgggcgaataccggcatggacggtggacacgacttgcgaccgaggtacaacggccacttcggggatcgcaacgcttctgcgaccgtggcgatcaatatcgcatcgccctgcaaagcgaccagaaaactggcatcagccagatattccagtcgtttgatgaccgtaccctgcgcaccggtcttgagcccacctgccgctgtcgtcaagccaatacccgccccaacggtgtgatagtcccaccagcgagcgccgggccggtcgatccgtacacccatcgtaagcgtgttcaaggctggaagcttctcgcgcgcccccggtcgcgataaacccatggcgcagcaaatcagccccagcacacccgatttcgtcggcgagtccatgcttcgacgaatcacaaacttggatgtatcaccccacgcctggagcgggccttcgaaacgcaggaagatcgtccgagagtctgtcatagtctccctcccgccggcgccgtgcttcttttgccgacctcctccatgatagcggtcacgaagtccgggaactttccgaattccttcttctcgtccacaacggactgctcttgctcaggctccctcttgcttttgtcgatccatgtcaggcgatggcgtgagctcggggaaaaccagaagcgttcagccgagagggcatagccgtcgatgagatcatgtgcatactggccaaggcgcgcgatgctctcgccgatcagacctcgcacagacttctccggaaccgggtcggcaaaggcatttgcataacttacaggggtggcggtctcggccttgacctcaaccaagatgccgtcagggtagttgaacgcgccgtatgcgtgttgctttccagaggggttcgcctttgcggcgccttcgaggaagcacctgacggtcgtcgtggcaagctccacatcgccgccaagattcttgagcagctgctcccagtcgatgcagaaatgcttgtagaagcaggccgaattgaacatcgcctcgctgacgtgtcccgcccccgcgtcctggccgggaatgtcgtctgctgccgtgaagtaatccacctcgtttacgaccgcgtgagtggagatggcgtgtgctgcggacagtgcagcttcgacggtaaatttgcccttcagaccttcgaacgggcccttcgcatcaaactccgtcatgcgtccgcacaaggcgatgtccggcgtcttgacgaacttgccgatgacttcggcgaacttcttacctaaatcaccgttaccggcgctcacggcgacccccatttctttgatggctgatcgaggcaggaagaagaggatgtcaaaagtgttctcatccttcaggccgacaccgccctctttgaagacttcccggacggctttgaggtgttcttctttgggctcgttgccatcacggccggccgctttcgcaatctcctcaatcagtcggcgcgtgcgaaccccgccgtctttctccagtgccgctgcgaattccgggctgcgtcggatgcttcgtttgaggcattggctggaaatgcgcgcgcgggtgacgccgccgaagatgcacgtcttgggggcacccagatcgtcccggttgaggttcgacggactgtggttctgaatcatgtggatttcaatcagcatagtcgcctccttgtggttgaacagttgcgttcaggtactcgcacgcccacaggtcctgcggcgtgcggtgagtttcacggcaacgagcgagccgttggtgagcattcaaccggctcttctgccatgtgtcgtccatgttgaactccctgtcccagagcgacaggtcgtcgagcagcagcgcccagtcgatgccggtcacagtctccgcgtggaccacacgacccgcaactgccttggcaacctcgcgcaagccccactgtagtcgtggttcgatgtcagaaaggcttgagcaaatcacggcgtcgaatcgccggcgaaaggtattgcgggcgcggtaatccggcggatcgcacggttcgcatctgccaagcaccgccgggagtgataccccaacatccgattcaggccgaacatacggaaccgaggatgcacaatacagcttggcgatgagccatgagatttcacgccgcggagttcgcgcatttgtcgcacgcagcggccaccacaggccggtgaacagatcaaatcccgaaagcgtcttgtccagcggctggcccgccagccaacgcaggcgagaacgatcgccttctttgagattctccagtctgttgatgaattcaatggtcggggtcatagcgtagctcccttcttgcgacacgcgcctgacttccttgctcttgtcttcttgttgatgagcttctcaagttcggcgtacgcctcggtcatcgccacgcggcgctgaaacgaagaaccgcgagcagtggacgcaatgatcttctgtacgaccggcttgaacgttgagcggaggaagtccctgtcatcgcccgcgacattgcttttgtccaagatggcgcggattcggtcttctgtttctggtgcgagcaacgccaaggcagcgcggatttcaggatgctcgcgtttatgattcggtgtgagctgcttcaacaggtctagcaattcgtcgccaacatcgcctgaaagacgcacctgtgactcggcagacgtatcgggaatggaaagcgtcgttgcgtcttgatacacaaactggttgaccacggggcctatcgcaatgcgcttgcgtccctgctttcctgcggcggcacgaaacgccgacctccagaacctggcgtgcgcttcggcatcggcttccaagcggggaagcgcaagcgcctcattcttcgacaccagaagctggggatccgatccccagaacttcttctgccggaggtcttcttgtccgattgccgcttcttcctttttgttcggcttcttaacgaggtcctggaacatcttctcgtttgtcttcaagacatcatcaagggcgttcgctatcgattccgcgagttgttctcttggtaagcctgcgtcaagtgttcctcgcagtttgtcactgcatgccttctgcaactcggccagtctgcagttgaggatgatccacgcggctttcacctccttctttgtcttggaatcctttgcattatgccccaggttcttgagatgttgctccacgcgtttggcgaacgcctgactttccgttagaggtgttgcccagcccgcagcaaacgcgagcgttgacctgccctacggatggtgggcgcggggcgagcttgatagactgggctgccatagacacgaaaggaactatctatggcagacaagagtacacgaccgaaacgctacagtgaggagttccggctccaggccgccaagctcatcgtcgagggcgggaccacctaccaccaggcctc

SEQ ID NO: 548 - DNA, 30703 bp, Artificial Sequence
  Synthetic Oligonucleotide
actcagcggttcacccccacgcgcgtggggacaatgagacgaaggcgaacgtttccgccgcgccggccggttcacccccacgcgcgtggggacaatggatgccgccgcgtgttcctgtaacccgagtacggttcacccccacgcgcgtggggacaatccaagatgagccatcgtcatacctgaccaccgcggttcacccccacgcgcgtggggacaatgtcccatatcgacatggacattgccaagtggccggttcacccccacgcgcgtggggacaatactgaaaaagttgttgattctacggcactcgaaccagaaaaaggccctcgaagtcttcgatggagcgtgccgtccgaccccaagtccggacattatacccctgctcattgtccgaggaatggataataaggcaccctccatcgcgagcttgggaacacgctttttcccaaaggcgttcacggacggcggcggagacgcggccgacaaagactcccgcctgcggttccaggaaccatcttgttagctcgccgcgcaatcccggggggacgcgctcaagaatcaggaccaccatcgtcaggctccgaatcgtcaatttccaagggctgcacgcgccctccacgaacgtcaccctgcgcagggtcccagaggaagccgggggcggcggcatcctggtcaaagggggcagcggcgcccgccctcggcttgggcatcatcaagaccgtctggatatcggggataatcctctccagaaggcgcgtggagacgaattggtcgcgacaagtgaggcgcacgtgccgctccagcagccctttgggttgggcgacggcgcgaaaggcaatggggacggtgacctccgtcttatagaggtcggcaatgtcataaacgaaagacaacattttgccggtatggatgaatcccagcgcgggtgaaaagcccgccgagacaatggcggcatggcagatcccatacaggcaggagttggcggtggacaaggcccggttcaccggatcggccttgctccactcgtctcgttgataacttcggccggaccaggtgacgccggtctccttggcgatgcgcgcatagctatcgcgcacgcgtactccctccatgccgcggatttgctggaggctgagcgtggaatcgaacttctcggaaaaccgcaactggtacatgcgacggaccacctccatgcggtaaccggtgtgcgcccacacccgcgcctgatgcaggaaattggcggcgctgcgcgtttcgcccatgcccagggcgtagaagcgcactccctcttccccgcaccacgccaccagacagccatggtccgccagcacggagacggcggcgtgagtgatcgagacgccaggacccaacatcaggagagcgagattggcgcaggggaccggcaccctgccgcttttgtcatgcaccgcaatggcacggtcctcctgatcgacgccgcagtgctcgacgtacagataactccatccgtcgccgaacttgggtagtatgtggagatcttggattctcacgttgcctccacaggcgtgctgctcgtaacgccggcttccagccggcaccggtgccgccaggatggcggcgttacgctgcgtcgatccccgatcgacgggcgtaggggcggttcgcgaaccgcccctacgagattgctgcggctggcccggtatagggcgccaccgaaagcagcccaaagccaaaggctttgcctggcccgatgccgcgcagaagcgtattgcggaatttatcggcgtccgttacctccagaatgccgtcgtagcgaaccgagcgcagccgctgcccgccctcctcccgccccttattcacataaatgtagcctgcgtgaacggtggtggaatccttgtcgatgcagaaccccggcggttcatccgggcgaacccgccattccgccagccaaggcaggagttgatcggcgggcacgggcacccgctttccaacccacttctccgccaccggttttccgtcccgctcacgagaatgctgcgatagtttccgcgtgggatttgccgccaaccggaagcgaagcctctggcccgccgcaaaacccggttcgtacacttttacttcggcgggagcggccagcagaaacccggcattttgaaaggcataatcccagtcgggtttcaccgccgattgcaccagaatcacggctcgcccggcggggcccgggtcgatgcggaagagaaaaccggagtcatccgcacgcgctatgtgcacctgacccttgccgaaatcccctgggtcgaaaggtttgaggaaatccgcgtcatcggattttctggatgcagacggaaaagccatgcaaaggcgttggtgaacatgataaagattgcgcaaccacgtgcgcccgggacgggggcggtcaggattggtgccggtgtcaatcaggagacaggaaaggaacatggctattccacctcctcggcaacgagatgtctgcgccgggtttcgagagaacggaatttaataatctcctctcgcttttcgcggatcaaatcgcgccagcgcggctcctcgggattaatccggtcaagccccatgcccagaccgtattcgatcatggtcacggcgtcatggcagtaacggcagagggagcgcaactcctcgatgtgttcactaccccccgcgtggcgataggtgatgtgttggacagtcgtggcgggcgccttgcagaagacgcacaggtgataatcgccgtccagccgctccttgcgtcgatttctgtactcggtgttggtgtaatccgctctcggacggggaggcgctggcgtctcgttctgtgctggcggacctgtggttacctcaccgtcgggccatactcgcaggtgcttgcgaatgacaaatcggggctggtgcgacggcggatcgaaggtcagcggcacgtcgtaccagacgagcgcatcatcgggggcctccggctgttcttctgtcggctgccagtcgagcaagcattccaatctttggggcagatcgtctccctccaaccgtttgcgccagggaaccgacttgagggcggaaaggaggtcgtcgaattcacggggcgaatgcttcggatccagtagagggcgcgaaggagggcaggactttctgccgaggtagagcgtccacctgggcgctttgattgccccttccagttcagcaatcagacctagctcaccctgaagagcgacaagaaaggaagcatcacacagatactcgcgccgggtgagcatggcgccgggcttagttccgccttccgccgtccgcatcggcatcccggcgcctactgtgtgataatcccaccaccggactccaggaacatcaatgcgcacgcccatgcgtaacgccccgagagcgcggaggcggctctcggcggcctcaggccgcgaaactcccaatgccgcgcagagcatcccgatcacaccagacttcgtcggggcctcagccgtccgccgaatgacaaacttcgattgctgatcgccccatgcttgaaggggaccttcaagacggagaaacagggtgtttgcgctcatcatgccacctccgaattcaccaccaccttctgaacctcctcccagtcatagccagtttccttgacgaccgcccggattaacgcgttgagcgaccttatgttgttatccgtaagcgcgacctcctggactttttcctttccgttttccttttccttgaaggaggccgtcaaagggtagcggagattgggcgagaaccagaaccggctcttcggcccgccgtatccattgtcgatatcgtgaacgtactggccgagttgcgcgatgctctgggagatgatgtctcgttggtcgtcggtcactggtttggcaaaggcgttggcgtagctgagcggattgttcctgatttccaccaggattccatcgggaggattgtgggcggcgaagctgttctgcttgccggtgggatttgacagggccgcgccgcgaatgaatgcacccaccgtgtgcgcggcgagtacctggttgcccttgaggttcttcttcagggtctcgaaatcgatggaaaaatacttgtagaagcaggcggcgccaaacatagcttcacccaccaagcccgcacccgcatcatcaccgggcacgtcatcggccgccacgaagtaatccacctccggacgagcctcgtgggtggaaatcgcgtgggcaacctgaagcgccgcctcgaccgttgtgtctttcagcactccggtttccagcatccttccgctgagcgccatgtcgggcacgcaggtggattcactgatcagcttgccaaattcttccgccaactcctcatccttctttccctcaccatcctggagaagtttggccatcttcacaattgcttcctgcgtcgtataaacaagcatgtcacttttggcatcatcttcgctgcgcggcttgatgccgcacttttccagaatcttcgctgcccgctttttcgcggcgggtttcccggttactttttccgaaatcttttcggccaatttgcgggtgcggatacccccaagcaactctttgaacccttcgctcatgcggatgctgcgcttcagacactgactggaaatgcgggagcgcaggaccccgccgaaatagcaggttttgggcgcgcccaagtcgtcccggttcaggttggctgggctgtgattttgaatggcatgaatttcaatcagcataacgatcctccttcgaagtttttagaaactcctcggcccatttgatccgctttgattcgcgttcccatagcgagagatcatcggttaactctgcccagtcgaacttgaggctcttccgagacagaaggctaatggcccattgcaaggaaggctcaaggttctcaatgggtaaggtcaataatttgtcgaaccgttgcgtaaccggatcctttgcggggtcccgatctttccgacaacgcccaagctgataagcgatggctgggccgcgtgaatgttcgacgggctggaaggcgtaaagcttggcgaccagccatgccaccccgcggcgaggggcgcgctggttttgcgcgcgcaaaggccaccacagtccggcaaacaggtcaaacccctctaccgattgatcaagcctccgcccggcatgttggcgtaagagcccgagttcaccagatttcaggcgtgccaggacttggatgtattgctccgtcgctgtcacttgatcctcctttcctccggcgggtcttttccgccgcttcagtcttttcccgcatgtcaggcttcacgtatccaagctgtctccgccgcaaaagcgcagcggtcgtaacgccgggtgacagcgatttggcgacagccgccatcatcggactatattcgcgggctgcctcttcccatgcgcctccccaagcagagatcaactctcccgccttccccgaaacccgtgcttccacgtgcggacgaatagcatcgaaaatgggaggaatctcgacgtgctttcgagaagcctctctcggtgttgccttgcgagtgagcttccaacattctttctgccacctttcaatgttttcgaggctctcttggaccttccccccttccagcgtgtccggaaagggaatctcacattccatcgcttctatatatttgtcgttttgaactgtcgaaaaggcgacgacccacagacttcgtttgggatgtcctttcttggcattaagaatacccgcagcaatatttgtccattggccagccgccgcgtccgcgcgagcaagcgcactgctgggcttaacgatatcttcgccgtcactgatagtgtgcggatcggcccacactcggcccttgccatctccgtcggtctttgtgctcccaacgccagcaaacacgcagcggcgtatcagaagctctttacgcccgcaggatacgcagatggcctgaggttcttgcggattgtccaaccacacgcggcgcggcagccacgttagccccattagaagtggaacagtaccctgttttggtagggttgcatccggcctctcccatacgggcgtccccaggtccgcgcccgataactttcgccaggaaagtcgcagggtctcagcgagtgaggcgccaactggtatgacatacacgggcggtttttggttgatacccggcggtttgccgcgccctcccgatgtggcaaacaccggcaggcgcaacaaacccatggcgcagcaatccgcgcacaatccgtctttcatgtctgtcgaatgccggaagtgccaggagttggtaccagtgggcacctcttgcacaagatagtcggcggagagttttgcctctgttccactggcaatgtgttgatagaaccgcttcccgtcgcccagaaggttgaaacagtccctgttgtcgcctagcttcttgaaccaatctgcgggaaagaaggaagccgtgtcctggccatccggcgggctcccctggcaccaataaagcaatgcgaggagaaaacgcagaatcgccacgcggtccatgggattgctggcggcgatttgacgtattcggtgcgcttgagtcagcgcctcaattatgcccacgcggtcgcaacgcccatctttccacaaaacgggaatccacttttcatcgagcaggttatagtccacggcttcctccttgcctgggcaaaaggcgggtggcaggcccgtcgcgctgctggcgatccggccgtccgctggatactaacaaaggataaacgtgacgaaggtatacacccagcacaggggaaatgcaaggcccggaccggatactctggctttctggaagagggaaagttgtaacgggcggcgcaggcctgtttcgggggtctgcggtccgtcccccatcgacaacaaaactccgcggagctacagaacaggtccgcactacgcttgctttccgccttctgattccccttagccgccccgctgctcggcggtttgccgctacaactcgtggcggacccggcgtatactttcgctactatggcccaattcaatgagcaagaatcgaacgtggcgaggcattacgacgtggccttcgaggcggaactcgcgcggttgccgcaagactgccccgtggagctgggaataacgctccgctggctcgcgcgcgtggcgaagccaggggacgttgtcgcggagatcggcgtggggggcggccattacacggaatttctggcgcgcctggggtgccgcctgcaccttgtggacatctccgcgcgcttgctggacgcagtcgcagataagctgcagaaagccggcttgcatgaccgcattgccggccgccatcacctctccggcgcgcggctggaagggctgccctccgcgagcgtcgacctggcgctcctgatgggaccgctctatcacctgcaatccctcgctgaacgccagggcagcgtgcaggagtcagcccgaattcttaaaccgggtggcacgcttttcgccgcgggcatcaatcgcctgtcgtacctgcgcgatctgctgcgtatgaagtttggagccgcctccgagcgcgtgaccttccaccagcaatacctgcgcgacgggaatctggaccctgagcacgcgccgcccatcggctacgcgcacttgaccaccgccgcggaattccgggcgctcttccagggccaattcgagaaggtggcgttcctgggcgttgagtcctttaccacggcgtggcagaacatcttcggcgaccttcccgcggcagagcaggaactgtggctggaccttgtggaagcaaccgcacagacgccggagggcatcggccagtcggaccattttcttttcgtgggaaggaagtaggcctggcgctgaccttgaggtcggcacgtgctgacctgaaggtcagcgttacgacaacggtgtacaataggtcacatgcgaatctacacgctttgcctcttgccgctgcttcttgccggcggctttgctcaggattctacggtcgcgttgaaggttgacgccaccgacgcgccgcgccgcctttttcacgtgcaaatgaaaatgccggtcaaatccggtccgctcaccctgctttatccgaaatggattccgggcgagcatatgccggttggccccatcaccaacctggtgggcctgaagttcacggccgccggccagcccgttccctggcagcgcgacaacgtcaacatgttcgccttccacctggacgtgccgccgggcgcgagttcactcgacattgcctttgattacatctcggccgtggacgaagatctgttctcttccagcggcagttccgtgaccagcgaattggcggtgctcaattggaaccagacggtgctgtatccgcaaggctccaatccggaccgcatccagtatcaggcaacgctcagagttcccgccggctggcgctatggaacggcgctgcccgtggcacgggaatccggcaatgaggttgagtttcaacccgtctccctcaccacgctggtcgattcgccggtttccaccggcattcactaccgcacttttgacctggggaatgacggcggggtggcgcatttcattcacctcgccggcgatagcgagcgcgccctcgaggtgagcccggacaccgttgcgcattggaaaaatctggtggcggaaaccggcgcgctgttcggctcccggcactatcgcagctatcattttctactgaccctcagcgaccacatcatccgcattggcattgaacatcacgaatcgagcgacgatcgcgatcacgagcgcaccttgattgaccccgacttgctgaaagtggatggctcgctgctcccgcacgaaatgacccattcctggaacggcaaataccgccgtccggagggtctggccacgggtgggttcgatgcgcccatgaagggcgatctgctgtgggtatacgaggggctgaccaactatctcggcgaggtgctggccgcgcgcagtggattgtggagcccggaggactatcgggattcccttgccatgaccgccgcccaactcgaccgcgagtcgggccggacctggcgtcccctggaggacaccgccgtcgccgcgcaacttctttatgccgcgccggacgaatatacagactatcggcggtcggtggactactatcccgagggttcgctgatttggctggaagccgacgtcaccattcgccgcctcagccagggggcaaaatccctcaacgacttttgccgggcgttttacggtggcccgggtggcgcacccgcgctgaagccctataatttcgacgacttgatcgccgctctcaacgccgtgcagccttacgattgggccggattttttcagacgcgtctgcgctccaccgctcgccacgcgcctctgggcggcatcaatgacgggggctggaagcttgtttacaacggcacgcgatctgatttgtggaaggcttccgaggagtgggcagacgccatcgacctcagttactccatcggtttgagagtgaagggaaacggcgccatcaaggatgtgtccatgaacggaccctccgcccaggcaggcgttgcgccgggcatgaatttgatcgccgtaaacgggcgcgaattcaatcccacaaccctgcgggaagcggtgcagcagaccgccacgtccaccacgccgctggagctgctgctcaagacgggcgtgtattacaaaactttccgagtggattatcacggcggcgaacggtatccacatttggaacgcgatcaggccgcgcctgatttgctctcactcatttcagcgccactggcgaagaaatgatggtgacgccctagtgctcgatgcagaggtcatagtttgctttgacctctgcatcacacttcagaggtccctcattttcaatgaaggggatccccgcttcctgaaggcgaaagcggttggagcggagatcgccgaaggctatctgaaagggaacgtgggagcggagatcagccagacttgcggcggtctcgcgagtggcgctcaggttggcgcggaaattaaccacggcgatcccggccacattcacaccgaggatgagcaacaccagccaggaaagacgatgcaagttcggtctctcaacgggcccgccgagagccgccagcgccaccaggggcaccaaccacacctgcggggcatagcgggcccaccagcaaggctgaacgggtaataccgaagcaataattatcagaatgattgccgttgcgacccagggcacggcgccaccccgccataaacgaatcgccaggaacaccaaagacaaaaccagcgctgcggggaagagagggccgaaccctccggcgcgcacatcgggctcctgaaattccatccattcgccgcgggcaacctgccacggagctttgggcgtggactccggcggccagacgctcgatcgcgagaaaatcgacgacgcgaggttcgcaacccggttggcttggaagaaccgcggaggagtatcatttgccacgctgaaattcgcatgatctcctcttccgaaaaagggatagaacgggtggccattctccagggtattgaacacgtagggattcatcccgaaaacggccgtccccagccccagggccagcaaagccacatataaaggcttccgccagggccgcttctgccaggccaggagagcaaagaatccggcaaagagaatcgtggcatacaccggacccgtgaacttgacctgtatgatcaagacggcggccgcaaacagcaaccagttcacccagggattgccacgggaagcgatcagaaaacaaagagctgccaggcagacgaaaagcgacgccacttgcccatccacatagaaagtgcacagttgacagagcgccaccgggttcgccgccaccagcaaggccacggccaccggccaggcactcagcttttttcgcgagccggcgaaggccgccagcgccatgcaaaaagcggcgcaaataaggagcaggttggcgaacttgccggtttcgatacgtcccgttataagatacatcgacgctgctattatccaggaccctttggggtagtgattcaagatggcgttttggaagacagccaccgggctgatgtggcgcgtgaagagcggattccacccgtgggcaagctggtaagcgccttcctggtggtatgcctggccgtcaaaagaaacatcgtagaacgccccgctgatgcccgcggaggcagccaccagcaagaccagcagggcggccaacgccagggtcacgcggaaagggcggcggaagtagattcgtgctccccacccggtcaccccacatgaccccaccagggcggcgggcaacaccaacccatgaatgggcaatcccagtgcccagccgaattctgaaatggccacaatcagaaagagaaacgtcaggatcgccccgccgagcaggctggcgaacgccggaatcgaggattgcggttcttccgtaggcaagctcacgggcgggcctcgctagactttggagtgagtgacgcggacggagggcatgccatcgggctcatccacaagctcgatatcctggaaaatattgggcgattccttcttgaagacgcggaaaacctcaaccgccagcaagcggatttccgtgtcggcgtggatgctgccgcgcagctcgaggaaatgccgccaggcgcgggaatttcccgtcacgaaaatcttggtttcggtggcattgggaagaatggagcgggctgcctggcgcgcccacttgcgccggtcgcggggggccatttccggatgcttctgctgcacgtattgcgccgtggcttcggcgagttcatcatacgcctggcgcagcgattcgatggtctgctgccatttcgcccgcaactcgggattctcctgatagagcggcggcaccacgtagcgcgcgtcgctctcatccacgtagcgttgggaaagttgcgaatatccgaagccggcgcggtggcgcaccagttcatgggtgagggcgcggctgacgcccgtgaagagcaggcaccacacggcgtgctccagcacgctgccgtgtttggaaaccaggatgttctccaggtactcgcgattgctctttcttcccttgccaaacgacatgtagcaaacacgcccggcgatttccgccagggcctcggcggccgcgggggcgtcggtggagaacaccatcccctcatccgccaggaagcgcgccagttcgttgtcggcgacgtgctggcgtcccagcagataaactttgggcttgtcgatgtagggatcgaggggtggaggtgttgccatccggctcccgttaagccaatttgtttagtgccctgctgcgagtattgcgcctggaagacgcattggcctgtagcgctgaccttcaggtcggcacatattgagctcaagctcagcgccacaacagcccactaagccttcgtgccgaccgccgcaggcgtagctttcttaaagccggcatacttccgctggaagcgttccacgcgcccggcggcgtctacaagcttctgcttgcccgtaaagaaaggatggcacttggagcagatgtccaggtgcaggaggtcgctcttgaaagtcgagcgcgtcttgaaagcgttgccacacgcgcagaccacattgacctcatggtagttcgggtgaatcttgtccttcataagactccttatttgcctcaagagcaatcctatattgtaacggcatcaccggaaactttcaattcgtcttttgtggggagttgggtcagatgggcggctgggcgcttaattctgcggagagttgccgccgcccgcaagcgccaatgccgagtaatccatggtgattttaaggctaatctgctggtcatgggcgtcgacattcatggcggtgtaggggttcgcttgaccgggattctgcaattgccaggcaacctgttgcgccaccttgatgccatccaagacctgccgcagggtggccgcgtccgacgctgtggcgcagttgagtttcagatccatgttgaccttgtccgacaattcaatggaataggtcaaggaatccactttctggaaaacctgtccccaatccaacttcaggttgttttgatttgacaaccatgcgccaaaccaatcgccgacggctccccccaaggcgattccccaaatgggcgcgcccttgttaacgctgccgatcaggctggtgaaatgtgggtcggtattcaagctgggcgcctgtccggcgtgcgcgtccagcatcgccgtcacggacgagagcggcccgaacgctccgagggaatcctccagaatgacaacgcacgtagccgccaagccggctcgcaggcagtaggcctgctctccggcaaggggagtgggcgtgaggttctgcgccgccgcccggcccgccacccccgccttgtcaaagcgtccggaggcataaccgtaaagatccatttccttcgcgcccggtttccatcctgtcagcaagtcatcgatatcgtcctcgctcattccgatctggccgagcgccgactccaactgctgcaagcgcggccccaggaatctactcttaaggttctggtaatcagggatggcgcgcaacttggcagggctggaatactccacccgcagggtctccgcagggagcccggacatggccgtggtcacgaaatcctgcccggcgactttttggggaacccccgccaacacccacaccacccatagcgcgagaaggggtcgtctcatattcacctcataacggagaaagcgcggcgcacacccgaattgtagggcggaaagccgagtgcctagagctcgaagttaagcgcggtcgatactgccgccggctagatcccgccgcctgcaagcgtaaagctacaaccctcggtggaaccagcgataccagggctggttagaaaagcagcgctgttagcggtataccagttcactatggctgcggactgagacgaaagagttgaacccgtaacgctgtccatgctactaacggtccagctagtggggtacatgcccggattggtgatgggttgcgccgtcgtgactaagagggtacttaaaagaccgctcgagtcagcattagccgtccaggtcccggtggaggtgtggctagccccgttgggatcgatgaaattagccttgaatcctgcgtcgctgtaagtaagttcgaaggcaaattggttcataggcacaataccgccagctacttgacaattgtcgactaaaacccagtgagaacttgccgtcgcgagagtgagaccgttggtaataggcagaatcaggttgcttgcttgggccacgatcagcgtgaaggtctggaccgcggatgtgccgacgccattggaagccgtgaacgtcacggagaacgtaccgctggtggtgggcgtgccactcagcgtgcctgtcccgttggaattgtcatgccaggtaaatgtcgcgggtgccccggtctccgtgatggtcgggatgggagttcccgtggtggtcacggtgaatgagccccccgtccccacgctaaacacggcactgtcggcgctggttatggtcggagccggagaagtggggggcaatttggtgctgccacccgcgccgcaggccaccagaaaaagtcccatgatcaccaggaaggcaattataagaaggcaccgagcgttgctagcaagcctcttcataagaagttctccttatgttttcagattaactcactgtcagcataagtgcaacactatggctcaaggcagaagatcctgcgccggcagttcccgtcaccgtcagcgtggaggttccaacgggggttacggggttagacggggtcggcgtaacgttgctggtcccacctccgccacctccactgccacatcctgccagcgccagagccagcaacaatcccaaagcgagcgggagcatggcggaccgccatgggctcgagccgggttggttccggcgatgaatggcccatgccattatccctagaaccaaggcaagcatcaacagaaccctaaggcccggcggcaggggcggaacctggggaaggggcccggagcgcggcgcactcagcgaaggcgcggtggtggaaaccgtgacggtgatattggtcgcagagttcgccgctgttgccgtgaccggccaaaccgtgcaggttgctccggcgggagctcctgtgcaggcgaaggtcaccgccccggtgaatccccctataccactcatacttaaagtgtaagtcgcaggctggccgggcgcaacggtagccgaggtggaagaaccggatggtggccccagggcgaagtccgggaccgtgccgatcagtgccacggtctgagggctgttgtacgcattgtcgctgaactgcaggctgcccgacgacatgcctcgggccgtcggcgtaaacgtgatcgccaccgtgcaggtcgcggtggcggcgacgggggcggaggtcgagcaggtggtcccggagctgacgatggcaaaggggccggtgaccgcaatcgcgctgaaagtcaggctgctgttgcccgtgttagtgagtgtgacagtctgggaactggtcgtgacgcctatagatggagccgagaaaggtagcggggaggacaagctaacctcgggcccagtaccggttccgctcaagctgacggtctgcggactgctgttggcgttgtcgatgagcgtaaggctgccggagcgcgcgccgtcggccgtgggcgtgaacgtcacatcaagcacgcaactcccgccgccggcggcaaccggtgccgtggtgctgcaggtggtgccgctggccgccacggcaaagtctcctgtcaccacaatgttcgtgaaagtcaggggagccgtgccgttgtccgttaccgtcaccgcgccggctgggctcgtagtctccagcgcttgactgccaaagctgacacttgaagtgctcaggtcggcagtgggggcagtgccggtgccgctcaaatccaccacttgaggactgctgccggcgttgtcggtgagcgtgaggttgcccgagcggccgcccgtagccgagggcgtgaacgtcacattgatcacgcaattactatcgccggcaagcggcgcactggtgctgcaggtggtgccgcccgctgccgcaaagtcccccgtcaccgcaatgcccgtgaaggtcaaaggcgccgtgccggtgttgctcaccgtcactgggctggccccgctggtggtccctacgggttgattgcccagcgacaggctgggcggggtgacgctggccatgggaaactggattaatactgagacgttgttcgagcccccgttggcggtggccagaccgagcctgccatctccattgaagttccccgccgcaactcccatgggctgggctcccgtggccggggatgaggcggcgggcgtaaacgtgccatcgccattgcccagtaagagggtcaccgtgctgtcggtttgattcgtcaccgccaagtccaatttcccatccccgttgaagtcccccaccgcaattccaaaaggcaaagatccagtggccggagacgcagcgctgggcgtgaacgtgccatcaccatttcccaacaagatcgtcacggtgttgctgccggaattcaccaccgccaagtccaacttcccgtccccgttgaagtcccccaccgcaattccagaaggcgaagatcctgtggcgggagacgtagcggcgggcgtgaaggtgccatcgccattacccagtaagagggtcaccgtgctgtcggtttgattcgtcaccgccaagtccaatttcccatccccgttgaagtcccccaccgcaattccaaaaggcaaagatccagtggccggagacgcagcgctgggcgtgaacgtgccatcaccatttcccaacaagatcgtcacggtgttgctgccggaattcgccaccgccaggtccaacttcccatccccgttgaagtctcccaccgccagttcgtgaggcgtggttccagcggccggagatgcggaggggggtgtgaatgtgccgtcgccatttcccagtaagatggtcacgctgttgctgccaggattcgccaccgccaagtccaattttccatccccgttgaagtccccgaccacgagtccataaggcgtggcgcccgcggccggagatgcggaggtgggcgtgaaggtgctatcgccgtttcccagtaagatcttcaagttgttgctgcctttattcgccaccgccaaatccaatttcccatccccgttgaagtcccccaccgcaattgatacaggatccgttcccgccgctaggggcgagccgctcgccttggtgaaagctgccgtcggggtgggagccgtaaccaagaacggaatcatgttcgaagtcacgaccgaaccgggattgcccacggtaatccaagccgtaccgatcaaggcgatgtttgccgccggcacagtggccgtaagctgttgactactcacaaaagtcgtcgccagcgctgtgccattccaattaatcgtggcgccgttgacaaagcccgtgccgttgacggtgaaagtgaatccctgcccgccgggggtgacgctggtgggcacgaggggttggttgatgacgggcacggcacttgcgccaatgccggtcaaggcgaccgtttgcgggctgttcagggcattgtccgtaatcgtgagggtggcgcttctgcttcccggcgccccaggtgtgaagataacattgatggcgcagaggcttccggccggcacggatgatccgcagttgttggtctgggcaaagtcaccactgttggtccccgtgatggcaatgctgacgctcaaagggacgttgccgccgttggacagcgtcacgggttgcgcggggctgctggtgccaggaatttgctctgggaaggtgagggaagagggcgacaaacccacgccggcccccaatccggttccggtcaaaagcaccttctgcgggctgtgaggggcaatgtccgtgatattcagcgaggcgctaaagctcccctccgccgacggagtaaaggtcacgctgaccgtgcaggtgccgctggcagtgagcgtggctcccgtgcaggtgtcggcgctaatggcaaagtcgctggcgttcgtaccgctaatagcgtcgcttaagatgacgaggttggcggtcccggcattgctcaccgtcacgctcagcggggtgctgctttcatcgatcggcaggggtggaaatgagaggctgagcggggacaaggacgccgaggcggaagtagtgaagctggctaccaggttcgagacattgaccgtcccgatcccggtggtgaagtcccacccggtcgcagcgtcgaacgcgcgtagatagtaggtgctggtgttgtccgtcatggcagcgcacgttccgcccgttcccccacctccgctgagaacgcagtggggcaggctggtgtagccgctgccgggggcggtaagactggccgcgattcccgtgacttcggtggcggtgcaggttgcgcctgtcccgccgccgccgccgagcgtgcaggcggggttggaggtgtagccgctcccaaaattggtgacagccaattcgcaaacctcgtaattagcacatatcatcgccgcacaggtcgcacccgttcctcctccgcccgacagggtgcaggtgggctctgtcgtataaccgaacccgccgttggtgagatcaatcgtcgcaaccacgccggtaacgctggcgctgcaggctgcccctgatcccccgcccccgctcagggtgcaggtaggagcgctggtgtagccgctcccgaggttggttgccgacaccgaactcagggtctggggggcggtggaaagcgctccataggtgcccgagggcgcataacaatttatccctgagcaaggcacgtcgctatcgccccccgtgcccgttcctccgtggacaagcggaatctgggttacgtcgtagaagatacaattgctgcccaccgcgttgccgcgagcggatttacaggacgtgctgccaacggagccgtactcctccgccgccagctcgtaataggcaggattggggttgccccaccggctcccggaagcctgattgacgagcgcctgaatccccgccatgatcggtgcggcaaacgatgtcccgccacccccgttccacccgctgggagcgccgctgcaactcttgccattgttgttgggatcagaaaagcattccacgtagaagtgcccccagattccgttggcagcgaagagggaaacatcgggaatgtcgcgcacgccgtcgctgggattgcccatcaaccccgactgccacgagggcttggcatatcccgcacaggtgccacccaccacgccggggatatcgggcgcgccggtggcgcaagcgctgggcccgccgctacccgctgcggtgttgaggaggccgtaggcgttaagatcggaggtattattgcaaagtccgccggcgccaaaggtgggctcgactcccaggaaatcagcgaacagcacgctggcgcaagagctgttccagggaatctcaggaatatacgaaagggccgacccgtagttggtggcattgttggtagagttccaatagatgtcgttggcgccttgataagtatcggcaaagtcggtgccgcccaccgatacgtcgtagggtgtggaggtgtacccactgacattgattccgtattcggcataaggatcttggtcgtcggaactggccgcgcctgagtcgcccgagctcacgaagacggtgacgccctccgttaccgcctgctgatacagcgagctaacagactgattattggcagcgcccagcgctgattcggattcaccgtagctgatgctgatgatcgccggcggcgtgccgctggcgttaagaatgttctggagggcaataaaaccgccgaagttggtttctgtgtccgagcaggatgccagctcgatagccgcgctgggagcccccgcgctcgcccattccacatccaaggtcgcctcttcatcggcaccgttgacgccgggatcagcacagttattcaaggaaccactgggggggtggacctgcgtcatggtgccaagagggtacgctgaggcaatgcccagaacggagcggaaagtataccagtcatccgtggagtaaacatcggtatcctctatcactacaatcgtttggccctggcccgaatagcccgccgcaaagaccgggttgaagttgtagatcatccacaagtccgccggcacaatctcgtggtagacagtgccatcaaaagtgaaagtataattaggccgcggcacaaacgtcgggtgaggccggaagtcattcagggaaacgacgcccgccaccgtggaggccaggtcggccggaatctgcgggtcgctcatattggcgatgtgcggatggcccttcaccaacaagttatgaatctccgtgtggaaggcttggcgaatctggcctgccgagccagtgaaatcaacaaccatttgattgggatagaccaggttgaccttgaacccctgcgactcgagccaagccgtcagtctggcgacgtcagccggagccacaccgtacctctgcccgaattcctccgccgtgatccaatggtgaaaaagcggcgacgcgggatcgtggatatcacggatgaattgttgcagtgcttgctcccgctccggagtccgctgcaactgcagcatcatgtggttgagcgtcaggccatcggagactcgcccgcgatcgttagctgcattcgcttccggacgagtgttgccccgcagggtaaccagtgtgtcttgtcccccctccggcgcggaaagcgtgcttgcctgcgggccggcgctcaccgggccagccagtgcggccgccagcttgcgtccagcaagtttgggctgaagcctcgtgggcgcgaactgaaccccacgagtaggaagaagattctccgcggcttgtaccggctgaagaacaccaagtcctataatggcaagaaataaaacgccaacacatccgcagcaaagcacggtgcgcttatttgcagtatgcgattgcctggtaacactgacgggtagaagcatggagaaccctccactggggcaaaaatccgcattaatgcgtcaaatctatatcctacacgactgaatgtcaacttataaattctataattgactatatgtcagttttaataatggcgcacagagtgaccgtcgcttgatgaaaatgagcgagccacctcctcgcctggggtgcaaaaactaagaacccaaggcggcatttggaacgctcaatactgcttcacggccaccacttgatcgccgtcgaaggtgacgaaaagcacgtggggaggggttccgtatatccaattttcctgctctgcgccgttgcgaacctcgcgcacgcgccggtccggggtgcctttagccgaaagcactgcgtcgcggtccattcccacgatgacgttgtggttcttgatggcctccttgacctcgggggggagattcggcgagtacaacaccgtgggcgagtgacgctcgaaatcgagaacgcccgacagaattgttttcaactgagggacggtaaggtcgggaagggccttgccaaaatccactgtgatggaggacccgaaggcggtggccggcgtttcttgcgaaccaatgggggtggttgcccccccgacgccgatctcgatgtgctggtaccacttcttcccagaccttccgcccccgttgagctcgaaaacaatctggttcgacttgaattggatcttggtgatagccgcgggcgtgcccgctttcatggccataccgttgttgtgcatttccttttgcgcgtcttcctggtccagctttccctgcgcatcgatgcgcacgccccttttccccagaggcaggggaaccttggtcaccgccagctctcgcaggaggccgcggaggatctcaatgcgggttttggaatccatgccttccctggcgagtcccaacggaatgatgaggaaagcaagggccacccacaagctccgcccgagcctgcttcgggtggatttcttggagcgggcatgggtctcaaaaccgcaggcggacatgggaatcaatctcttttcgcctctccctcgggaggagctgagaggattgtgagcggcggctggggccagcttgacgtcaccggagcaaaaaccagggccttcatttccgcactcgtatagatgcttttcgcgtacgacacgtacatggttccgagcaagattactcccgtcaccagcaagccgccttccgggccatactcgccgccagtcagccaaatggaaccctgcacctgcgcgctaagaaggctggagggaacgttaatgccgctgacgggaaggcccaggaaaaagcccatgaggaaattccaaatgaaatgcatcccgatgggcatccacagggagcgcgtccgcaaataggcaatggcgaaggggatgcccaccagcccggtgttgagggtggagatccacgtccggtgcgggttgccaagatggacaagaccgaacaaagcggaagttacggcgatggcccccacgggagtaatggactccatcaagcgctgaaaggggtacccgcgaaaaagggcttcctccaagggcgccgccacggcaaacaacataaaggtgagggatcctgcccgcagcatggggtgtggcgcaaaggtgaaatgagcgaaaccgcaaacccactccagcacgaccgcgccgaatagcatggcggcgcccactgccaggccgcggcccagttccctccaccaccgcgggtgaaacgccaacccgatggaacccaggggacgccgctcaaatacctccgtcatcagcttggatgcgggaatgaccgccaacaggcccgcgaaggattgccagaagaacgtcgcaaagaaactcggatgaactttgccgatgagaaagatcgcttccagcatcgctcccgagagcacaagagcagcgtacagaagagcgacggaaagaaagaaccgccagatggggcgcaggcggccatcgtatatgaatattccggtcgagttcatggcgtttcccgagtccgctcaatttggtcggcgcgaacttccagcccggtgctggaaatggcgaagttgataatctgcccgcccatctggataagcgtgttctccaccgccgccttggcgcccgggcggaccataaagaccacgcatccgccgccccccgccccgcaaactttggcagccacggttccttgcttgcgggtttgttcgatcatgcggtcgattttgggagtggagatgcctttgaaattgcgtttgcggttttcccactccagcgccagcagctccgccacatcgttccaatcgcgggccagcagcgcttcccgcatctggccggcgatggtggtgatttgatcaaaattcttgaggacgcgctcgttgttatcgatatgggatttcatgacctcccagttgttgatggcggaactgcgcggttggcccgtgtagcaaagtacaaagcgcttttccacgtcgctgaagggcagaggcaggcgctcgggcttcacgccgtcgcgctccaaatggatggcattggcgccgccgtaaagcgccgggaagtagtcctgccagcccgtgggcacgcggatgacaatggcctctacgttcttggcaatctccaggatcgtcccgcgtgtgcagcgcttgccggtaactctcgccagggccccgcacagggcgatattcagcgccgaggagcctcccaagccggcgccggcgggcacctgcgaactggtcttgatgttcaatccgcgccgaggctcgaaaaacatcaccagttcccgcagcaagggcaactgcgatttgccgagagaaagcgcggtgaggttgtcccagctttccttcagtccctggtcctgcgagacgagtacaatgcgcgggtcggcgcgggtgtcgatcacgcatgaggcataacatcgtatggcaatgttaaccgtttgcgcaccaggatgaaaaaggtaaagcggccagatgtccacggttccgcccgccaaatcaactcgtgcgggcgctcgcgcttctattcgcatgggggctccatagtcattagtccttggccatttgtcctttgtccgtcgtccgttgtcagctctccgtcgtcagccttcaataatcattcgtcgccgatcagctcgtcttcctcccatgccgctttaccggtgactgacggctgaccacagacaaaggaccacggactaaggacgcttttcattgttgtgtcacctgcatcgtttcgtcgatatccagggtcggccaagcggctttggcggcgtccgtgggccgggccgtaatcttgaagtgttggccatcgtccacttccgcggtgaaattgtagccgcgccggttcgtgccggaaaagttaatcgcaccgtcctgctggagctcgtcaaccgaggcataggacccttggcttgccaggtgcatcctctcggcctgggcgatggccagcaggtcgcccttgacgcccaccacgtcaatcacctcccggggagactgcaagcccgtgcccgtggggtccttcggcatctgggacttcatcacgaaccagacaatcgccaacacgatcaccaaacccaaaaggcttccgaatgttctcatatttccacctcaataaaatggcagtatatcgttctccttcagcggtcctattctgacccgatgtgcacgcggatgcaacagggaggtgcggggtggcaacatgaaagtgaaaaaggggatgtagagcgtcccgcccgccctacgaagctgtgaaaagatcgacaatctcgcgcagagacgcagaggcgcagagatacagaatagataactgctttattctctttttcgcctctgcgcctccccgtctctgcgcgagatgcttttgctcgttccgggatttcttcacagcttccctaccaccgaggggccggctttcagttctatgtcatgcacccatttgttttggacctcaggcaagttaagatatccgccagcacaagcgattcgattctcacccatggaggcggcgcgtggcggaaacagccgatgtggtgattgtgggcggagggattgtgggcgcgagcatcgcctatcaccttgccgaggccggcggcgccaacgtcatggtgctcgagcgcgagcctcacctggggcgcggctccacaggcaaaagcatgggaggcgtgcgcgcgcagttctccaccgagatcaacattcgcctgtcgctctatgcgctcaatttctttgcccgcttcgaggaggccacgggctgccccggcggctatcgtccgcagggctacctgttcgtggcgacaagcgaaaagcacatggcttatttgcaaaccaatcaccaattgcaagtggcgtgtggagtgaagacggcggaattgctctcgcccgccgaagtccttcgccacatgccgcatttgcgcgcggacgacatccggggcgggagtttcagttccaccgatggatttgtggacccgcacagcgtcatgaccggcttcatgcagcgcgccaccgaaaagggcgtgcgtctgtggaagggcgcggaagtcacggcgattttgcaggacgcgcagggcatcgcgggcgtccgaaccacgcgtggcccggtgaccacgcgcacggtggtgaatgccgccggtccttgggcggcacaagttgcagccttggccggattgcaattgcccgtcgaacccctgcgccgcatgttggtccccaccgaaccttttccgctcatcgcgcgcgaggcccccatgaccatcgatatggctacgggttttcacttccgccccgagggtctgggaatcctgctcgcctggaatgatcccgaggaaacgccgggattcaaaacccaattcgatccggggttcgtcgagaagattcttctgcgtgcggttgagcgcgttccctgctttgaggcgctggaagtgaaccccaagcgcgcctgggccggcctctacgaaatgactcccgaccattaccccatcctgggacctgtccccgaggtccccggcttgtatctcgccaacggcttcagcggccacggcgtgatgcattcacccgccaccggcaaggttctggcggatttgattctgcacggccaatccgacctgattgacgcccgcgctcttaacctggcgcgctttgccgaaggccgcctgatccacgaaaccgcggtgctgtgagagggcaggctattagcaggctcagagtgattatcctccggcaaagccggaggctttatccgtcacctgacggacgggccccgcaaaggggcctgaccgccgccgtcgggaaaagacccctcacccccgcgacctgcagaacatgggatcccctcacccccacgacaagcagaacgtggggcccccttctcgcctcggctgatgaaaacgcctcgccgagccaccctctcccccccataagcgctaacttaagctgtttgggttgaagtggccttcaagtttccagaggtccatttcgggatagtttccgggtggccgacgattcgcccgggaccggcgtgcgccacatccgcgcataggcgacaaacataaagtacccgtaaagattttacggaatcaaaaatcgaaatcgccggggccagtattctaaaaggcgaattgggtgaccagggagattatttcttcgggctgggcctgaacgtcggaagaccctcgccgcaggtaaaccacattgtccagcgtgtacagcggcttttcgccgcgcgccacggagattctgcccaccgtcattcctcgaatttcctcgaagacgacttccaccggcggagcgggttttatgcgcgtgcgggcaagctggtggattcgccttgccaaagcatccttccccttgaagtcgaggtccaaacccttgacgtggcccgtatcgtcgagctcgatactgttccgcttgcaagcagaccgcttttgcccttagactccttcccatgggcgatcatctgatatccatttcgccagacatcatgggaggcgccccggtcttcgccggtacccgcgtgcccgtccaaaccctcttcgagtacctggaggccggggacacgattgatgatttccactttcccaccgtcacgcgccggcaggtggtggtgttgctggagatcgcgaaaggcaaagtcctcgccgaggtcaagtgaagatcctgctggatgaatgtgttgacgagcgcctggctcatgactttgccgggcacgacgtgctgacggtctggcagatgggttggaagtcagcgacgtttggcgggcttgcgcctgcgaataacgtttggtaaggtgaacctatgacgcaattacttgaggatgcgctgcggaaggtcggcaagctcactgaagacgagcagaacgccatcgcctcccagattcttgccacgctcgaggatgaagaagcgtggggcaggacgctgcgcaagaatcccgctaagttgcgcaagctggccgccgaggcgctggacgagcatcgctgcggcgccgcgcgcccgctggacgagcttctgtgatcccgtcgcgcaccacgcgcgccttccgccaagccttcacttcacttccaaacgacgtacgccggcaggcgcaacgtgcttaccggttgttccgccgcgatccacgccaccccagtctgcgcttcaagaaagtggatgaggaagccaacatttactcggtgcgaatcgggctgggctaccgcgcgctgggagtcatggaagggtcaaccgtagtgtggttctggattggctcgcacggcgaatgcgacctcttgctgggatgacccgccttgctggaaacgctacccctcgtgaaaaagggcgaagtgcgcgaaattggcgcataacaactcgcggccggcatctgcgcggggcgtcacccagggtgggaagttggtgtttgtcccctccgtccccttgccgttgcgcttggtgcaatgattggggggaggacccatacatgcggtgcgaaggctcgggtttggtggtgaaacgaagccaaagcggaatggagacgtagacaagcatgccagattctgagcagcgcgcaaatgagaaacggatttttcccgaccttctgaaatacgtcggcgacgattcggagaaattgaacgagccccttacgggcttcttgggtatgcagggccggttagctacgggcgaattagctgttattggcaggtctccaaatcaatggctgaacgaaggttggaccgccgaggaaatgtgcgacgagaagaatcatcaagcagttctggagaagaccttggtggagagtcttcttgaaaccgaccgcccctgcccattgctgtgggtcacagactgctgggcaggagggcgcggtaatatgggaaggactgcattctggcgggttgtgcgatctgtaatggataatatggggattgcagatgtgctaaaaagcgattggccctcgcatttaatgtggacgaacttgtacaaaattgctcccgctaagggctggaaccccagcgttcgtctatgcgatgtccaatttgaattctgcgtacagattcttcgggaggaattcctgtggtggaaacccaaacgcgctctgttcctgaccggctggggccgggcaaaacatttcctaacccggtttcagacggcccaatggaaagatgtggaggagaagaaattcgtggaatgggttggcacggccgatttcgaaccgagccatcgggtccaaatcgttgtggcaaagcatcccatgggaaagccagaaggtcgcctagtggcggaaatcgtgggggcattcaatttgattgaggagcgggtagcacagaggtagccgcagtttggcttcctcggcggttcgtaatatgataaagtcaacatactaattaatacgcaatgactacccgcttgtatttgacggcgtgaagcagagttccagcagagggtggcccccgctttccacccggttttgatgacgcaggagagtggcagacggggaaagcagcggcgtcaccccacggggctttgacattatagtaaatttcctatatattgttgaggtgaggtttggacaggctaaaaccaccggtcctacggcctcttgtctggctgggagactccctgagaaacgtgcgggattttccggatggtgcacaaaaactcctcggggacgagatccagctcatgcagtttggcggtatgccgaaggacgccaaacccttcaagggtgtcggcagcggcgttgttgagattgccctgcgatattcctctgatgctttccgtgtcgtgctggcgacacacatcgggagtcggatttatgttttgcatgcctttcagaagaagtccaagaaaggcatcgaaacgccgaagcgggacgttgacctcatcaagaagcgatacaccgaagcacaggagttggcaaatgagtacggaaaggcgaaaacccattgagttcgaagcgggttccgggaacgtgttcaaggatttgggccgcaaagatgccgaccagcttctggcccgagcgcagatcggattccatgtctacaaaatccttgaggacaagcagttgaaacagcgcgaaatcgcggatgtattgggcattgcccagcccgatgtatcgcacctgatgaacgggcacttcagccgcttcacaactgacaagctgctggactttctgaaacggcttgaccgcaaagtgacgatcgaggtcagccgacgtcacaagggcgaaccctaccagcaggttacttttgctccgtaggaagtactagggggcggaagaagggaacgcgtgcgtccaggcactggtcgcggattacccaaacccacgccgggtccatggtgcgggcgccggtgccggattcgccgcccacgatcacccaatcgacacgttcgaaggtagcgcagggcccgctctccggccctgcggcttttccagcagtgtgggtgcacaatgggaaaacggtctttcgtcaccccgcatggcgtccccccgaccacccaccgctgcaccggccacaccaccacgaagttgaagagccgcagggccggagagcgggccctgcgctaccgtcccctcgttccccattcaccctgtggaacaccgggtagggcaacccggcatctcgtgatggccttcacccgcaggcggaagagggaattggccagaccttcttcgtccaagcgcgttctccccggcaggagtttcaccgtaacgaacaggaagcgcgcgtagagaaacggccggcgccaacgccacagggcgataatctacgcgccctcgcgggcgtccgcaagacgaaaagccgcggacattggaaagcatgaccgcgctacttgctgcggcggaagtgacccctcacccccacgacaagcagaacgtggggcccccttctcgccccggctgatgaaaacgcctcgccgagccaccctctccgaagctgtgaaaaaatcgaccatctcgcgcagagacgcggaggcgcagagatacagaataagtaactgccttattctctttttcgcctctgcgcctccgcgtctctgcgcgagatggtttcgctcgttccggaatttcttcacagcttctcccccaagggggcgagggaccgggggcataggcgttagaataagcactttggtgctgtgggaatgatctttgcacctcctcccaggcccggagggccgtaagagggtagcccacggcgtaagccgtgggtggagccccgaggttgcgagcgcagccccagcggggcgacagaaaaggcccggaatccccgtggccacgggggattctttcgcccctccggggctcaccttcaaggttactccctccacccacggcttacgccgtgggctacgatcttt

SEQ ID NO: 549 - DNA, 30340 bp, Artificial Sequence
  Synthetic Oligonucleotide
gctgtctccagtggcgtctacttctacaagatgagcgctggcaaatacagcagcaccaaaaagatgatcatgatgaagtaattcatcgggatataacctataaccaagccccgggaccgaaaggttccggggctttttctactctcctgaaaagaacgtggatgacaggatcgactggatctttgaaggtggaaaggtgaaaaggtggaatggtggaaaggttcccccgaaacaagtccaccaggctatatactgtgtcatcacgagtggggtggcaaagtccgtttgccacagagaccggaggtctctcccaaaaaggcaactccgttgcctctgccgaacagacttcggcagcccttaagttatctgcgtatatctgcgtgaaccgcgtgaaccacttgaaccttgattctgtcttttcaagtcccaaacaagcacccagaccaaaaacaaccggcatcaattatttgacaatcgcattaaatatccaacacattccgcaatatgcttcatagcgccgtcccttgctgctactggctttggagtcatcatccttaggtcatccctcaccgggttaaggatgactgccggatgacccacgccggagaggggaatgcaaatgaggcccatccctctataatatataggtgctacgataggtggaaaggaggacttcgtggtgacgtggtgtcgtggtaacgtggtgctgtcggaaaagagatagaacgcggatgacaggatcgactggatctttgagagtggaaaggtgaaaaggtggaatggaggaaagtttcccccgaaacaagtccaccatgctatatactgtgtcatcatgagtggggtggcaaagtccgtttgccacagagaccggaggtctctcccaaaaaggcaactccgttgcctctgccgaacagacttcggcagccctggtccgaaacctccccccataatactaatccgcgctcatctgcgcctttatccgcgtatatcagcgtgaaccgcttgacccgggatccagtcaccccagaggagccacccccgtttcccgcctgttcagcgtgcagacagcagtcgtgtcaggaaagcttgtccagttcttcgcggacgtttttgcagcggggatagtctttgccgaaggtgttttcccagatgctcagcaccctggtcagcagttcccgggcggtgttcgtgtcgccctgtctggcacgcagcctggccagagagaagaggtaatgggctgtctgggaatggttttcgccatagtggagggtatggccgtctatcgcctgcttgagcaatggttccgcttcttccaggcgtccctggcgcagtagcacactgcccagatttccggcgcagaccgccgtaaaccagtgtccatcagggaaaaggctttccatcatttccagcgcggcgcggagcatctcctcggctttatccggcctgtccatcaaactgtaaagcgaagcgaggttgttcatgcggtctgccacgttggagctgggcccggggcgtttttcgatattcagcgagcggcgcagcagtttttcagcctgctcgtagcggccggtatctttgtaaaagcgtcccaggttgttcagatagggggagaggcgggggctgcgtggcccgagctggcgggttctggcctccaccaccttcagatagagcggctcggcatcgtccatgcggtgcatatagtgatagagcagggccagatggaagagccgttcgatgtgttccgggctgtccccgccccaggcctggcaggacaactcggctgccagcagcatacattcctcaatcttggccagcagcatgcggtcccagaagtaatcggccgccatctcatagtaatgggcggcttttttgagttccccggcggctttgaagtggcgggcgatctccgcggaatgctccttgagtgcctgttcaaagacggtttccatggcttcggcggccgccaggtgcagttttttaagctccttttcgcggatgctggcatagaccgccttctgtaacaggctgtgggaaaagatgtaaaagagttcatcggcatcctgccagattttccgtccccccgctttgcccagttgctggatggggttgccttcgagcatgtgggagaggaggacaacattgaagcggaagcccagcacactggcgccgcggacgctttcctgaacctttttggagagccgggcaatgcgccgggaaatcacctcgtcgatgcctcccgccgccgcttccaagccctcttgcgctatttcgccgtggggactgagcagcttgttttccagcagataagcggcaagctgttcggcattgaaaggattgccgcccgcgcaggcgtggaaagcggaaaaggcctcgcggggcaggcggggaaggcccagcagattgaggtagagcttgcggctggcgctggagttgagggagcccagggcgaggctctccaagccatcttttttgacggcaagctccgcgggcagcctgcccttttccgtccgggcggtagccagcagaaagagcgggcgcacgccgtgttgccacagcagttccaggaattgacggctcaggggatcgagccattggacatcgtcaataaagataagcacaggggatttggcgcacagccagcgcaggtaatccagccaggcctgctgctgacggggcagcctggcttcgggggcgatcccgcgccagggcgagccatcccaggagagattcagcagcgaggcgagggcggcttcgcaatcctgtcccagcgaggaaccgcgggtgcgcttttgccacgcttcgcggaaatgctgcaccgcctgcgcgggagcctcatcctccaaaagccccaaactggcacgcagcaactgggatacgatatccagagggaggggggaatcctgcctgcaagccagcagatacacctgccgccggggagtctcgaaggcgcgcaaagcttcgcgtgccaacctgcttttgcccactcccgccgttccatgcaccaccatcgcctggggcgaggaggccgccaaaccatcgcgtatcctgctatgcagcagagcggtctccttctccctgccaatcatgcaaagcggttgtccggtgatcagttgccccggcagcatgcccagacggtaggcgcggggcgcggcttttgaggcggctttttcccttttgaggggggtgaagatgaaggagttgtgctgctggttgcgcagcttgtggtcggcgagggcttcgccggggcgggcaagctccaggagcttctgggcgcgggtgatggcttcgcccgggaagaaggttgccttccacaggtctttgccggcagccatggaaaagatgtagccggtgcagcaggcggcgcgggctttgtggcgcgtggcagcttccaaagccaggcggcaggcgcgctgcattttgttgaccttgttgtgggggaaatcgaagagcaggatggcatgcagccgcttgtgccgcacatagatggctgccaaaaaggcgtcgtagatcaccgccagcagttccagcgcctggatggttggctccagggggccgtccggaggctcgtccaggctgaggcagcagcaaacgctgtgccggacgtcagccgcgggattgagtctgtgaaagcgggaatgaatgaagtggtggccgtgttgcttgcccaagcgcttcctttccggaatatcaggcaactggggaaagggcggatgctcggcaagtttgccaggcctggcatccaactcccagcccagtctgttcaatgcctggggagagtaataaggttggttgggctggccggggttttcacgcaggacatccagttggggagaccagaacacatattcaaactggagggggttctcaaagatgcgccaggacagggtgccaaaacccacggccaggcggattacattcggcattccatgatgggggctggcgtagctgttgatcgcgccgatagtgtgattgatgcgtgccagcagtgccgcgatcagcaccggagtgctttccggcaacagggcgtggatgcagtttccctcatactggaagagcagtccgcctgcgttcctgatcaggctcagcagcctttcataggcttcggtgaaagttgcttccatcctgtcaatcacctgccgccgctgcttgagccttactcctttgatattgtaagtggcaacggtgcaaaagcgcaggatatagccggtgatctgcccctgcaggatgttttgctcatactgctgcaggatgtagctgggcaccacgcggttcatatctggctacctgccttgcctggcttaactataatctcctttctgcctacttatcccccaggctcagattggcgaaggcggtgagggtgatctccgcgtccgcgctttccagatagctgacgcgtgcccggtcgcccgcgcgggtgatgggcagacggctgctcaggttgctggaggcgataaagattatatccggcgcttcggtcagggtaaggtagtagtaggtgcgtccatccgtggtgtccgagccaaagcgggcgatggagcctgtgagggtggcctgcttgtccgctgcctccggggatatccccatccggcttccggccagggccatctgatagttgtcgcgcgcgctgcgcacgctttcacccactcccaccagggaaaagtcgcgcactgaaacgaagctgaacatcttgattagcccggcgctgtccttgagggtcataaaataggtcggcttgccgttcatgttcaccaggatggggaaggtggcatagtatttgaagttttgcaccttgccttcggcggagcgcatggcggcagtctcggtggcaccggagaccaggtagaggtggctgcttttggtgcgggtgtccgtgagcgcaaagcccaccgttccctcgtccgaacccacgctggtgaggccggagtagaaatagctgcgctgatcgcggccatagatcacgttgtaaccgggcgtcacccgcagcaggtcgcgtttgccgaacacgctgttccaaaagccgtgcacatatttgccccaccaggaaagctggggaagcacaaagtaggagggctggatgcggtcaacccaggcgggaatcttgctgtcgtcatagatgccgccgctttttttgaggggaaagtatttgatctcacccgtgccggcatgcacgatggcgagtccggtggcttccggggcactcactccgatcttgtgggtgtaggtggtgatggtccagtagggttcgccattgtcgtccagttcaaaggtatcgcctgccaggccgatgcccgcgaagccgttccaccagagatggcggtagaggtcttgtccaaagtaggcgttgcgctgatagcggatttggatgggtttgcctttcagctcgcgcacaaaggtgatatcctgcggattggtggccgagaccttgatgtagcccggggtgcctttgcttgtgttggtgatccacttccagaagccgctgtgcagcaggggacagacccagaaaagcttgccatccaccatctggatggtcgggttgccgagcaccacccggctgccgagggcgaagtcctcgcccagtttcttggctgccaaatccttggcgaaagcggaatccaggatcggcacctgatccagattgaccggcgccaccaggtcggaaaactcggtcttttccacctcgccgatcatgcggcggtagctgccggaattgaagatgccggaagagaagaagggcgccaagatcagccacagcgccagaaggggatagaccacatagaggatcttgcgcaggcgccggattgccagcagcggagccaggcagatcatcagggggacgatccagtccaaaaagcggatatgcagcaccggaagcacaaagtaaagcataaaacccagcagcaggacggacagcactacggccggcagggctttgatcctgaacttgggaaacttgatcacgacaggttttggcgtttgttgttgcatcatttgaacctccctgaactaagctttgtttttatactctaccagatggcggcggatttgtcaagccggaatcgcggcccgcctccaatacagaatggaaaaaagtggactcggctcgaagaccgctcctatccttgcggatacagaggcgcgaccgcccgctcaaacactccctgaaccttggaaatggccagcccgtaattggtgatcggcactccgcgccgctgggcttccacgatgcggcggctcatctccatctggttgagcatgcaggctccgcagtggatcaccagcgcgaagtcctccagattgggcggaaagtcgtgtcccgcgtacacttcatataccagttccttgcccgtgaactggctcagccagcgcggaatcttcacccgtccgatgtcatccgcctgcacgtggtgggaacaggcttcggcgatcaggatcttgtcgccgtcgcgcagcttgtcgatctgcctcaccccttccgccaggacgtccagatcgcctttgtagcgggcaaagaggatggaaaaggtggtcatcttcacctctgggggcaggtcattcaccaccttcagcaccacctgcgaatccgtgatcaccagatcaggcggttccttcagggtttgcagggcataggccagttcccgctctttcaccaccgtcaccaccgcgtcgtgatccagcagttcgcgaatcacctgcacctgcggcaggatcaggcgtcccttgggcgcggcgaggtcgatgggagtcaccagcagcaccctgtccccggccttcaccaagtcacccgccagggggcgctcctccagcagatgggcgggcgccagcttgatcagcagttccttggcggcatcgatgttttcccccttgagggcggagacggagacccagggcagtccccgttcctcgcaccaggcgatattggcgggggcaggctcgcgcaaatccctgtggttaaagaccattaacagcggtatcttcatctcgcggatgcgtttcagggaggacagctcgctctccgcgaaggggcggccatcgttcacaaacacggctatgtccgtgcggtaaagtatcttataggtggcgagtacccgtttttcgcccagttcgccgctgtcgtccagtccagcggtgtcaaagaaggtcaccgggcccaggggcagaagttcatagcgtttgtccaccgggtctgtggtggtgcccggggtgctggaaacgatggctatctcctgtcctgccagggcgttgatcaaggacgattttccagcgttgcggttacccagcagggtgatgtttacgcgttctccgcggggtgtgctcatctatcttctcccaaaaagtcttgcggcttgcggccgctaatagcttttattatcagttctttcatgtttctttccttgtcggactggataccagcccatgtaaaaataatatatgtgaaaagcgcgaatctgtcaagcaaagagaattctggcagacaggggcctgtgtttttgatatatccacaaattacacaaattaacacggattaaaagaacagaataaggacaagtgtccagcctaaaaacaacaaccagaccctgaaacaaaccgccaccaagccctaaagccgtgtcatcccgggctgtcggggtcaccgccaaagcgcgaagcggtttggtggggtggcttgacccgggatccagtcttttaaaaacaaccagcaagccccgaaacaaagcacaacagactaaaaaccgtgtcatcccgggctgtcggggtccccgccaaagcgcgaagcggtttggtggggtggcttgacccgggatccagtcttttagaaacaaacgcgtaaggttttaaaaaagcaggcacctttccacctcaaaacacctttccacaaattctccccccatatatataggtgctacgaccccttcatgccaggcgggaagcggatcccagggcaagtatatatatacttgcccgtaattgcgcggccatgggctggctgccctccctttcccctcgcgcgcgggtggctctcatttgcatccagcgttttggcgtgagtcttccttaggtcatccttataatttataaggttgacctaaggatgatggcatcaaatccagtagcagcaaaggagggcggtatgaaggattatgcggaaggttgtggtatttttgtggaaaggtggaaaggtgcccccgaaacaagtccaccaagttatattttgtgtcatcacgggaagtcggggccccctctggggtggcttacccgtgatccagtctttttaaaagaaacatccacaaattacacaaattaacacgaattaaaagaacattaaagagtcaacacacccgactccggaacaaaaccctccagactaaaaaccgtgtcatcacagcctgcgagccgtgatccagtgcccaggtgtggcaaagtccgtttgccacagagaccggaggtctcttccaaacaggcaactccgttgcctctgccgaacggacttcggcaacccttatattacaccaatccgtgtcaatctgcgccctttatccgcgtttatctgcgtgaaccgtggaacccgggatccagtcttttggaatgtttgaacttcgctgaaaacatttttcgctaccaggaatgaaaactggacaacaaacgcagcttgggatatctgacactaagagtgtaattcacacgatcaataagaacatagcgtgctgtgcatacaaaacatattaccgacggacttctgttctgaaatatggacgttttgaacttggtaaacagtccgtatatggactaccagctgggacttgccattaggcatatgcccgaatgtaaagctatattcttatataacgcattgtagacagcacaggttgttctctgctctttccatattacactagtggtcatcatttcaccagtaggggtttttttacgcttttttcccgggagttttcatgtaaagcaccctactggacaaagagatgggagccggaaaacacagcctgaactgggacggcaccgactccaacggcgcccaactggcaagcggagtctatatctaccgcctcagcaccggaaagacgagcgccagccgcaaaatgatattgctgaagtgacggacagccgcccttccaagtccgataattaacttgaaccgccgcgcattacacacggcggttctttccaacaagccaagtatcagcagcgggaaaactgcgctgaaaaagccgctggtggggctccgtaaaatgggagtggaagccgccgcatggaacaccttgaaagtaacaagataccgccccaaattgatctttcctaacccaaaatccgcaaagcaaatttcttgacaatgatctttggcttaaatataaggttcctatcgaacaaaaggagcatgttatgtacaatcttctttgtgataattgggtaaacgtggtctatctttcgggcaaaccagatagaatatctttagttcaaactcttgaagacgcacactgtctgcaactggcatacagcaatcctatggaccggttcgctgttttcagattcctgcttgctcttggctactggtgtttcgccaacaccaacggggagcctgaacctgataagccgcttccgacctcctggatatcctggctggaagaaaacaaggggtatttcgagctttttggggatggacagagatttttccaagccgatcccagttccaggatcagagccattaccgaccttattcatgagataccaacagctcacaacctatgccatttcaatcatgtcaccgactatatcgatgggctctgcgaagcttgctgcatcaagggactgctgagattacctgtctttaccactgtcggtggcagagggataggcgcgggaatcaacaacactcctccattttacctgctctggcatgcaaatgacctcgctggcatgctggttcaaaattggcaaccctgggataatatggggattccggcatggttgggttcttttcaaaaagaaagcaggaaagtgggcttacttgccggaatgacctggctgccgcgcaaggtgcatctgcatgatcctgtctcaggtcaggcagcatgttgttcctgcggcttaccctccaaagctctcgtctattcctgcagcataaaacctgaaccagtgccggaaggccttaaatggaaagaccctcatggtgtttacaccgatcagggaaaaagtctccagtccaaaatcaaactgatgtccaatgatagatacactttcgcggaccgggattggtatagcccgttgttcagctatttgcacgcggaaggaaactccagacaaggaaaactatggttggttggatttgccagcgataaagcaaaaagcatagacatctgggacaagatcatcgagcttgagggaactgatacaaatgatgagctactggctcaattggcaaacagggctactgcccttaatgccatgcgcaagaagcctctcagaggtgatttcaaaaagtcagtgggcactccccagattgctgacattatcccccacgccgaaagcagaattgccatcaatgcgggtaaaatgactgagaacaggggctattcctggcaggatgccgatactgaatacggagaactgctcaccaaggttgcatgctctttggagccggctcaaacagtggacgccaggctcaagagaggtaaattcatttcccgcaagccctggccagttataccagaatccaaaacaaaacccgcagaggaggaccagaatgaatagaggaaccgttgacttcattgcaagcctggagaacctcaaagaaggcgatttgggcattcttagaaaactcaggggagcccggcttgatgaaaagcttcccggatttgacctgttttccgccctatggtggcctttgcggcaaaagaatcaacgcgctcccaagcgtgaagtggcttggttgatcgccaaactttttgctgaattccgctttgaacagcgcgagggagccacattgcccattcttatgggaggcatctgccggaagttggaacccaaaaaggaattaccccgggtattggcacgctttgatcaactcgcatcgcttgacattatgcagatggaagagccgctgtcggtcatcatgggtattttgcgcaagcaccagcaggtctgcctggactgggtagggcttactgatgttctgtcattttgggagcaggaacctgtcaaaagagaatggtcggattcatttattaaagcatacaagatcaacaaggaggattcagatgttgattgaaattcatatgattcagaatcacagcccggcaaatcttaaccgggacgacttgggcgcccccaagacctgttatttcggtggagtattacgttctcgcatctccagccagtgcatcaagcgcagcatccgttttgccccggaattcgcggaccttagaggaggtatccgaacaaggcgtctggcagagaaactcgaggaaatgctggaaaacaaagataagaagctggttgccaagtttcttgaagcctgcggaatcaaaaccaaatcttccaagaaagctgcaaaaaagtccgaaaagatacccgcggaagccgatgaagatcaggatgagcagcaggcggctgatacatctgacatgctggtttttaccacttatgatgccctgcgccaaatggcaaagctgctttccgactccaaactaagtgaaagcgaaaaactgctgcagttcaaagatctgctcacaaactgcgtccattctccggatatagcactttgcggcaggatgctggagaccaaagagcttaaaaacactggcgttgaaggcgccctacaggttgcacatgcgatctccacccacattgccagacctgagatagactattttgtggcggccgatgatgttcccggtgaagacgccggagcgggtcatattggcgaatccatgtttgcctcagcctgtttctacaaatacttctccattgattgggaacagttggtcaagaacctgaaaggggacacgaatctggcagcccacaccgtgggtgcctttctcctcgccgcagccaaaaccaaccccagtggcaaacagaacagcttcgccgctcataactatcccgatggcatccttgttgagttcaagaattcccctattagctacgccaacgcattcgtcaggccagtttccgtggtcaaggaatcggacctggtggaacaaagcatcggccagctttccaactacgtgaacgacatcaggcttggctattatgatgagcaatccccagttatcagcttctggttttctccaaacaatcgctattcccttggcaatgagcattccaaactggcttccagaaacattggcaacctcaatgagcttgtaggcgctgtgttggattatattggcggcttcaagtgggaagaagttcagaaaagcaaggcttatgttggcggctgacatgagtgcgccacccaacaccttattcttgcgcttggagggggctttgcagtcttggggcagcaacgaggctaagtttgctttgcgcaggactaccgacgctcccacaaaatcaggtgtcctggggctgctttgcgcggccatgggaattgggcgcgcggaggctgctgattcatggctcccaaaactcgccaacctgcgcatgggcgtgcggatagaccgccccggcatacgctggtgggacttccatactgttggagcgggacaaagaatgcgcatggcagagctgaaggcacccaaaaaaccttccatggttggagctgccctggctgataccctgacaccaagcaaagtaaaaaccagggcagagaccttgctctcacgccgcgaatatcttgccgacgccagttttctggtcgccttgcagggtgagccggaacttgtggaaaagctctccgccgctctggccaagccggtctgggcaatttatctggggcgcaaatcctgtcccccttcacgtcccgtgggcgagcatgctccgggcttttataacactttggaggaggcgctgtccgcggttcccctgcaaaagcgctggcacaatgaacccctgccgcaaatactgccttgcgtcatggactggatccccagccaggacggagaacatgcgcctgatgacgcggagattcattacgatctgccggtttcttttcagccgccccgccatttgccgcgcttcgtgatcaggcgtgagctggttgtgggagaggatgtgcaagtgagcagggaaaccggaaccagcgtttggaggcccaaaggaacccgggcggattataacaattccgagtataagaaggtcagggcggagcggcttgtgatggaccatgccgcgtgcatggtatgcaaagctcccgccacgactgttcaacacgtgaattaccgcagggcgggaggcaaggaaataccggaagacctgcgggcgctgtgccgcctctgccacgacgcctgcaccatgctggaatacggttccggcatgaccaccgaccgcatcgacccctgcgaccccatatggcgggagcgaatactggcaaagcgcaaagatatagtcgagttccgttcgcgcgggcagcgtttccgcaaaatgaagccagaggaggaaaacggatgatctacttgtccaagctattgatcgatactggaggcaatccagaccgtccccgccccggcagaaagtggctggacaatatctataacgtccaccgccgcctttccatggcgttcccttcaggtttgcgccgggagcaggatccgcatttcctgaagcccttttcgccaaacgacttccaaaaaactcccttccttttccgggtcgataacaacatcgacggaaacgataaaagggcgattattatcgtccagtccgttcttgagccggattgggattattgcttccaaaacgcgcttgatttcctggcagcgccaccggaaacaaaggagtataatccagagtttcaagcgggacaactgctccggttcaggctgcgggtaaacgccagcgtacgccgtcatattcctgagaaggtgcaacaggacggtcaaaccatagaaactggcaacatcctgcacaaaagggtttctctcacctgggatccctcttccaccccggatcaggcccttgccgactggctggctgccaaaagcccaaagctgggcttcacccttcagcgctgtgagcttcttcaactgggttgggtttatggctccaagcctgaacctaaaaatgtcaaagcaaaggaacagggacagggctactggcgtgaacacacatacaatcctctgcgcttccgttcggctctactggagggaattctcaaagtggatgacccgaaactgttcctggaaacgcttagaagcggcattggaaaagcgaaaagcttcggctttggcctgctgtccgttctgccaatcaggaatgatgaataaagacctgcactctatcccccggatcagagatcggcttagctatctctatgtggagcatgccaaaattgatcagaacgggcaagccatcgccattcacgatgccctgggagaaaccccggttccttgtgccggcttggctatgctgatgctgggaccgggcataaccatcacccatgcggcaatactttcactggctgcctgtggctgtctggtagcctgggtgggggaacatggcgtcaggttctatgccgcaggcacaggtacaacccgtagcgccgtcaatcttatgaaacaggcaaagtactgggcagacccggttttgcatttacgggttgtgcgctccatgtatcagttgaggttccaggatgagctttctcctgatttaactttgaaccagatcaggggcaaggaaggtgcccgggtgcgcgatacatatttccaactctcccaaaagtatggtgtgcccatgcagggcagaaactatcaaagagacaactggaataaagcggatcccataaaccgggcattatctgtggcaaactcctgcctctacggcatatcgcacgctgccattgttgctgcaggattctctcccggattgggctttgtccacactggcaagcaactgtcatttgtctatgatatcgcggatctatacaaaatggaaatggctgctcccgccgcattccgggcgaccgctgaagggatcggcgaactcgaccgcagagtcaggcttgcctgccgtgatgaattccacaggcagaatctactcaaacgcattgtcgcggatattagttctctcttcggtgatattatgccagaggatagcccggatgactgttttgccgaagaaccagccttgcctggaggactctggtctccagatggagaagtttccccaggcggcatatcttacgggcaggatgatctgccaaaggaagattgatggtggttttagtattggaaaatgtgccaagctccctgaggggtaagatcacacgttggctgctggaagtaaaagccggggtgtttgtgggtaaagtctcagcaatggttagagataaactgtgggataaggttagaagcaattgcagcggtggaacttgcctgatgatctggagtagtcagaccgagcaagggtttgatatcgaattctggggtgccgcatcaagagtcgttacggaatgggagggtatcaaacttatgaccaagcatccttaaactaaggcttgaaggagttcaatgacctcttagacctctattgatcaagtgtattccccatgcatgtgggggtgaaccgggcgtattcgatgcgcttaacggcgtgatttggtattccccatgcatgtgggggtgaaccgcacaaataccgttatttcaacactctgcccacgtattccccatgcatgtgggggtgaaccggatacacacgcatcggttgcataggctgtccggtattccccatgcatgtgggggtgaaccggatcacgtcaccaagatctggcttcggcacaggtattccccatgcatgtgggggtgaaccgcttatccgaatgctacaagctgcacgtgacctgtattccccatgcatgtgggggtgaaccgagacccttcaacctatcgcaaaagaattcaatgtattccccatgcatgtgggggtgaaccgactacaaaacgaggtgatcatatgagtgtcaagtattccccatgcatgtgggggtgaaccgcatctgttttgccttctgcattgccttgtatcgtattccccatgcatgtgggggtgaaccgaacgcccgccagccggcggcactgctggctatgtattccccatgcatgtgggggtgaaccgacgaatcccgtctatgccgcccaggccaacgcgtattccccatgcatgtgggggtgaaccgaaaccaggaattaacgtagtgccaggcaagacgtattccccatgcatgtgggggtgaaccgactttgacaaagccatccaggtaggtgatgccgtattccccatgcatgtgggggtgaaccgccgacgaaatagcgatgaagggactggtaacgtattccccatgcatgtgggggtgaaccggcggcggcggctttgtcggtatcctggtagaggtattccccatgcatgtgggggtgaaccgaggacgtagcgaggcggcttggtgacctgatggtattccccatgcatgtgggggtgaaccgcgcggagctttccttgttgtcaccggaaagaggtattccccatgcatgtgggggtgaaccgaattatcggaaataacaaagagtcttcaaggggtattccccatgcatgtgggggtgaaccgtcaacgaaaccagcaacctgctgatcgttggggtattccccatgcatgtgggggtgaaccgaggacgtagcgaggcggcttggtgacctgatggtattccccatgcatgtgggggtgaaccgcctgaatctatcaccctactgagacaggcaatgtattccccatgcatgtgggggtgaaccgatcgtccagattctcacgatcatcctggacatgtattccccatgcatgtgggggtgaaccgttataaagggcagtccagtgagcaatagcaaggtattccccatgcatgtgggggtgaaccgatggcaacaattagcaggaattaaacaagaaggtattccccatgcatgtgggggtgaaccgttccggatgcagtcatccgctgtcgatgtggagtattccccatgcatgtgggggtgaaccgttcatagcgccgcttttcagcctggctacggcgtattccccatgcatgtgggggtgaaccgacgcggcataaccgcatgggcagcgcgtattggtattccccacgcatgtgggggtgaaccgatcgacgccggcatcatcgaggatctgatcctgtattccccacgcatgtgggggtgttgcgatttcctcgcgcgcgggcgactctcatttgcatctggcgctcagaccttggtcttcctggggtcaaccttaacctttatatggatgacctaaggatgatggcaccaaagccagtagcagcaagggagagcggtatgaagtaatatgaggattatcgcgggaattattttgaggggacaagcatccaatctgggtagtttgttggtattttatcgtttggctaaagtggtggttttgtaattgacctgaaatcggggtgacggggttttatggttttttgtagttcttttttgtgtcgtgttgtaaaatattcaccctctttctatctgtgtattatgtggtttttaaaaaactggatcccgggtcaagccaccccgacagcccgggatgacacaattttagtgtctgtcgtggtctgtttcggggctgatgcttgtttttgggttggacgtttgtccttattctgttcttttaatccgtataatttgtgtaatttgtggatatttttaaaagactggatcccggctcgcaggccgatatagcttggtggacttgtttcggggctggatgactgtcccaaacggcgctatagcaagcgccactacagtaaaggcggtcgctgaaccgccttcagggcagattcttttgtcctttaccttatccggcaaaattaacttgacataatttattataggtgattatctggtaattgtcattaagtttcgttttgaaatctccaaggaggcagatatgaaacgatcgcttcttatattggcgctgcttgccgtcacggcatcagccttcgccgctggagtacttatcaacaagcaaaacactcagtttcagattgctcaattgcggagctgcagctatgaggttcaaatcaccaatcaggttgcggaagtgcaagtgaacgaaacatttgtcaacaacagcaacggttttttctatccccgctactattttcccatcccgcgaggcgccaacgcgacccgcttgagatggagctatggcgacacctggcaggaagcgtcaatttcaccggtgccgcaaaacccacagggcggcccgtcctcttttccggatgaatttgtcgtttatatccagttgatgccggtagttttcgacgtggcagactccatggccgtgaatgactccctgcggctggaactctcctacgtgatgatgttgagttacaatttcggcagcgtaaccctcaacctcaagaacgactacagcctgttgcagaacactcctctggatttgcaatccctggatgtgaacgtctcgtccgacaaggagattttggatttcaacatcctgaatgtgacagccagcacccaacacacggggcacaacgccagcgggcattactccctcgccaatcaacccgccaccgccaactatgcctgccagatactgctatcgaccgccgaactgggctcctggggcttgagtaccttactggatgaagtccccgatgagggagcgccggggtttttcgtcttcaatcttgaggaggaaagccttccggcggattccaccttattcctgcggctgaatatcgtgatcgacgtatccggctccatgacctttgaaaaccgcctggaaaacgccaagaccgccgcgatctatgtgctaaaccatctggaacccgaggattacttcaatatcatcctctttgaccaccgggtgcgccctctctgggattatctccactccaatacagacagcaaccgccaagccgccatttcctatatccagaattatgagattaccggtttgaacggaaccaacctctccggtggtttgcaaaacgcgctgtatcagttttccccaactcccccgggagtcaaaaactgtgtgctgctcctttccgacggccaaccgactgtcgggatgacggatacctaccaaataatcaacaatgttaaccaacacatcaccaactatcacatcgatccccgcatcttctgctttggagtcggcaccgaggtcaactatcatctgttaagcgcgctgtcacaatacacagacggcgtcaccatctttctggagagctccgagatcgtcaatacggtcagcagcttctacgacgtcatgcgcaatcctctgctcctcgatcccgaactggccgtcgtcccgcccgggatcacggaggtgtatccctatcccataccctccatttatggaggaatccagtatcgcatcgtgggcaggtatgcgactccgggaacctatcagatgacgatcagcggcgcgcaccagggcacccagttgaacctgaactattcccaaaaccttagcggagaggaagcccccggtttgagcttcattcccaagatctgggctgcttccaagatcgacaacctgatggtggagtattattcctatccgcccaattcggcggaagcgatcgccctgcgtgatcaaatcaccgagatcagccagagtttcggggtggtctgcgtcttcaccagtttcacttccgatccgcccgacacggatttggatgacgtggtccaacccgtggtaaaaatgcccctccgcctgctgcccaaccagcccaatcccttcaatccctccaccctgctctgttttgaagtgtccgctgaactggagggactggcagagatcagaatctataacctgaaaggacaactggtgaagatcctcacggtgaaggttgacggcaaaggcaggtacaacgtgccctggaacggcaccgatctgactgagcggtcggtttccagcggggtttatgtctatactatcagatttggtaaatacctgctccacggcaagatgacacttgccaaatagagccggtcgagatgccctttgcggcgctatggcaagcgccggtactttgaaaaggcggtcaccgcaccgccttttttctatccctttttaagatcttttacttcgtgttaacttgtgtaatttgtggatgattattctaaaagactggatcatggctcaagccaccccaccggattgttaccggtccggcgaggaccccggtaggccgtgatgacacgatgtttagcttggtggacttgtttaagggaaacctttccacctcaaaaacacttttccacctttccacgacctaataattcgtgtaaatttgtgtaatttgtggataactctaaaagtccaacctgcttcagccccagtatttgcggtccaggctgcggtattggatggcttcggagatgtggtcggatttgatggcggccaggccttccaggtcggcgatggtgcgcgccaccttgaggatgcggtcgaagacccgggcggaatagcccagcttgtcgatcgcgtgctgcatctggctttggctgggggcatccagcgcgcagtgtttgcgcagcagtttggaattcatctgggcgttgcagaagatgccgtcgttggcatagcgttcccgctggatggcgcgggcgcggttgaccctggcgcggatgtcggcggagctgtcgccggaaggcaaagacgccagatcggaatagctgaccgagggcacttccacgtggatgtcgatgcggtccagcagtgggccggagatacggctgcggtagcgttggatggcgccgtattcgcaggtgcaggggtgattggggatgctggagccgaaatagccgcagggacaggggttcatggaggcgatgagcatgaattccgcgggaaaagtgaggctttgggaggcgcgggagatggtgacgatgccatcctccaggggctggcgcagcacttccagcacaccgcgcttgaactccggcagctcatccagaaacagcacgccgcgatgcgccagggacacctcgccggggcgggggaaggttcctccgccgatcagggcgatatcgctgacggtatgatgcgggctgcgataggggcgggtggtgaggatgccattgtgaaaatctttggagtatcccgccacggagtggatcttggtggcctccagggcttcatccagcgagagttccggcaggatggtgggcacacgccgggccagcatggtcttgcccgaaccgggaggacccagcatcagcaggttgtggcctcctgcagcggagacctccagggcacgcttgacctgaaactgccccttcacgtcgtgcatatccacgggaaaggcgttcagggaggaaaaaatccgctcgcggtccacctcagcgggcggaatcttggcctcgccgcgcagaaagagggccgcctccttcagcgaggtgacagggatcacctgtaagccttcaatgatggcggcttccccggcattttcccagggcaggacgagggtgtcgatgccatcccgtttggcggctaaagcgatgggcagcactcctttgacggggcgcaggttgccatccagcgaaagctcgccgatcatggcggtcttggtcaggtattccaccggaatctgcttgatggactgcagcacggcgatggcgatggggaggtcgagggcggcgctgtccttgcggatgtccgccggggcgaggttgatggtgaagcggcgcacggcggcgtcccagccggaattgcgcagggcggcaaagatgcggtcctggctttccttgaccgcgttggatgccatgcccacgatagtgaccgcgaaaacctgagaggtggcgtcacactccacagtgagctgttgcccgtctatccctatcgtggtgtaagtgcgcactattccaaccatttgatcctacccttgtttggtattttgctttgtttgtcagtaaaatagcggtcggcgcaacggtcaagggaaaagtgcgggaggagggtgactatccacgaattattatttaacaggcttgctccagatacgcccatcctcgcggatgatccagtccggggagccgtccttgccgggcagggtgaggtcaaatccggcggaggtagtttccaggtgtggtttagtctttttgccatcccgcaggtaggggcgcgcgcccagttggcgcagctttccagcccagcgtccgtgatccataaaatactgtttttggaggtaatagacctggcgcagatattccttttcccgctcggaggcaggcggagtgaaacccgggtctgccgagcccgcggacgcggcggagaagaacagatagccccaacgctctggatagtgcatcgcgatcagtccctgggggctccaaacccagttgcgttcaggcataccgggcactttggtgtagctgccgtccagccactcggtatcccattgcacgcgggagaagttgagccgccaataatcgccgtcccggggcgggcaggggacgtgggcgaactcctcaaaggccgaccagggcagaaacatctccacgctccagccgctgtcgaggtcactggggtcgttgagggtgccgtcgattccgatggcaaagctcgctcccttgatatcccagccgttcagggggctgtgggcgtcgcggtagggcttgaggatgaagaggtcccagagggtgcccagggcgttgatctccagttcgtaatactcgtgggtgtcgccgttgggatcgaggaagacctcaaaatcgttgtcgtaaaagatcaccgcgtcacgctcggtgaggcttgcccagatgtggggctcctccagccaggcgccgatgtagaggccggagtcatcccagagcatcttgacccaggtgtccagatggggcgctggtttgaggtctccctcgatatccgtgaacagctccgtgggcagggcaagttgccagtcgatgtcgtccaggctgccatccaccttgatcccctccaccgttctgaacgcggtgtaggagcggggcgcgaactcgcccacgggcaggggaaaggtctcggcggcaaggacggaaaggatgagtaagaggatggggacaagcagttttttcatgggatagctccttatgtttcgcggcaggctgccagcagctcacccgcggtggcgacggccagaccgacgcaagtgtccgccgcgccgtaatagatgaagattctggtgccgggcagcacggtgccgtcggcttccacacgttcggggatggcggcagaggggaagaccacattgggcacctgcccgctcagttcccaagattcacgcggttccaggatgttttgcccgctcctggcgagcacgttccagggcaaagcgctgtcgtgcaacgaaattcccgcctgatatatgtttacgctggcaaagtgggtcgccacgccgtggtagatatgcagccagccctcggaggtcttgagcgggggcgggccggagccaagcagttcgtcccaatagtgtggacggccgctgaagacgggggccacgggctcccaatgaagcaagtcgggcgaggcatagcagacgatggtggctccggagcgcactccatccgcgcccagatggtcattgggacgggcaaagagcagatatcttccgccgatccgttccggaaagagaaccgcgttgcgcagcccggcatccgccagcaggccaagatagcgcaggctgcggcagtcttccgtttcaaacagcgcggagcggcagcctggggcgcaatcgatggcgcaggtgacgtagatgcgcccctccaggcgggtgacgcgggggtcgtagaggtggtaaatctcatagggaaaagcttccagcccactcaccgccacgggatggccgtccacgcggaaacttacgccatcggctgacgcggcgcggacaaacagggtgcgcctgccacgatcctgcacacgcagcagcaggacatactcgccgccaagcttgaccccgccggggttgaagacagagctgacatcgcgcggcaaggcatccgaaacggggatatccgcacgggtgaggatgggattgcgcggatggcggatcatagcaggcctttcagctctttgacgcgccgctcgcattcagcgaaatccctggaagggggatcgctccagaatagctccgccatgtaaagcatgcggtcatagaccatttccttcagacggcggctattggatatccgttccgtccagaggttggcctgtccgcccaggaagagtccggggttggaaaacctgaatttgccgaggtccagcccatagacatcccggctggtggtgactccgaagcctccggggcagtccgggtcttcgttgtagcgccagtcaaaatagaggcggttgttggggcagatgatgtagcggttgccgttgtcatgagccatacgggcggcatccaccccgtctccgcgccagcacatggcgatcgggcggctgtcgatcccgccgtccagaatctcatcccaaccgatcacatcccggccgcgtttttgcacatgagccaccagttgatgcaaaaaccacgcctggagatgctcttcatcccgcaaaccctcttccctgatgcgccgctggcaacggggacactctttccagcgctccttgggcacctcgtcaccgcccaggtggatgtattggccggggaagagttccagcacctcgtccagcaggtctttaaggaaatctatcacgctgtccttgccggcacagaggatgtccgtggaaatgccccagacgttgagcggctcgaagtcccgggggaagcaggccagttccggataggcggccaggatcgccatggcgtggccggggatgtcgatctccggcaccacctcgatgccgcggtcccgcgcgtaatccagcaccaggcgcacctgcttccgggtgtggaaaccgccgtagaggctgccatcctcctctttgcgccaggcgcccacttcgtgcaggcggggaaagcgtttgctctccagccgccagccctggtcgtcgctcaggtgccagtggaatttgttcagtttgacggctgccatccagtccagatagcggcggataaccttgtagtcaaaatagtggcggctggtgtccagatgcagtccccgccaggaaaaggagggccaatcctccaggtcgaagcagggcagtcgcgcggagtcctttttgccctgtcgggcagccttgtgccaaatctgccgcaggctctgcacgccatgcaccaggccgggatagtcttgggcgctgatcaccgtgccctggggacggctaaggatctggtaaaaaccgccccagtattttttcctgtgcgtaccgaagtccaggacgatctgatacggggtttcgctgtctggatccatgaagtccaacagcttgctgtaactgctttccaagctggaggagagatatctgtgggcactggcggagagctggggacagcacatgataataagcaacgggctggggcagaacgtctctttgaggaggtggtactctttgggttggggaagcatgtttcctaccttatcaacagggttttgatctggaagggcttgaagctgaggcggatgccccgctcgccgatgggctgcgcttcgctgtccggcaaggggttttccaacaggtcgcagacactccagagatggtggccgggtgccaaaagagtagcctcggcggaacctcccgcgcattcatggaggcggacaacgaggccgccaccggattcagcgggcttgatccaatcgagggtcacggcatcggaaagcaggcgcacgggcgaatggggcagagggttggcgagggcgggcactttcaggcagagcagatcggcacaaaaggcctcggcagcctgccagagccgggagcgggcgtagtctccgctgtggaagtaaaccgcgtaggaatactcgtgctcgcccaaatctgccagggggtcaacgtcggcgggagagcgcaagaggttgaggtccatctcgttgtcgcgcacatggcagccgaacttgtcggcgcagaaaatggcgcagccgcggtctgcctgggaaagatcgaagaacttctggaaaggcacctcgaagcgcgcttcctcccaggcgttgcggggcttggcgctgcgtcccagcatgccggactggatgccgaagctggcctgggcggaacgaacaacgggataccagtgcgcgcgcagcatcttgtgcttttcctgccagtcgatgtggtgcgaaatacgcagcaggcgttctccccggcgcagttccagggtctgccgcaggatggaggaacccacgcgcaaggtctggaccaggcgggcaaattcccccggcagggtgtagctttgcgccgcttcaaggctgatcccctccgctggcgtgggtgtggttgtgcggtaaaagtggttgatatcccaggcgccccagttgttgggttcatcctcccagagcagcaggcggttggattccgaggcgaggagcggcgtgccggactccttgtcccacacctcgctaacgcttccctgcggggttacggtcacgcgcaggaactcattttccaggcaatggccagccagaggaataggcttaggaatctcccccgctccggctttgaaggcgatggaacccactccccaggcgggcaggctggccttgaccagcgttccctccgggatggcgcaacaggtgagggggacgccgtcctccccgcagggcagcaggccttcgacaggggcgggaagcggcagccattctgtcttggacgcgggagaggggttgagcagcagccagccctggccgcgcgaggcttccccggaggcggcaagtttggcggcgcgctggttcagaaagtcttccaggatttggcggttaccggcgcagatggcactggcatcatcataaaccatgccgatcgaggagccggggatgatgtcgtgaaattgcagcagcaaggtatcctgccacacggggcgcagttcccggggatattcttccccgcccgtgagcgcggccagatattccgccgccctgagcagcctttccgcccgcgcgttgtcccgcttcatccgcgcctgggtggtgtatgtgccgcggtgatactccagataaagctcgccgggcatcacaggcagcagggagcggtccagagccttcaggtgctcaaaatagtctgacgacctggcaaagcggaacttcggcacaccctccaggtcgcgctgccggaggccatactccagatgcgcctcggtgggcccgccgccgccgtctccgatgccatagaggttgaggaaggcgtcgcaaacctcgctctgggcgaagcgttcctccgtctttaggaaggcggagggattgttggaaaagttgtagtcgtgggtgggtagttgttgcgccagcacccggctgccgtcgatgccctcccacaggaagaggttgtgggggaaggcgttgctttcgttccaggagagcttttgggtcataaactgctccacgccgcagcccttcatcagttggggcaggttgccactgaagccgaagcagtcgggcagccagaggacagccggctccacgccgaactcctcacggaaaaagcgtttgccatacatgaactggcggatgacggactccgcggagatgagattggtgtcgaactccacccaggacgccccctgcacctcccacctgccttccgccacgcgctttttcacctgcgcgtagagagcgggatacagctccttcatccagagatagagctgggcttgggaagcgccgaagatgtagtccggataccgttccagcaggcgcagcgcgttggcgaaggttctgccgcccttgcgtttggtttcgcgcaggggccagagccaggccagatccagatgggcgtgcccgacgctgaaagcggtgagcgcgctggcattagctggcttggcgagcaggtcgtccaggatgccagcgcaggcttcccggtcgttgttccaaaggtcgcaaacccggttcagtccatacaggatgcgctgcctgcgggtctgcccattggacaggctgagcgcaagatccagcagcagttcgatgtcccagagcagcttgcgcagccggggatcgcgccagaccaggctgcactcccgcagcctatactcgctttttcccccgccgaaaaggtcgttggcggcagcctcgatcagcagttccacccgctccccttcctgcaggggcaggggaacgaaatacttggcggcgttgtgataccagtcaaccttgggggtcaggccctgccagggcgtttggtctttgaacacgcaggcttcgccgtcacaatcgaaccacagccccagttccatacccgcgggggtcgccggagcctgcccgctgatcctgaaccaggcgctctgccagggtttgccccacagtccgccgacttcgatctccttgaaactcatcgaggcaagcttttcctgcgggatgggatccgccgcgctcacatactccgcccgcacgggcagcttttccccgtgcagcagcgctttctgcctctccgcgaggcgtttgatccgctcgatatggatcttttcgttgtgcattatttctccatgggtaccacgatgccccggataatgatattctggaagaagacaaacaccgccagggtggggatggcggcaatcaccagggcggcatagcccactccgctgctggcgcgctgcagtagctcgtagatgtgcaccatcagggtccacatcgactgatcctggcagaccaggaaggcaaagaggaagttgcggtaagccgcgttgaaggcccccagagcgataaccgccaggatcggcttgctaaggtacatggtgaactgccagaacatgcgcagctcccccgctccgtccaggctggcgctttcatagatttcccgcggcaggctatcgaaaaagcccttgagcaggaagatgaagtagccatccgccgccgcgggcaagaccagcgcccaaaaggtgttgagcaggttcaaacgcttcagcatcagaaagttcggaatgcccatcaccatcgccggaaaagccatggtgagcatgaagatcatgatgacctgatgcgtgaagcgcggtttgaaacggctgagcgcgtaggctgccagcgggttgaccgtgaccgcgaagaagatggaaagcagcacatagatcagggtgttgcgcagcgagcgggcatccgccagcatctgatccagcgccatggcatagttgcgggtgagaaactcccgccggatggcgcccttgcgctccagaaaggtgcccctgtcgatctccgcgctgggaaaggggactttcccaaagcccgcgtagctgcttccccacgcacggttgagcgcgccgagggagccatacttatcctccagccagtcccggaaccccgccgccacgctcactatcctgagttcttcgggagccgccctggtctggatatacagtgccagatcgtccacctgcgcgccgctgtccggcaggcggacggggatgccgacctgctcgaaactgctgtaagatgcctgccaggcagtgttcagcaggctgatcccaccatacttttccttcagcgcccggcggaatcccggctccgcctccggggaaagccgcagatgctggatggacagcacttcccgcgcgtattccagccagtaggggcgcagcgggtcgccccgggcgggacagctttcgggcaggattatctggctccaggaggagtagctggtacccaattccttgttcagcttgtccagattgccttggaaggtggggatcaggatggcgttgacaaaggttccgtccgggttcatatagagccgctgccagtccgggcgctgctccttgaaacgccggaacctgcccagatagccttcggtggagctggcaaagttgcgcaaaaagatgtccttttcctccaccgaaatctcttcccagcttttggccccggtgttgtagcggcggttgaaggccgccaggtcgccgccgttttcctcgcgcagcagcttgcggtattgcctctgcgccagcggatagaccccccttccgtaatgctccgacacatagtagaaattgactccgtagtccccgccgcgttcccgcagaaagcgcttccaatcctcatacacggcgggattggcgtccgagggcag

SEQ ID NO: 550 - DNA, 29965 bp, Artificial Sequence
  Synthetic Oligonucleotide
ccttgaaatttcccacaaacccgctcacggcgctgacctctgagtaggtcatgaggtggatattggggtgctgtttcaccgccgtcatcttgggcgtcaagatacaggcggcgcaatcgagggtgggaaaggtcttatcaaattgcgccatgtgcccgcctatcgacggttcgcgctccacaaggtaaacctgcttctccgcgtccgccagcgtcagcgctgcctggataccggcaatgccccccccgacgatcagcacattcgggttgaccggaaaccgccggcgttccagtttctgatgccagatggcgcgttgcacagccgccctgatcagcgcttgggccttaatggttgccatcaccgggtcatcggtaacccaagcgacgtgctcgcgaatgttcaccatgtggaacaggtaggggttttggccggcattggccgtagccttccgaaaggtcagctcatgcaggtgaggggagcaagaagcaaccacaacacggttgagcccgaattcctttgcatcctggccaatcaggtcctgccctgggtccgagcacatgtatttgtagtcacgcgcaatcacgaccccgggcagtttggaagcgctctcgaccgccgcttttatatccaccttgccggcgatgttcgtcccgcagtggcaaacgtaaacgcctacccttacaccattgttcccattacctctcatgacagtgtcctctcaccttggatcacgaccgggaagcgagcccaatctcggcccacaccgcagtcaggttgtcgacacgacgcttgccgcttccgccacgagctcggtcaaatccttaacagccaaccgcgcctcgaggcccgttgtcttcagagcgtccgtgaacatcacatagtctttcgggcaagccaccaccaagaattgaacgccttccagcgccgctgcttctcgcacgcgactttcactcggacgggcatggacctcgccaatctcctccatccagacgcgacccccgcctccaccgcagcaaaggctattccgacgcgaacgcggcatctccttcaaatccactcccaacgcacgcagaaccgtccgcggcgcgtcgtacactccgttataccggccaaggtaacagggatcgtgataagtcactcgataaggcaagctgcgagtgactttcaactgcccgtgctggagtaagtctcgaatcagttcgctgtagtgatacacggagtgctgcccatggttgagatccgggtattcattcttaaaggtgttatagacgtgggggtcggtcgtgaagaggttattgaactgggctttcttaaaggtcgccatgttcttttcccgcagcagctcaaacaaaccctcttcgcccactcgccgtatgtcatttccggagttccgttccgcttcatatacaatcccgaagttggtgccggcagcgtgaagcaatcgagccaacgactgcgtgatgtgctggagcgcaggatggtagcaggcgtattcgcccaagtaccacagccattccaccggctctttacgggcgtccttgggtttgaaatccagggcctgggtccacacggcacgctttcgttcggactggccgaaagaattgccgtagcgcgccaagttgcgaagcgcttcttcgaggtgtttgtcaacctctccccgctccaccagacgccggcgcaaatccaccataatggacatgtgctcattcagaacgggacagcgctcggagcaagacagacaggtggtgcaaccccagagctccccggcggagatcaggcccccgatcatggtcggttctccaccatccgctgccacccgcgcgtggccgagcagatcggggccgtaacgcaagagctgttccttcaggttgtgaaccaactggcgtggggaacatggttcaccgacttgacggctggggcaggcacgctcgcaacgtccgcactccgcacaggcaaaggccgaaagcaattggcgccaggtgaattcctccaggcgttcggctcccaagcgtacttgctggtccatcggtgccgccagacgcccggtcggctcgagtcggctgaagaacgcgctgaagggagcggccaacagatgaaggtgcttggaagaaggaagataggcgagaaagaagagcacaatcagaacgtgcgcccaccagaacaaactatggaaaagggctgcatttgcccgcagcacggccgaacttcccattagccccgcaagccagttgcccacagggacccaaaccccacccgctagcgatgacgacatccggcggaaggcctcgaccagtaggaaggtgagcatgagtgacgcaatcaagatattcaccagggtcgcgtcccacgttagctgcaatcctgcggggcgaaggacgaagcgccggaaggaggagaccgccaaacccgcgagtaccagcaatgcaaagacatccaccaccggagccaagtaccggttgctctccatgccgggcaggtgcaaaaaagggaagagcccctgcaagagcatgccgctggtggacatcaagaagacgagaaacccgtagaatatgagcacgtggggaatgcccaccaggggctcatccaacagccgccgctggccgaagacgtaaataagcactcgcttcaaccgttccgggatattgtcaaagcgattctctgctcggcccaacttaagcaaacgaataaggaagacaacacgccgcgcaaagattcccacggccgccaggaaaaacaaccagaggacggcccagccgggtatgaaccctagttttgccgttgtaggtatcatgtgcttgccttcttcgtggcttggttgctgacctcttccgtcaataacggcaagagttccagcgcgtcaagtaccgcgccgtagtgggcgacgctgaaaatgggcgcgttcgggtctgtgttgacagccacaatcagctcagattgtttcatcccttccagatgctccggcgcaccactgatcccaaatgccaagtacagcttaggtttgacggtcatgccggacttcccaacctgtcgggtgagcggcagccagccctggtcgattacgggccgcgaggcgcaaactactccgctcaaggctgccgcgagctcctccgccaaagacatattgtcggcgttctggatgccccgtcctacgcccacgagaatgggtgctttggtaatatccacatctcctgggggcggctccaacaatttccgaaacgtcgtccgcgcttcggggagcatggcgggcaaagcgatgttgcgaagttcaggcttggtagcaacttctccaggctccttgggaaacgatcctggaaccacggcgaccagggttgtggcctcaggcagcgccacctccacaaagactttgccaccatagatctggcaggttgcgaccaactgcccgtctctggactcaagccgagtgcagttgtcaaggcatgggacacctttgcgcgccgaaataagacccagcaactccaggccaatcgacgtactgcctagcagcaccaagcgcggttgaacatcttcgagtatggcctccagaactgctttggtagagtcggaagcgaactccttcagctccggtcggtccaccaggcagacttggtcggcgacccctaacttttcgaccaacccacccacttcatggccgaagacagtaactaacagtctgctgtccaagctctgggcgagttcgcggcctttacccaagagttcgtacgttatatcgttgagtgtcccccggaaatgctcggcgaaaactaggatgtcgttgcgcacacttcacctcagtagacgacgttcggaaagaaggctcgtgatttgtcgggcggcttcctgggcatcacccgaaatcatcaccgctcctgcgccctcctcgggcttgaacaggcgtgtgacgtcaaggggctgctgactcggtggtgcgacggaaacttcctcgaccgttgccgtcttcatcacttggcgcagacggctgatcggaacatagcgcggcggctgttcggcagcctgaatgccgaggacggccggcaggcgcactaccagctctgcggcatagccgcctgggtactccttctgcactatcaccgttttcccatctccgtcggcttctgctttccgaatcagggcagcataaggaaggtcgagagagccagccacgaggccacccagtgagccatccaagtcgtcgatggcgcgcacgccggtcaggatcaagtcaaacagcccgccaccaagcaaccccgcgaagatctgcgccgccgcgtggttgttaaggggtgaatcgagccccgcgtccaccagaacggcgcggtcggcgcccttggcgatagccgcgaccaaagaatccctggcttcgccctgattgagggcaaaaacttcgacgcgcccgcccactttctctttgagcaggagcgcttgttccagcgcatgatcgtcggactcactgaggatgtagcggaggtaattgacgtccaaggccttgccgttcgggtcgatttccaaaccctccaccaagtccggcacctgcttggcaaggacagcaatgttcatggtttttccctccctcaggcgagtcccatggaattggccaacatttcgatgatgtcgcagaccatgagtttcccctcgtgaccggtgatcttcacggcatcctcaaaacgggaaggctcgtagggacaagccaccgccagaatctcagccttggtggctgccgcctgctccacgcgctggtcggccaaccgttcctttacccgttcctggatgaaacggtcgaggtaaaccgtgaccgagcccccgccgcagcagaggctggattcccggttctggatcatttccaccaattttagccccggcagagcctggagcagcgcacgcggtccgtcgtattcagacattttccggcccaggcagcacgagtcgtgatacgtgacggtcgcgttcagtttttgtttgagaagcggtttgagttggtccagtcgctccgcaaggaattgggtatagtgctgcacctcaaagaccccgcccatgcttggatagatattgcgcaacgcacggtaagcatgcgggtcggtgaggagaatttctttgaaacggtacttattgaagatatcgatgtttcgttcgatgtgcatctcgaagagaccgtgctcacccgccagccattcgcaatcgccgatgcagcgctcttcgtggcccaaaatggcgaagtccacgcccagggcgttgaggatgcgcgctagctttcgcgtgacctcctggtttcgcggctcgaacgagggggaacactccacgatccagagcacatccaccggccgacgcagttgtgaaatgagtgggacccgcacgcccgcggttttcgcccagtcggcgcgcttgcgcggagactcacccatggggttcccgtagaggtaagtgttctgcaaagctttttgcaggtccgagggcagcggcttccctccagccattaccgcggcgcgcagagcggggaaaaggcggtcggaaacctgcaactggctgggacagcgtgttgcacaggtgtgacaagaaacgcaaagccatggagtgttgctttccactacctcgttaaaccttccctccatcagcatcttcaccgccttgcggggtggaaagtccatggcttttcccatggggcaagaagcgctgcaaacgccgcattgaaggcaagcgcggaacttgtcttcagcgctcgcaatttcaggaaaaaggacattaggtttgtccggaatcggagggacctgaagtgtgcccatggcggaactccttcgaccgtctatgactatcctctagttctctcaggcgggtgctttgcctgtcaccgcgccgccctttcccactttctcaagccctgcgaatcgaggaacccttttcagcccgaatcccattccaacatgagatggcgttacagcatcgagtgggcaaggaattgttgtcgcaagcaggcatctctctgaagaaccccaaccagccgagagtgtgggaggtgcgtttacacgtaacttcaaacattacttcactggcacgagatcggccataaccgcacttccgggatgttatagcccgagtgcagattcttgctctcctgcgatcctaaaaacggacatgttgtacttggcattcttgggagcgtgctgcattttgcatcaagcgcagacaagcatgggaccttcgaagcggcactgtgtataggatcaagtgccgaccactttcggcgacaactgcgcgagatcgccctctgagcgaaatcaccctctatcgaattggctgcttttgttctacaatttcctataactcgctataatttaagtacttccccacaaagaagcaatttgactaaggaccgcgctttagccccgtcttcgcagcagcgacgtaaatgaggttgcggcccgcgcgaaatcacccttcactgactgcacattgttgccgacctgcggaaccggctcaccttgtgtggacatccagtcaccgaaccgggcacggggccgctcgcgttcgaaaggggtccatgaagtgtcgagctatctccagcaggaggatcgccgcaaaggtagccgcttgatgggtggcttatggttcctgcccgcttttgccattcacgagtgcacttcgttacgtttggcggtgagaggccacaagataacgccttcgcgaaatgtgtcgaaatggtgcccgttctggccggatctagcccagatggaaatcactctgggattcaagtgctcatgtcaatacaagttttggacgcgaaagactcgcccactggatatattggcagcctccatccataagtccagagcagatttgaccgaattcggcacgggcactgtgcgaatatgccctccctttcctattaggtcgacaatggcccagtaatcctcccttctttgcaggtgctcgacggtaagatgcgccaactccgatcggcgaaggccgcacccgaggcagaccgcgaggatgcctcggctgcgtttgccacggaccgtttggaggtcgccggagtctagcagcgctttggcctcatcggaactgagccaattgcccagccgcaccccgagtttctttgctcccttcacgcggcgaattcccgccgccaactccgggctcagcaggccggtatcggcggcctcataggccagtcttcttacggcggccagtcgcaggttgattgtggacgacgccaagtgacgggcttccaattgcagtttgtagcgcaggacgacggtcttgtttaaagccagtctgggctcggaacaataccacgcgatgaaatcgtcgattgcgaaccggtaggagcgttgagaatcgggcgagcccagagtattcaggacggctaccttggcgtggtccaaatcgggaaggcgaaggattcgttttggacgggcccgcttctttttagggcgtttgctcatcatggctagcggtctccttatccgctagtccatgatcagccggatgaaatggtacgggacgagcagggcgtctatcgggcagaatccgcgcttgggctctgcaggggctggtttcgccctctgcaagcacgaaattgctcggcccgctagaccacgcccatgccagcgcggcccaccttctccagtattcgttagggcgaaatggtcttgcgcatcagcggaaatcctcaatcaacaccgcgtcagtcgggtccgtgccacggtagagggccaagcgtcgatcgcgggaccagccgaaccagaagattttgtcggaagtgaaatgagtcaccggcttgggcgggcctgccagcccgcagccggtggacggtcgtcggcgtttggcctggcactgtacgactcagcgactttttgtacttgtcctttgttttcatagacattctcgctttgttcccccgatttttgtattttctcgcattgcttgcttcggggtagccgaccaaacctcttcagcaccctcttccccgaggagggtcgcgagagtagcgagccaggtgaggggtttcttcccgtcgagcctcgcaacttctgaattcggttcccgccatagacaccctaaattgggcattgatatacttgactgacataaggaaacaaaccgagtagctcccggcttcggattaacgagatgccccatttcgcttagcacccaaaacgaaaaaggcgagaacgacaccggatataaaagcccacgtaaatgatcccgaatcgccgtttttcaagaagaagagaaggctcagaaacagggtaaacccggaaatgattgaaccgattatacatagaattctcccgatgcctttgaactctacgtctaactctagcccatcctcgaaccgagaaatgatataacaagcggtcatgaacagaagaaatgccccgagtcccactacacagctccatgggctaaacttacctgcaacagaacgtccaaactaagaatcgcggagtcaattccagcccaatgatacacatggccgccggaaaagcaaggcacatcctctggcttgtcatccacgaaatcctccccgaaatcagtttgcaggcccagtgtaccgtccaaactccgcattttggacatatgccgcatcacgcaggttaatcctatattgcaaaacattggaatgctgtttgagtggaatgagcgtgaacgagttcacctgagcctcccactggcagccgtttggcctgtagtcaaaccataggcaattgggggccataaaccattccttcgtgacgaaatgggtgatgtactccccgtttgcgtcaaagaggcgcaccagcatcctggtcaaggacgagcggcctccattgaactcgcagtcgaaaatgatggttaataggccggtattgcgattgatgaatatcctgggattctggattttgtactcgttgaattgaatgagggaatctgaggctaggcttatgtatccaacatcagcattgatttcatctcccgattcctttgctgtcgcctccatcgtttcctcggcctgtccggtcttctcggcttgcccggcttggccagcctgcactttcttggcttgttcctccagcatcctttgccgtttttcgtgctggccgcaggctacgcatcccaataccgacagggccagacagccgaccgcaatcatatatgcaggcttcgcttgtctcatagcagattgtccgcttgactcgcttttccgactttcagcttctttttcagaggtgttttatgtctccagaagtttatttattgtggttaaaaatttgtgtagcgcttcggaaatttgctggtccgtcgtgttttcctcctgaccaacagctatttcgagttgacgaagtggaagctgaaattgctcagcttgagaaacaacttcaggaacaggggcaatgtccccaaagtgcttgcgataatgtttaatttcacgagctaacccggctgtcagactggcaagctgaattaggattttgctcgttgcattgtccattgtctgtgtcctccttcatgtgtaggcgtactttctgcgcccggattatactcccgcccgactcaaaaaacctgtggaaaaccccacttttttcgtagaaatccatatcttttaggtatattataagtgtggatacaataaccataccaactaccctccaggaagctattgttttcttctccaaccccgacaactgccacgccttcatggccaatctccgctggccggacggcaggataacctgcccccagtgcggctcaaccgatgtcaagtatctgcctaacgcccgtgttttcaagtgtttccagaagcatccctgccagaagttctccctgaaggtcgggaccatcttcgaggactcgcccatcggcctggacaagtggctcccggtggtgtggatgctggccaactgcaagaacggcgtttcctcgtgggaagtccaccgtgccatcggggtaacgcaaaagacggcatggttcatgctccagcgggcgaggctcgccatgcaggacggcatggcgggcgggaagctgggcggcgaggtcgaggttgacgaaaccttcatcggcggcctgtcccgcaacatgcacaaggataggcgagccgaggcaatcacagggacaggtccttcgggcaaggccatcgtggcggctctcctacagcgtggggggaaggtccgggcgaccgtaatggagaaccgccgcaagaaggcattgcagcagctagtgagggagaacgttgaggttgggtcgagcgtctataccgacgccctgaagtcctacgaaggactaaatgagtttgcgcaccaagtcattgaccacgccgaagcttatgtccaggggaatgtccataccaacggtctggagaacttctggtcattgttgaaacgtgggataaggggaacctacgttagcgttgagcccttccacctgtttcgctatcttgacgagcaggcgttccgctacaacaaccgcaaggagacggacgatagcggcaggttcacggctgcaatgaggcaggccgtgggaaggcgtctgacctacagggagttgaccggaaagacggcagaggcggcaggctaggcgctgggggatgcagacggcttgcctgtccgtttcggcccccgccgattcgggttgcttgcggcttccttgcggcgttcctcgattcgtttctggacctcggaatggggaaccgccaagacatttttcatcgtgacctcgaaccttttccatgcctcgggaccttcgaccatctccatttgacgcttcatcacgcccccattattcatctagaagttcagtgacaagtggcttgaactgacctaccaatttcccctgtttcccctcattcacgtatcaacatcgggtgtttcttgaagtatgccaaaacccacggttcaattgacccttatgatggttcacatgagtattttacaatgtttgcgcttaattgttgataaaggtcctcggtgtcagaatacccggccagatgtcttcctatcagaaaggtgcaaatatcggccaattgaatgcccctagaatacttggaatccccgaagtacatatcatcgtgcagatgctctaatattcccctgaccggggggctacctatatcccgtttacggaacaaatggaaagccttctgcatggcagacttcacggacttatcaccgtcatcgcaaatcagcaatcccaagtcctcgggagaaatctcttgaaaccactcttcgaccagtcttacgcagcgccgaaaggccatgtcaactggactggcagtggcataatcagtggcacatagctttgccaaatccaccgccccataaatcaccgggatgtggaattcatccacagccgcaatggcggtcgagagtatttgcattgcccgctccctcgtgaccttctcaaacggcttcctgcctgcaagaatgtcagatgaatggaattcttcgattttttctcctacatccggctccaccaattcataaaggtagtaagctagatgctgctccaacttattaaacactgcatcgttgacaatgacagcacctatcaattggaaacgctgcttggtttcttcttgtttagagtcatcaaggtacacaatatgcacattctcccccagccatcggcgagtatgttgacgcaattcaatcacagcgcaccccctattctgtctttaaccgttgaataagccaagcagtttgttgtcccagtcagcgccgaaataggaattgactcgctgccccggacaaccgaaccggccagcgccgacatcagaaacaagactaggccatacatcctcacatagactaaataccacctgtggcggcgaaatttgtgctagaatccgccccacaggagagcattccggaggtgaaagtgagcaaaggcagcgagaccgacaaagggcaaacggacgaagaattcacatatgacgagatgtatccgaattccctggaggaccgccccggatgcctaaagcgggaatggctgagaaggacgggccacagcgtggttagcataaagcagatggaaaaaagaaagcaattgcccgacctgcccgaccccaagaccttgccattgaaagaactcttctttgcacgtgctgattggataagcggctacgtgctggacctgtgcagggaatccccaaactccggcagccggtactaccacgaattctgcgacagcagcaaggtcctttccgaagaagaacggcgatttgttgacggcatagaagcaagaatctgtggcccgaaagaaggaagcgcagaatgggaagagatcgaccgggcggaggatgcatggggaaggaagcaagacgaaagaagagcgaaggaacaagcggagatgaagaggtgggagcaggagcagcaaaaaagaaaaaaggagtggtataagcatatcaccccgacccagttcctcatggcgcttggcgggacgctgtttctcacggtcttcctggccatagtcgtaagcctcatgctcggccccgcaggcggaatttttgcggccgtgttaacgtcgccctatgctttctacaagatatgcaaggaattcgcttcctgattttttataaaattaagtactttcaaaaaatggatagaggaatcctatgggggataaaacggaaaacaccctgctattcgtttgccggtgtatgaagacggtgattactcggcaggagaacatactggagttctcacgggcagcgtttgcggctctgtgggaacgtcagcctttagaacagactcgtttatcaaggatacaagttcttctaaaagagcttgacgacgttcgaacacttgaagaaattcaagcactagggaaaaaactcgatgctgagattcttgttttggagaaccctcaaacaaatccataatattaaccccatttaagagggcggaagtcgctaaacttgccgatagaatcgcaggttattggaaagacctttcggtacactgtcagtcaagtatatcaatgccctaaattgggttcgtttttcagttcgttttgagtctgttttccaaacgctccttgtgttttcaataacatactggcttcgttcgtattattttgtgttttttcggagtcgtgcctccccgctcgcttgccaggttcccgggtagagaaattggcgagtcggaaagtccaggaacggcccgccgtctccccaagctgcgacccgaaagatggggtcggcggttggcttcccaactcctcgactctttgactcctcgacttcttgactgcacttggaggcagaaaccacaggcaggaacgcgaaaacaaaagaggacgcataacctatccggcagggctcaaccccctgcccaaccccacggaacaactgtagcctatgtcgtcccgtttgtcaagagaaaagtgcaggggacaaaaaggcaggtaccaggcgtcaggggtcgggtcacgggggcgggggaaagtaaggacatttatggcgcactacactagaggcggtaaactccaactggccgggtgcgacatggcgtctggacactggcatgagggagcagtgcactgctgaaacacagagcggcgctctccgccagcctgcggttcgcccccacgcgcgtggggacaacaaccgccgcgtccatttgcaccttgccgagaccggttcacccccacgcgcgtggggacaacgaccgctatatgctgcaatttctcgcggcccacggttcacccccacgcgcgtggggacaacacgttcacgcgcaccgcgcttgcgcagctcagcggttcacccccacgcgcgtggggacaaccccgaggccggctccggaactccgagccacaacggttcacccccacgcgcgtggggacaactgcggaggcgccgccctggtctatgtcgaaatcggttcacccccacgcgcgtggggacaacgaccttctcgagcgcggcgtgatgggcggcagcggttcacccccacgcgcgtggggacaactcgctcgacatcaagaagcaggatttgtacaccggttcacccccacgcgcgtggggacaacccccattgccgcatggaggtataaaacccttgcggttcacccccacgcgcgtggggacaacgcggtacaggtcaattttcgcccactcccaaacggttcacccccacgcgcgtggggacaacgatgatggcgctttcggtgagcgtctcgatcacggttcacccccacgcgcgtggggacaacgctgtcggcggacttggtaaagatcgggtcgccggttcacccccacgcgcgtggggacaactgggctcggcattcgccgctaccgggcaaacgcggttcacccccacgcgcgtggggacaactccgcggcaaggcgcgcgtgtcgggcaatagacggttcacccccacgcgcgtggggacaacggacttcttccgtgatcgactggatcaagaaacggttcacccccacgcgcgtggggacaacccgtgatagagaaatgcaatgtcggctgccgtcggttcacccccacgcgcgtggggacaacatcttgatctgctcctgaatgtaggggtcctccggttcacccccacgcgcgtggggacaacctggtaggccagatcgtgtcgtttcagcagggcggttcacccccacgcgcgtggggacaacatcgcgatcagcccggccgatgtgtatcccaccggttcacccccacgcgcgtggggacaaccggtcttgccctcggcggcaagcgccttgagccggttcacccccacgcgcgtggggacaacgggccacccacctcgagccaggacgcatcccacggttcacccccacgcgcgtggggacaactcgtctgcaatgagcggccctggaaactcatccggttcacccccacgcgcgtggggacaacacttcccaagctattgattctgcggcatacgcacgagaaaaaggccctcgaagtcatcgatgcagcgcgctgttctgccccatgttcggacacggaatccctgctcattatcgcttgagtggagaatcaggcatccgcctcctttggcttgggcgcaagccttttcccataaccgatcgcgaaccagagcggagacgcgtcccacaaacacccctgcctgaggttcgagaaaccaccgagtgagctcgcctcgcaatgctggcgggacgcgctcaagaatcagaaccaccatggttgggctccgtttcttcctcttctacggcgtgcaagtggccgccttccacggcgccctgcaaatcgtcccagagggagccgggggcggcggcatcaaggtcaaattcagagtcgggcgccgccgcttttgacagcatcagggcagattggatatccgggatgatcctttccaaaagccgtgtggatacaaacctgtcgcggcaggtgatgcgcacccgccgctcgagttgatcttgcgcttcggcggcggcgcgaaaggccatcggaacggtgatttcagttttgtacaagtcggccacatcgtacacaaaggagagcatcttgcccgtatggataaacccgagggcgggggaaaacccagccgagacgacggccgcatggcagataccgtaaaggcaggaattggcggcggacaaggcccggttagcggggtccgcctggctccactcctggcgctgatagtttcggccttcccaggcgatgccggcctccttggcggccttcgcgtaggcgtctcgaacccgtacgccctccatgccacgtatctgttgcagggtcaaggcggggtcgaacttctcggcaaaacgcaactgatagaggcggcgcaccacctgcatgcgaaaaccctcgtgcgcccacaggcgcgcctgatggagaaaattggcggcgttgcgcgtctcgcccatgcccgtggcgtagaagcggaccccctcttctccgcaccacgccactaggcacccatggtccgccagcacggaaatggcggcgtgagtgatggagacgcccggtcccagcatgagcaaggccagatttgcgcaaggcacgggcgtcttccccgcttcattgtgcagggcaatggcccggtcttcctgatccaccttgcagcgctcgacgtacaggtaactccatccgtcgctgaacttcggtagaatatgcagatcttgagttcgcatgtcaccaccacgggtctggcttgcgccgtgggctacacgtcgccgcccgctgagcgggcttcgggggctactgaaagcaggccgaaaccgaaggccttgccgggcccgatgccgtgaacgacggcttcacgaaatttagcagggtcctcaaccgtgagcgttccttcgagcaaggcggagcggaatttcatgcgcctgtcccccgagcggctgtcctggacggcaggcgtggagtccgggtcatttccagcgccccagccgatgtgcagagcgcgcaaggctcccagcttgaagccgccgttctgggcctttttagcgaaccactcccgtatggcgtcctgcgggtcctggtccttatcccaggtgagcgccacgcgtttgctttgggccttcggtcggccctggggatccgtccccactcgcggcctggtaagatcgatgcccgctgtgctggtctttatctttttgctcaggttgacgcggattcgaaagcgaagctgctgaccggcgctgaaacagggatcgagttcttttacctgagggggagcggcgaaggaattcaccagaagatggcccgcattttgaaaggcatagtcccaatcgggtttggtggcggactgcaccacaatcatggcccggccgcccagttgcgggtcgatgcgaaagagaaagccggaatccgcaccgcgctccacatggacttgcttcccgtcaaagtccgcgggcttgaagggcgcgaggaagtggggatctttttggggatgggagggaaaggccatgcagaggcgctgatgaacgtgataaaggttgcgcagccagagccgcccggggcggggacggtcggggttgtcaccgacgttgattaggagacaggaaatgtacatcctattccacctcctcggcgagcaatcgcctgcgggtttcctccgagcggaacctgacgatctcgtcccgcttgtcgataatccggtcacgccattgcgggtcctcgggattgatgcggtcgagtcccatgcccaggccgtattcaagcatggtcacggcgtcgtggcagaggcggcagagggagcgcaaatcgtccttcaactcgccgccacccgcgcgacggtaggtgatgtgctgcacggtggtggcgggagacttgcaaaaaacgcataagtgatggtcatcgtcgagccgctctttgcgccggtttttgtactcggtattggtgtaatccgcccttgggcggggaggcgccggcgtggcgctctgtgcgggcagaggtgcaacggtcacgccgccttcagccccgacgcgtaattgcttgcgaatgacgaatcgagcttcgtgcgagggcgggtcgagactccgaggcacgtcgtaccaaacgagcgaatcatcgggagcgtccggctggtctgcggttgggtgccagtcgagcagacattccagcgtttggggctgtgggtctccctccagccgtttgcgccaaggtaccgattcgagggcggagagcaaatcggaaaattcccctggcggatgctccagcaaagggcgcgagggcgggcagcactttctgccgaggtacagagtccatcggggcgacttgaccgcggcgtcaatttcagcgatcaggcccggttcaccctggagtgcaaccaagaacgacgcatcgcaaaggtactcgcggcgggtgagcatggccccgggcttgcttccaccctcggcagtgcgcatcggcatgccggcgcccacggtgtgataatcccaccagcggactccgggcgcgtcgatgcgtacgcccatgagcagccggcttagccttggaagccactcctcagcggcctctgaccgggaggcgcccaaggccgcgcacagcatgccgattacgcccgatttggtcggggcctcagccgtccgccggatgacaaacttcgattgctgatcgccccaagcctgaagaggcccttcaagccgaatgaacagcgtgtttgggctcacggggcacctccggattcaggaccactttctcgacctcctgccagtcgtggccgatttggttgagtacggccgctatcagttcgtcaagagacttgacatctttgtcggcaagcgggacctcacgctgtttctgttttccgttttcgctttccgtggtggtagccgtcaacggatagcggagattgggagagaaccagaaccgcttcgtgggcttgccgtatcccgtatccatgtcgttcacataatgggcaagctccgccacgctctgcgagatgatgtcccgttcgccctgaggagccgccggtttggcgaaggcgttggcgtagctgattggagtgtttctgacttccaccaacattccgtcaggaggattgtgcgcggcaaaactgttttgttttcccgtggggttgaccaacgccgctgcgcgaatgaactcgccgacggtatgggccgccaacttttcgtgatccgcgccgaagggctcgaggttcctgaccagcgtttcccaatgaatggagaaatacttgtaaaaacatgctgagccaaacatggcttcatccacgtaagctgcgcccgcgtcctcgccggggacatcatcagcggccacatagtagtccacctccgggcgggcctcatgggtggaaatcgcatgggccacctgaagcgatgcctcgacagtggtgttttcgagtactcccgtttcaagcatcctgccgcacagggccatgtccggcacggcgacggattcactgatcagcttcccgaactccgctgctaaggcctcgtccgtttttccgtcttccttctggaggagttcggccatccgtacaatcgccccttgcgtggtgtaaaccaacatcttgctcctctcggcactttcttgttcaccctctccttcctgcttttttgcctttttaggctccaggccgcaggccttgagaatgttctcggcgcgcttcctgacgtctttgcccgtcaccttttcggcaatctctttcgctaactggcgggtgcgcactccgccgcgcaattggctgaactcctcactcatgcggatgctgcgcttgagacactggctggaaatacgggagcgcaagactccgccaaaaaagcaagtcttgggcgcgcccaggtcatcccggttcaggttggccgggctgtgattttgaatggcgtgaatctggatcaacatgattctcctcctattgaacagctcaagaattccgtggcccatttgagccgggtggattcgcgttcccagatggaaagatcgttcgtcagccgtacccagtcgagtttggggtgcttggcagcgatgaggtcgattgcccattgtagggcgggttcgatttcagcaagcggcagcgtcagcatcctatcgaagcgttgctcgaaacgctttcgctctgttttgtcgccgggccgggagcgcgcgagttggcgagcgagcgtctccccgggtgaatgctcgaggggccggaaggcgtagagtttggcgacaagccacgccacctcacggcgaggcgcccgctgggtttgcgcccgcagtggccaccagagtcctgcgaaaaggtcaaagccctccaccgattcgtcgagcccttgtccggcatggttgcgcaagagcccgagctcaccgggtttcagccgactcagaacttcgacgtactgctccgttgcagtcacttgtccctcccttcgtttttgtggtttttcttcggccgcatgtccggctttactgcggcaatttcttgccgacttcggagagacgcgcttgtgtaaccgggtgaaagcgatttggcgactgcggccatcagcggacgatactcctgggcggcttcttgccatgcgtcgccgccttgggcgatcaattggtcaattcttccggaaaccgttctttcggcttggggacgaaccgcggcgacggcggagagaatttcaaggtgtccccttgtttgggaaatctctcgcggtttggttttgccagggagcttccagccttccctctgccacgccccgatgctttctatactctcctgaaccttcatgtcgtcaagcgcggtcaggaacggaatctcccactcggttgcttccaggtatttgtcattctgcactgtcgcaaagctgacgacccacaacctttgtttttccttcggcttttccccgcacaggattccagccacgactttcgtccacttcccagccgcagcatcggccgggccaagcgcgctgaaaggcttcacaatctcgtcgccttccctgatggtgtgcgggtcgttccacactcgtgccggactcccttcgtctgttcttgtgctgccgatacccgcaaagacacatcgacggatcagagcctctctgcgcccgcaggcgatgcagttggactggggttcctcgggagcgtccaaccacacgcggcgcggcacccacgttaatcccgttaataggggaacattgccgtgttgagggagggttatgtccggcttttcccatgtgggcgtgcccaggttcggctccggtcttttccgccacgagagacgcagggtttcggaaagcgagtcgcccatcggcacgatgtaggtcggcggtttttgattgacgcccgggggcttgccgcgcccggccgaggtagcaaagagcggcaggcgcaacaggcccattgcacagcacgccggacataagccgtctctcaaatctgtcccatgccggaagtgccagaagtttgtgccggtgggcacctcctgcatgagatagtcggccgagagtttcttctcaagacgcttaggcttctgttggtaaaaacgcctcccatcgcccagcaggttgaaacagtccttattgtcatcgagcctcttgaaccaatccgagggaaacgaagagatcgagtcggtttcgtctggaggattccccttgcaccaatagagaagcgcgagcaggaaacgcaggatggccaagcggtccatagggttgctggccgcgatttcgcggatgcggccggcttccgtaaacgcctcaatgacattcacacgtgtgctgatcccgtccttgtatagaacgggaatccacttttcttcgagcaggttatacttcactgcttcctccttcacggggcaagaggcgggtggtggggccgttgggtgatcgcgacccggccgcccgccaggtggctaccacaggataaacatgacgaaggtatacacctgggagggatgaaaggcaagtccgggagcagaactgtagcgcccctttgtgccgcgaagaaaaaaggctggctggcgcagagtgcaactctgcgttttggcgagacggtgaatcgtagagctgtgctcgccctgcggcagcccgccgaacttgcgctgcgcgccccgtgcgtgatatttttcgatgatgggcgcgaatgaagtattggagtacgtgaaggccttgccgcctcgggagcgccggaaattctttgaaggcgttcacgaactggaaacggcgccggaagtggggccggcggctagacggggacgcccgattcgctggcccgacgctgccgctcggcggcgtcgaatttgtggcgacaaaattctgcccaatttagttctgctggcgcgggacgaggagagctactaagcccgcatgatcctctacgcggacaccggtcttctgatctcgtattacctcaacgattcaaacgagcggtcccgcgatcatcgaagtgggcgaagaggaagagctaaagtgccccgcttgtggcaagacaatcgtgactgctgaggaggtggtagatgttcataccgaaacggacgcccctctcagctttagtgattctgttgccgcttccagcaatttgacaacacgcaatccagccaaaccgtcgttaaggggcgtttggttggtttcgatacactccaagaagtactccagttcgaccttcagtgcttctgtctgctcgatcttgggcgcccacatgtctcccgagcggtagctgacaagcaattcatagactccttccctgctggccatttgcacgcccctgtcgtagaccttaattttctcgacggcttccaagtcgttccacaccagcatctttttctctcccccgaccagcgtggttcggatcttcacgggagataaccagttaacgttgatgtgagcaatagtgttggacgggaaatacacagtgataaatgccacgtcggcatggacgttcaagtgagcctggccggtcgcgacgacagcctcgggttcctttcggatgaggtggtccattatggacaaatcatgaggcgcgagatcccaaatcacgtcaaggtcgtgttggaaaaggcccagttggaccctcgtggagtcgaaatagtagatgttgcccagttcaccttgatcgatcagttggcggatcttcttcaccgctccggtaaacagaaacgtgtggtccaccataatcttgaggtttctcttctctgccaattcgatcagcctctcagcctggatcgcattcgaagtaaggggcttttcaaggaaaacgtgcttgccgttttccagggcagccattgccagctcgaaatgcgtccagacgggagtgacgatggccactgcatcaacggatggtgaatgcaagatttcagatgcgtcggaggtaacctgcacatccggatatgcttgttttgcccggctttgaccttttgggtcactgtcgcaaacggcagcaacccgggtcgaatcgagggagtgcaggtttctgactatatttggaccccagtagccgtagccgatgaccccgatccgaatcattgtttcttcccgccaagttagagtcgtgactgccttcgcatatgcggcacaaccggatacggccgatcctctgccatcctgctgagctgcccccgagcaccaccccttaggcggtcagcacggtgggcactctattgttcgatcccccatcctctgggggggattgttcacactgctagtttcgctgccccatctcaaagcgtcaaaagcaccaaagtaccgagtaccctgttcacaactgtgcgaggacccatttcggaatatagctcgcggctggggactcatcccgtggactctttggctaaggggcgattcgggctgcttgggagtggcgttgtttggagtgaagcgaggcacagcgaatggccaagcgaggtcctaccgattgctcagatcccgctcttagcgaaggcgcattcgtgccaggtccacgctggcctggcctcagatgttaatccagcagccggacggcggcaaacccatagccaggcacatcgagtttgaactccccatcctccatgcggaggtccctgaggtttcgttccagtaggtcggtttgaattgctctccgaaaacctcgaacgctaagagccactggcccagacttcccgccgacttcccaaacccgcaaaatggtgcctccaaaggacgggtcatccgtcggcttcagacaggttgcgacaacatgcgatgggtcaacagcaacgcgtttcacggaatccggttgcggcaaattccccaggactgccaggagcggcgaacggaagccgcggctccactcgaatgacgcaggcccgctgaaagctccggcgtgtgccctgagcgagtaacggaaacggaagtgtgtggccccgttttgatctttggttgagtattgcggccccctgctgataactcgcttttagagatgcccaggtatccatcaccagccatcgcggtgaccatccctgacacagtttgggtgtatgctcttggcaggcggcccccgcgtacagttgcggtctggtaggcagtcgtggtcttgctaaaccggaggatccatggggctctcaaaatcaagattcatcgccggctggcagtgcctcaagcgcctgtacctggaggttcatcagccggaactggcagcggagcctgacgaacaatccatggcggtcttcgagcagggtcacgaggtgggccgatgggcccagaggatgtttcccggcggagcgctcatcgaggcggggcgcgaggagatggacaaggccctccggcaaaccgagcaggcggtagcggacaggcaacatcccgccatcttcgaggcgactttcacacacgacaacattctggccagagttgacatcctggaaagactgcaccggaacaaatggcggctaatcgaggtaaagtcgtccaccagccgctttcattgaagagcgtcttgcctgcccttgtgcccgacatgtcctacgacgggatggaagtggccgaaggcaacgacgccggccttgcctgggaaaagatggttcatgctgaggcgggaaccgaagagagaaggcggcttaaagaggccctcctggcttactgcaggcaggacacgctggcaatggtgcggctgctggaagttctgcaagcagcatgaaagggcattattagaaaccagggctgacaaattcttggatggctggctcagcccactacgggtcaaccgaatgccaccacccagaggaggcattatgcaactgattaccgatactatttccagtaccaggcttggcaaacccaagacatttcgaaatctcacgatctttcctgtattcggcaagggcatcgcgcccgactacataaccttggacgaagctctgaccaacaagtctgccaaggttgccgaggtgtccgaaggcggcagtgttccggacctgaaattcatcaacgacagcgaccacccggtttttttgatggagggcgaagaactgatcggcgccaagcaaaaccgcacgctgaatttgagtattctcatttcggctaagaaagccgtcacaattccggtttcctgtgtggagcgcggccgctgggcacgccgttccgtggatttctctgcggcaccgcgtgctcaatatgccgaaggtcgggctaggaagatggcgcaggtttctgcatcgctgcagtccacggggaccagatactcgaaccagagagcggtctggcaggacatcgacgagaaattccaccggctgaatgccacttcccgcacgtcggccatggcggatatattcgagcaacactcggcggggctggaggaatacgttcgttccttgccgccagaggaggggcaggttggggcagtcttcacgatcgagggcgaggtgagcggtttcgagctctttgacagccctgacacgctgagaaagctctggccgaaactcatgcgcagttacggactcgatgcgctggatcgggcgggctcggctggagagaaggggaggaatccaacccctgatgcgggacgtgatgacgtggacgctttcctccaaagaatatcaggaggcgaagcgaaacagtacccggccgtcggagagggggaggatatccgcctttccaatatcggcctgacgggtgctgctttggcagcgcgtgggcgcgtcatccacctcagtgcgtttgccacctgagggggaaccgagggggagggtttagaaggtttcttcccgcgggaccctcatgtagcttggttttacgacggcaaccaccgccaacgcagcagccatgcgtaaactccaaggaaatttgcccttctccccatctgacctatcagaagtcggagaacctgccggccacgggacacgttgatgcccaaacggcaggcaaactgggagcggggccggagtcggcccgaggcgacttcaaagccgccggcaaagatgtgggaaggggcggcgagggaatcggccacgagatgaagcaaggtgaacccatcgcggcaggcaaggatttgggtgagggtgtaggcaagggggcaagaaagtcggcaaaggagtcaagaaagctgcctctccccatagcgacagcagtgacccagaaaagaagcaacagcctgagaaaccgaacaacccgcagtggttgatttttccattgtctcgtcagtccggcgaagcaccgagacgcgcgaaagctgggggagctacaaactcctgccttcatcgcgccgccggcggctcctggtcggtgggaattccaaccaagttgcgatagaacgcgaaggcccgattgaccgtggaagactcatttcccaggaccaggcggttcgcgttctttcctgtgcgcaccatgccgtagcatcgccagacgttttccgattcgcgatccagaaagtagatcgattgcatctcacccggttggaagatggttataaagagatagcgcatcgtgctgacgttctcgacatcgaagacgagacggtccgccgaagcctcagcaatatgcattcggtagatggctttgccagaaaggttatcgacctgttcaaagtagagtaccgtgccttccttcatctcatcgggcgtaaagtcttcgcggcgttgactaggctgcaagctggtcatagcgtaggcgtccacaattagtgtttgccactgcttgtgagtggtcgaccagtagcgcatgcccgcgagttctgaaattgccccgatgtggcgaagcaagccctcagtttccgaggtatgacgaaaccgcgcgactgtggtcaccaacgttgtaaagcccaccgcagcccaaccggtgcatgcgggcggtctccagtcgcggccgaaatcagacttgctccatgacttcacgatggccgaatcatccagaccaggatagggcggaacggcttccttaccgcatggcggctgcggtcctaattgcgcataggagtgcgcctggcaaagcagcattgccgacaatacaaaccgaacgaggcgccaggtccaagcccggaggagcgtctcatggcgcggatctgcgctcatcggaccatcatagttgttgcacggggtccgggtctggtgcagaaaacgcattcgaatacaacttgatcggcaaatcggaattcccgctcttaaaaagtgtgtagggctcacgaccaatatgactttaaaccgaggcttcccctctgtctgagcaatttcgaccacatgtcagagcactattgaactaacgagcaaatcacctgggcatacaaaggcggtacaggttaattcgaaattacgggaacgggcgacctgccagatccgtccaaacgcaggagtgagtagcgccgttcgccggggcttcgatacctcacctggcacggttgttaagaacacggttcagaatactaatcgctcccacccaaacaagggcagcgcaatagccgcctaagacatcgctcgggtaatgtactcccagatagatgcgtgaaaatccgataagcccgacaagcagtgtagcgcatgtccagataaagaatcgtgccctcggtgttgaagcgtgcgcggaaagaattcctgccaacgccccatagaaacaaagcgatccgaaagcatggccgctcggaaaactatacgagcttggggccgtcccgaaaaaggggacgggacgcccacggtggaatgcgtgcttcaacaacagatcaagagcgaccgcacctgccatggtaatgcccatcaaatgagccgatcgagggcgatggatgtataaaaatattacaatcgtgaggagactcagcgccgccaggagtgttcccgaaccgagaaatgaaaaaacttgcatcgcgctggtcattcccggcgacgcgagtcggtggattgctgcccgcacggcatcatcgaatgcctgcgtctctgattggagcacctcttccgccagccagccgaatgataacagggctgcggcggcaacaacgaagctgccgatgaggaagaaaccgagtttgacctttttgggttcggtcacagggagtccataatacgtggaatcgggcactacggcgaggtcgtttttccttgcgctcgcttattaccggggcagaatcatgaagtatatgggcaattagaatagttctggcattgacggattgttcgctataatcggggccatattttgcgcttgagggctggttcaagtgggactatgaccacgcggtcgtttgagcatcagtgtgcctccagaattatccccattttacggcgactctgactactctcaacccggattttcccgtcacggccatgaccgggcgcggacaaaatccttgaaaacgaactcggccggagttataaacgattggacccgcgccggtcgtgggccgaagttatccaggaaacccggtattatgtccgttcacgctcaaaaccacgttagtctgcatcagcttccaggccacctgatccacgcgctgcgccgccacgccgatgaacgcccgcgacaaccggccttcgtccatctgctcgaaggccagggtgatcacgccagtctgacctacgcccagctcgatcggcgagcccgagccatcgcggctcgtttgcaggacatgggcgttgccggccagtgcgtgctgctggtctatccgcccggcctcgacttcattacggccttcttcggttgcctgtacgccggttgcgtagcggtgccgacctacccgcctcatcgccaccgcatactcgaacgcttccaggccgtcgccgccgatgccggggcccgcatcgctctgagcaacaccttgggcgcggctcagttccaggccagaatggaagcggaaaaaagcggtcaagcggccacttcctcccagctctcgtggctcgccaccgacgagattcccgacgccttggccaagcgctggcaagaaccggccatcgcccccgacacgcttgccctgctccagtacacctccggctcgaccagccggcccaagggcgtcatgctcagtcacgccaacctcatggccaacatccacaccatccatcaggctttcggcatacagtacgaggacagcagcgtgttctggctgcccatgtaccatgacatggggctggtgggtggcgttctggtcccggtgttcgccggtgtgacaaacgtttccatctcgccgaccacgttcctccagagccctatcacctggctggccgccatcagcaagtaccgggccaccatctccggcgggcccaacttcgcctacgatctttgtattcgcaaaatcaccgaggagcagcgtgccaccctcgacctttcctcctgggcattggccttcgtcggcggcgaacccattgagcccggaacgctcgaacgctttgccgccgcgttcgccccctgcggcttcaaacccggagccctttattgctgctacggtttggcggaggcgacgctcatggtcagcggcccgacgcgcgacagcggcgcgaccatcgggaccttccacggttcggcgctggccgagaaccgcatcgagcccgtgcccaatgatgcgccgcaggctcatcgcctggtggcctgcggatcgcccgtcggcggtctgcgcgtagtgatcgtcgaccggcacagccgcgcagaggccgcccccgaccgcgtgggcgaaatctgggttgccggcgcgtcggtcggtcagggctactggcacaagcccggccagactcgccgttccttcgacgcccgcctgagcgacttgggcggaggcccgttcctgcggaccggcgatctgggcttcatgcgcgagggccaactctacgtcaccggccggctggatgacctgatcatcgtccgcggcctgaaccgctatccgcaggatatcgaggccaccgcccgcggtagccacccgctactggcagccggctacggggccgcattcgtcgcggacaatcacgaccgccagcgcctggttctggtgcaggaggtcgcgcgcaaaggagaggtcgatttcgcgcacgtgctggctgcggttcgcagggcggtgctcgatgaacatggcttggccctggacgcggtcgtgctggtgcgcagcggcacgattcccaggacctccagcggcaagatccagcgccatgcctgtcgcgcggccttcctggccggcgaactcaaagccctcgccgaattcggcggcttgccggtcgacaa

SEQ ID NO: 551 - DNA, 28941 bp, Artificial Sequence
  Synthetic Oligonucleotide
agcgtagtttggaagtctcaatcccctaaatcgggtcaacggtgtttctatacaatggcgtacagctgttgtcggattttctgaagtctcaatcccctaaatcgggtcaacggtgtttctatactgcgctgcaagctgagcttgacagactgtaatccagtctcaatcccctaaatcgggtcaacggtgtttctatatacgaaacaacggcccacgtccacgcccgcaaggtctcaatcccctaaatcgggtcaacggtgtttctatttatctgcctcatttgtggtaatgttgtcacccgcaatgtctcaatcccctaaatcgggtcaacggtgtttctatattaggcttaacatacaacaacaacgataacggaggttgtctcaatcccctaaatcgggtcaacggtgtttctatcgtagccatcagcacgcccccacgtcgaaagacgatgtctcaatcccctaaatcgggtcaacggtgtttctatagagcagaagaagacagggaacctcaaaaggtctgatgtctcaatcccctaaatcgggtcaacggtgtttctattggaccaaagggttcacatgtaaaattcagtgcgcaggacgtctcaatcccctaaatcgggtcaacggtgtttctatagaaaattgttcgaattagagaaaagaatgaagaaaagtctcaatcccctaaatcgggtcaacggtgtttctataatatccagaggaattgcttacgctctttgccgctcttgtctcaatcccctaaatcgggtcaacggtgtttctatttctctgtcaattcatctatgattgattcactaagtctcaatcccctaaatcgggtcaacggtgtttctatcacaaggggaacaagcatcaggcaaggcgccggatgtctcaatcccctaaatcgggtcaacggtgtttctatcaaggctaccgcattggtaaatgcggagatggccgcagtgaggtctcaatcccctaaatcgggtcaacggtgtttctataccgaggagcgtagatttatgaagaataatcggaattgtctcaatcccctaaatcgggtcaacggtgtttctatgcaggtgttgtgtcttcacgagcggaccttcgcccatgtctcaatcccctaaatcgggtcaacggtgtttctatcatagcaataatagcccttgtgttgtcagcaatagtctcaatcccctaaatcgggtcaacggtgtttctatcccccaacccgaaaaatccactttcaccaaagccgaaaagtctcaatcccctaaatcgggtcaacggtgtttctatatgattcttaataacgatggaacgaagataatcgtctcaatcccctaaatcgggtcaacggtgtttctatgcatacttgccgacatggacgctgtcttggccagcatatgtctcaatcccctaaatcgggtcaacggtgtttctataatgaggcaggaaggatgaatcacgagacaatgaggtctcaatcccctaaatcgggtcaacggtgtttctatcagatcgccatcagaccggaaggttaccccttcgacctgtctcaatcccctaaatcgggtcaacggtgtttctataagtgaaagagattccatacatcgctattggcaatgtctcaatcccctaaatcgggtcaacggtgtttctattaattgagacctgaatacatccccgattagctaagtctcaatcccctaaatcgggtcaacggtgtttctattttcgtgatgaagaacttctcaatgccgagggatagtctcaatcccctaaatcgggtcaacggtgtttctatagcgctcggaaagacctagggcttggcgacttgccatgtctcaatcccctaaatcgggtcaacggtgtttctataagaagatgttctcattcttaataagataaaactatgtctcaatcccctaaatcgggtcaacggtgtttctatgtgacgccgacgcccctatcagcgccgaaatcctgctgtctcaatcccctaaatcgggtcaacggtgtttctatcatgggtacaattcaagtcaagatcgtgcgtatcggtctcaatcccctaaatcgggtcaacggtgtttctatagctggcgttctatccgcttgaaaacaaactaagatacaaagctaaaaaggacaatggcgtgcaaacagtgcaaggggggtggggggtatgttttttactggcccgtaactccttgcgaagcttattgttacaaaacggacagcgattcccgggctgccagagcttaactctctgtccggtatcggcttgggttttgtaagcggatacaacagtaatcattgtccttcttcacctttgaatcattaaaaaaaagtatctggacaagtcaagcaaaagtttgcactggggcggccccaaaaatgattaggcacgacagcctatcagcccaaaccaattcagatgattatcaaatcttcatccccggtgaagaccccgagaccggagatctggatgttatcggcgcagttcttgcacaggaggtaatagcgcacgctatcctgggtgaagtcaaggtgtttttccagttcttttttcatgtccagatactgcttgtcgttcaggtggcattcaaagacgcttttttggaccctaataccgaattttagaagcgtcttgaccacgcgatacctgatcttatccgatacaatgtcaaaacagactaggtacaggtgtttcattatctgtgcccgcttcgcttatgcaacaagaacaagtgatgccaatcagcgtttcgggagttgagtgacgtaactttatggtacataccgatgaagccacaaggatttcaaccttttcgcaagccatggtttgacgatcgcaactgagtttgaggaggctgcagttttcagttccatgcaaagggtcggtactggtcacggccctggatgtagttcgccagccggcgggcctggatctcgaaaatatccctgagggtccaatcgccatcaggtttggtaatggagaaacgggagtttaccattttggcaaaggcagcaatgatgattttcatgccttccggcttgagtgagaccggcaatagctttgaacttctgtcgatgtcttcctcggagctctcatcatcggggagaagattgtaggcaaagtgttcaagcctgatccccttgcggtttatgagggtaatgacaaggttgtcaatcagggggcggaattcttccatgagatccagcacaagggactgcctgccgtaggcaacatcatgaagcgcaccaaaaaaagggtccaagcccacaatgttggctgctgccatgacctggttcatgagaaaagtataaccgagggagagcagggcattgacctcatctttgggaggcctccggtttcttccggaaaaagggaattcagcttggaagatcatggcaggaaaggttgagaagtagtttttcgcagtaatcccttcgtaaccgcggatgacctggagatcaaggtaagagccggtgatcttttccagaatggcctgattctgcaaataggcggctggcagcaaagggtgtttgtttcgtttaatgcgtttcaagagatgtgtctgcatgttttgcaccttccccgaaacgtaaacagccgccagaagttccctgtggcctgcctcagagaggaatgcatattggtttgcccgcagctccacatttttgccaaactcccccaccagacgacccttgaactttccgtaataggagaggaacacggtatcgatcttgtgtttcaaaagatatgtgagggcaggggaagtaatcgcgacattacccacaataatgagttgggagatgtctttggtatggaaccagcgcagcaggttagcccccttgtaaacatacagccggtcacctttttttgcgatcgaacagccctgatcagccacgtaaacaacgggcacggttagtccttgattttgcggatgcggacagccatgaggcttgcctgctgtttctttttgtcgaagctgggttgagtgcgaaaacagaccttcataccgggctggacatcttcagcatggaattggcattgggaaaccagaaagtaatagctgtcagcacccgatttcaggaaacccgctttgccgtgaggcagcaatttagttactataccgctaagctctttctggccttcggactgcctgggggctagccaggaccggcaattagccaaaatttccttgtaaggaggcaatttgtcaggatctatgttatgggcttgcaggtccaacagcaggtttctgtccaggctccattgcctctgtttgcgtatcgccgcgcagagcctgagcatttcgatggaacgatcgaactccttgttcctggccattaggttttgcagaagttcccagaggtggatcttggtatcgggctcaccgtaggcattagccgcctgaagggcgagcgccaaagaacggtcgaacaaatccagccgataggctgccagagcagcttcgtaaaggatgaaccagtcacgcttgcgtttcaagatttcctcatacagatccagagccgttctgtaatcgccaagttttgccaggcagagggcggagcggcgtttgaaccaaacatcggcgttggtggatagtttcaggtttcgattcagtgtgttactgcatagatcgaggcaggaggcataatcgccgaggttgaaaagggccttggagaggagggaggcgtgtttttccctgtgggagggatagagcacccctggtttgttcgagggctggggtgtggtttccagcaggtcggtgtcaagcaggccgcagatttggataaccaacgcaggtaacaggtcaggcgatttcgcgagaaaggaaaagacagccaagggaagaggatgcaggccttgcttaagcggtgaaatgcgtttgatggtctccagccattcgacagcctgttccgcaggcagacggttttcctgccggaaatatctgtaatagacgcaccaggcggttaaactagcaaccgcctcccaatggccttcatgttcacaagccgtaaggccgatttctatcgcccggtcgaagcgctccagttttttcagacaagacaggagggataacaccaaattttggtcaaattgcttactttcatcgacatatgcactttcgtacaggtccagggcaccctgccagttgccattttgcttgagggtaaaggcctgcctgagcttctcggaaaaatcttccggcagcatcttcacctcacttcaggtcaagggtgagcctgacaaagccatcctggtcggttttccgtaaaacgccccaaggcgaagttatctccgttacaccgatctcgtcaaaagccgccatgatctgtttttctttctgttccaggagttccagcgtttcgttgacttcctttttgagttttagataagtggcgatcaggtctttaagcttcagttcgttccattggacagcggcggtggcatcactgctgagttttttcaaatggagaatgggagtcggatacatgcccggtgagagggaaaaatcgcatgcgcattgattgagatcaatcacgtccgcaagatgggaacggatcttggcacaactgatggaattacccttgaagccagacttcatcaaatcagatgggtccagattagagcatctgcggagaagcgcgttcactatagttgggccctgtttcaggtatccggcagtgaatttgagcacattcttttgctcaactgttaggattgaacgagttttgatcagattatccacgatccagagagcatggcagttttgcctgaggcagagccattcaggatctgtttccggatcgggaaggggaaggccgtggtcatcgttttcgtgctggatgtaatcctcctgattgccagaaaggccattcaggatgttgaaatttgggtccaaggagtatagggctgaaatgaaaacctggttagatatcagtttcggagctcgaataaaatcctgaaagggaattaaactgccatcctcggcaagcatggaactgggcaaaccgctcagccgatgcagcccatagggtagcttcacgaggtttccatagctgttggcgctgattcgggattgttttgggaaaatctcaatatggatgggcaaaccttccagattcacctgcgccgcgacgcgctgcgcgaagctgcgggcaaaggcggcagatatcttatcctggagcaacacccacagatgatagcctttgtagccgctaaactccatgttgacaggtacctgatacgctgaaaggatgtctttcaactggctagcggctttatgcagcgccgcgtcaatccaagcgcggacgtcagggtcatggaaatcgttcaagtatgatttatccgcgtccaggtcgaacatgatccatttcaccttgttggcaaggtcaagttgatatatcccaagagtgtggatgccgaggagatggttgcgaagcagcaaaggattcaagggctcgttgaccaaggcatagccgtgttttccttcctcgccaacccactggcgggcatgacagttctcccttcctgaaaaaaggtcctgaaaagccctcagatcgccatcctgataaacctcaggcggttcaggcctcgcgggtgactgggctgattgctgttcctttggcagcaattgggaaaggtcaatgccctcggctttcgctttctccaggacacagtccctggtattgccgtcattctctgctgcggccaaaagcaagtactccaagtagtaatcagtttgctggggatattgggcaagcatcttgtccaaaaaatcacggcaagcctgattatcgttactaagcctaaggatttcagctttcttgcgggcaagggggtggttttctggttgcgattccaacaccaggtctatctggttcagagcctgccgcactttccccaacataaggaaaaaacgtgatagctcctctcgttctgaggagctgagattttggatattttctgcctggcggcagtaatctgcagccgcagagatatcttcattgagaaaagccgtgttgaaattaacccgcagtgaggggaatccagcagtatcggtaacattgctcatatagtgcctccatggcaaaaagtcagtccagggttcttcgaatagactcctggatcagatccggcgcgagatccggacaggtgaggaccctgatccccatgccggcagcccgctcccggaggaaggcattctggcgccagagcctgtccgcggcaggcgaggcgagcgccagaacgcaatggggacgcaggccgtagtcatttttgagggaatccagcttgtagaggatatccttgatctccggggccttaactgatgatttgagctcccagacatgaagggcgttggcgtgggtgaaacagaggtcgagttcgttttttacgttgtttttatcagtcacgacgttgcggcagacctgtccctccggtaatacaatttgcaggtagtggcagaggtactcctcgaaccaaccgcccttgacaaaatccagccattcggatgattccaggcgggcaggggccagatccaggcaggcagccaggatcgccttgagttcaatgttggctgccgtaaggtccagccggcggttgcccagctggttgagtttccgggaaagatcttccacctcctgcctggcgaagagggaaaatatcgcttccgacctaccgtaggaatgaaggggcctgttggggacttcagcctcgatcccgtaagcgcgcaggaaagtgatcgcgtccaggcggtgggtgatgggcaggaagtttttcacgaaggaagggtagaccagatgggcgtggttcgaacccaaagggagatagaaggcttgcgccggatagctttggatcgccctgaacacacccagggccatcagcttggtgccgccggtcaggttgacaaccaaacctgacgggcgcaggcgatcgaggcaggaggccacgctggcggcattgccttccaggtcgtattcgtcaacctcaatcttcaccggatcagttatgccgcagatggagcaggtccgctccaccaattccgccatgcgcggagtagtgatgaaaacatggcggtcgatatccttaaccgtcctgatcaggaggatgttcggaatggcctgctcgctggccagtgaaaccaggtaacgcatcttccgcttagaggtggtctcccagttcgtccaacaccaggacgccgtcatcgccgtagtggcaaaagacccgtttggcaccagcatcgctccaggcgtagaattcgtgggtggaacccggtttcacggttttccctatattctttaagctcaggctcttgggcatttccttgaggccggtttccagataccttgccagttcatcgacctgccggttgagcatggccaggcggtcgcctgaaagagccgcgaccgatttcaggtaattgggaccaaacacgacccggttggagggaggtggatgcatttctctggcatagatgtcggggcgcaggttttgccataccagctcaccgtactcggagagtccgaattcgccgttgcagggatagtagaaggcgtccgggatcttggccacgtggtctgctccaaccctcaggcagaggtccagcctccgccagagggacaggttggcggtgatgtactcctccggctgtagcttgaagggcagccggggaatgcgcatcagctcggactcatgttcgaatatgtagacggtctcatcggcgtagatggaactgagggtctgcagaaagccctgcaccgccttgaagccgccggtgaggttgaagatgatccgcgccccctgtggcccgtacatctccttcaacgtggtgatctccctcagcaggctggtgaaggcaaacctcaggtcggtgctggatttggtctgcaatcccgggatatccagcagctggcttccgatgcgccgggactccagataggaatggatgatcccgccagtgatccggccgataaaggtatcggtgggaatcagaaccaccaggtccctggattcaggagggctctgctcgaacaggatgagcaggctatggagctcggccgagatctttttggcctccccggtatccatagcgctaatctcctgtgtccggcgggtaacatagtctgcaagatagcggctctcatcccccgggatctcatctttcttcctggcattggcatattgccccagcaactggcgggcgagctcatcgcaccggttggtgagggtgctggtccccaccggggtcacgatgatcttcaaggcagttcttccagagtgcagcagcagatgcccaggggcatgccgccggccaggctgcgcgtggcgggatggggatcgttgacggatttgtgcagggaaccggtgcccttgcccaggcgcagtaggaactggttgggtttcaggttggccagccacccggccaggttgtcgtgcagcttcttccgctccggcaggtagaagctgtcatcctcgcgtagtttttgccggaagaaatcgttgcaggaagcgatcatcctctcgatggggaatttacccagccagtgccggtccgccgcgaggatggttgataaccccggagtgcctttaaccagcacctgggccaggtaggagagttcatctcccgggtgggcgcgctggctttcctcgcgggggttcttcttcctcacctcgatcttgcgcaggcctagggaggccatgggaaattcgcaatcggctaccttgagccctttgaagggatcgagggtgatgttcggccttccccagtcattaagatatccgaagagaatgggctccaaatcccgctcgctgatctcaccgctggacagtctcctgatccgggcggccgggtctttggcgcgccaggccacaagggcggtcctgagggcgcctttgatggaactgcccggaagataggggttgccggtgagccggttggcgatgaaggaggataccagctgctgcgcggcgggattgtccaggtcttgcagatattgcttctgataagcctcttccaccggatggcgttggacccaagtgccggtttgtgaaggatcgaagctgtcacacaggaacctggcgatcatattgtgccccaggccgaccatctccttcagcttggccgggtctttggcattcaggtaagcgatcaggcgcggctggttgagcacatggagttggttgccggtgatcacatactgggtgggatccagccactcccccgaggctatgtgcaggtgagtaactggaaagacatgcagacgccagcgtttgtacatttcaggcattgtcccctcccctgagatggaatcccacgcacatggcgtagccgagttggcagatcgcgggatcatccggatggatgttccgcaccagcgtgccagtgggcggccggtctccaaagaataccgtgccgggcgtgagcatgaacagcggttttttgaaggggtttctgcttccggcggcgtaactgccccccaacctgccgaatttcacgaagccgtcataacaggcagaggtggggtcgtccggcgcgggaaccgcgttggaaagcagcagccaggcattgggatcctccacccggggcaactcatgctccccgagctggatcctgaacctacccctgcccgtgtgtttgttgcggccgaaaccggagttttccacgaaatcgaagagggcccccaactgctcagcgctgaagtaatccgtctccagataggattcgaagaccgtgccctcacgggcgaaggttaccgtttcggtatagaggctggccccgcctttggtggtagtgccggtgacgcggttgatgctgttgtgcaccaccacgtcctgctccagtttgaatgatttctccaccagggcttggatggcctcgttgcgttggatcacttcgctgtggtcgtaatcattgtgtttttgcagccatatctccaggggcaggtagctgagtttcttggccgccttcgcggttccgcgtttggccagggcgccctggaggtcagccggcaattctccataccgggcgttgagcctgggcaccggcaaagttccctgggggaaagccgaggagagcgacagcacgggcttttgcatggcttccaggaattcggtcagcgccgcttccccctgttccatggcaatggcccagcagaggtggccgaagatggtatcgctctgaagctgcgtctcgatcggagactgcagcgtccactcaattttatacagcatgtccgctcccggcttacaaggcgatgccgttcagatccagaatctggtcaccgaccttgaggtcaaagaatttcacgcggccgccaccccggctgccatatccgcccagggcgtcgttctggagtagcttcaggcctttcttgatgatatccaggtgctgttcctgctcctggtcctcaaacacgcgcaacacgatctcgaggtcgaacaccgtccctgccggcacgcgttcgatctgccgcgggccgccttgcttctggttcacagtaccggtgttacggtcgatcgtcacttcggtcttgccttccacgaacagcgagttcattttcagtttcgcgtcctccacgttcatcatcctgcccgccaggctttcctcggagaggtcgtccaggatttcgactgcgccggtgatgttggaatcccggtagatcacccgggtgggcatggtctggacgtctttttcgatgtgcccgaagataactgcgatgggattggaggcgtcccttccgggcttggacacgctgccgtcgcggggtaccacgttgtaataatgctcgagtaggaacctcgttttccctttcagggacgaacccgggatgtagggcaggccggaaatgggattcttgatcacggagaggtcgattcccccgatcttgaccccggcatcgctgccgccgatgtgcagtccgctcagaagcaatatcttaccagtgattttaaccattttgatcattgtatcctcctaaactgatcatttcttggggaagaagccaaccacggcttccatgatgtagcaggcttgcttgaacttcgcggggtcttcgccgatctggttcaccaagctgctgatgaaatcgaccatggccacgggcatgtcgcttttccgggcggtgtggcggtagctgatcttcgcttccagcagtctgatcaggatgttcttttccgtggcgtccgccgtgatgtcgcggatcctgaggaattcgttgtaaaaggccctcagttgcgaagatgacaacctattatctgcgacgtggttggaaaatttcttcgccaactcccccacccactggatattgaccgcatcgccctggaagaactgatagccgtcactccaactcggggcctcctgccgggggttattatagttttgtctgggattattcatggtctcctccatgtttgttgtattttctgttcttatacagcgttttgctgatcgggaccttcatcatcctgatctgttcatcatgccaggcgagctcctgcagcttctccaccgtttccgaaacctctttgaaattgcgtttgaggtcgtaggagaggtagcttttgtagagcaggtccctcacatctttcttttcctggtagcgggctgccatctcgctgtactgcatcagccggtgcaggaactgggcgctgaagcccttggcggctccgtctccggtttcgttttgccccagccaggcatcgaagctgtccgcccaggcgagcgtctgttccagcttttcccaaggcacggtggtgtcgaacagctgcagggcgtttttatcgtaatggtcctggttggggtcctgcttccatttcttggcctgccccaggtcctcttccgtcttttcgatgccgaagcggatgggggccctgccgtgcaccaacctcagcgcggcggagaaatgcaagtccggatgctgcccgcagaaagcccggaactttttgtccagcgccacggccagatccagcatcacgttccaggggccgatcaggcagaaatcatccccgccggcatagaccacatagacgtggttgcggaacctctcctcccgctggattaaacttggcaggtaggcggaaaagaaccagtcgatctcggctgagagggtggcgtattgggtcacggaaaagccgttgggcttaagcttgccgtccttgccgtacctgaggcccagggtgaagatgttccccaggttgtccacgtcgcctttgagcaccgcgttcaggggcacgccccggaatttgtcgccttcggtttgttccagggccagcaaagccagttcgtcgaaggacagcggaaattggtccctgtctccggggctttcttcgttttcccccagaccatcgatgatccccgcatcctgggcgctgaggtctttgaagacgggaaccaccgaggccaccggcttgtagggatagggaagcgttttcctgtcatcctgccggatgcagaaggcgaagtcgtcctcgcccaggttgacgccggccttgggatcgaaatcctccaggtaccagctttctgcaaacatcttcagggcgaagccgtggcgcggctgccccttcccgatgatgaaatgcgtggcccggggcaggatctggcctagtttgacctcatcctcacaggcctggcaattgggcaactcgccgttggcgtccggttccacagtccgttttccgcattgggggcagaggttgctgtgataggccgcctgctcgatcaggaatttcccgctctgccagcttttcccgtcctgcaggtaactggaaaatttacggagcttggcctgctccatgcgttcgatgaagctgtccagggttgcggggaaccggtcgcttttcagggccgcgaaaggcactttcaccgcccaatccaggttcaggctcaccgcgcccatgaactggcggtagaactcctcatcgacctcttgtctgatcagctccagctttgcctccatttctggcaggttgggggccaagagcatgaacttgccgcccgcgttgatcaggacgcactggcgcggcaggcccagttcacggcagatcctctgcagaacgatgtcgcagagggtcttgatcttgaacgagcgggcacggagggtcttggcggctttccgggaatgctccggatgcaggtcgaacaggtatttctggatcccgctgaggtcgccgccgatcagcatcaggatgtctttgccggacttgtccagatgctcaagctgctcccgttcttccggtctggccaggaaataggcgtgaaggacgctggctatccctgccgtgatgcggctgtgataataaagggagttggtgggtttttcctcccgggtgttcgaggggacgctccagaagtatttttccagcagcgaatccacggcgtcaaccaggttcggcagcgtgatcgtgccggagcccagggcgttcagaaggttgccgaattcacccttgaagcccgtgaagatcgcttcgtattccttgcacttcagggtgtcggggctcgcttcccgggggaacacagcctcgcctggctccgcctctatcaacggcagtacgctgtcagaggccagcgaatgccccagatgcacctcggagaggacgctgtgaagctctttcttcttgtaggcccccttttcggcggcctcctcatcgggttgccggtcccaggaagcggatacccgatccgcgttgatcaggcactggaccagccaaaaatcggggtccgtcacgttggcgaaagcggcggcattatggtggctggcggctaggttggccacctgttcccagtcgcgccccggctgggacaggacgccgtcgaaaaactgccgtgtccacatcacgtgctggtgggtgggaacattgttccagctggggcagtacgcctcgtatttggctttgccgatatcgacctccgccctctgcatcaccttgccgatgtcatgcagcaagccggccagggccatgtcgtacacgtcgatcatcatacctccttatctaaagtatctcatatttgcccaggccgaaggtggtctgtttgccggcctggatcaattctccaatttttagcagtcccacagtttgagcggaaggcgcggcgatcctcacttcccccatcaggccacccaggctcatcttctgctgctgcctccagctcttgcggtacatctcctgccagtgggtggaggccgccacctccccgtattccggcgcgaaaggcggcaatgggtcactttcctgcagaaaataacggcagatgtattccacccgctggtagacgctgcgcagcaccggctgcagcatgaagccgctcatcagcctgccctcgtgcttcagccggaggggggtgatgaacctaaggccgatctcgttccgccgccgggggctgtaactgatagtgtggatatccggctcccggatctcctgcacgcccatcctataaagcgtcctaccgtctaggtcctgtacccctgccaggcttacgggatggttctcgccctgcagccgtagttggcgcccttccagccgggtgagcaggtgcatgatcgaactgccgtattcggccaactggccaaagatcacgagctccatttccactctctggtcccgggtgtctgtgtggcggatgatgtaggggcggtagctttcgtggccgtgaccgacgtcttcgaacagtctgcggtaaaggcagccgctgatggggcagtcaacgcagtccaggcggttctggatgcaaaaggtctgcctcagggcccgaccaaagatgccccggaaactggaatggaaggaataatcgctgcccacgcccacgcccacatctatggacacacccagttttaggtaagggatcttaacgcccatcaaccctactcctggctgacattttccctgaggtgccgccctgtgatttcgcggtcttcatgcctttgcctgttcccggctactggctggtccgccgaaggaatgaccgtaacctaagctcaaccctccgggccggctgttcttgcaggcgggggccaaggcttccttcagaacgtacacgcaatctcctttgtgctttttgggatccccctcccaccaggcttggcgaaactacaaaaatgcggcctaatcagctttccatcttcacttggctaatctgcttcacgtccgggtgcggaggctgtgacactcacaaaactatcaaatcagacggtaaaattttggcaagtgtttttttggctcaagttcaattatggtgggtagaaaaaacttgagaggaacaaggcatggtttttaatgacactgctgccatggttcggtcagatctgctctatatggagacttgttatagtgggtgacacgtttcaggcagatcctgattacctggcagagcctgtagtagacgaactggtgcaacttgccccagtcctttttttggaagcagatgagcttgggaaaagcctccgcgatcttgtagatcatgtctttgcatgaatagacgaagtatagcgagatggtcatcaacatgttgaggttcttcagttttacgtagctggccaggcgcgttttctcccactgcaggtcttgtttcatctgccggtgcacttcttcgatcttcaagcgtttgtggtaagcgcagactgcccgttgggtgatttccagttccgacaggccgggatcggcgaagtcacagatcaggtagaattcaggctccttttgcctgctttttttaaacctgcgacacaccaccaggctggcttcaaccccattggctttggcggagggatgatcatcggtccggactccgatcctccatatggcacagttgagtgaatcccagatcaattggcaatataacgaacgttatctagacaggaaacatcagcgtagcgcatgattccaatcatgctttttttactggaaacaagccatgaccaaccgcagcatcggagttacatccgtagtatcgactgatgccggtcatgcgattcatctcattccgcagttccacgcattgccaaaggccaagttccaacaaccaagaatcgatcaattaatagccttgcagggacgaaacctgttgacgccgtcgcttgggcaaacttcgatagtggtatcggcagtgggtgttaaacagcagacacgaaataagtattgacaggaatcattcacattgtgatttgtatggcaagcattagcttgatcagatgaaggaggatcgatgaaacattttgtcgtttttgtgcttttgctgatctgcgttacctcaggccaagcccagacagtgatcgctcatcattataacgatttcgacactttcgccaccttgttaacgggtacatatctttggtcagctgtttatggtggcctggccagaacgcagaactacgcggatagggcgaaaccggagatattcacctccgccaattcagccttgccatcggattatgtgtcctgcctggcctcagacggggaggaactgctctgggcaggcacggaccagggcttgaccagatggaacgatggggtttggacgattttcacgaaagacaactcagggttgttaagcaatgaaataagctgtttggatctcaccgacacaggtaccctgtgggtagggacagacgtgggggtgtcctgcctgcaagacgatacttggacatcagttgagactgaatctgcggtccaggctctggaattcgacactaccaccgggaacctgtggctggggctggacggaggtcggatagcccatttgaccggtgacagcctggtcgaggtcctccacatccccctatttgaatcatatcccggccactttgaaggcaactccgtgaatgatctggcgatagaccaccagggacgcttgtgggctgccctggccagcgggcttgaatgttattccggaggaagctggacacactacagccctgaagatttgaaactgattggtgtgccaaatgccgtggcgatcgaccgaaccggagtcgtgtggaccggcggggtgggtctctcgtacttcgatggcagtaagtggatcgaagccaggccggacgaatcgatgatagccaatgtgcattccatggagcccctagaaagaaagcatggtttttacctctcggtctcagccgcagaagttgccgaaatcggcgggggtctgcactttgtggacgtggataccgatgatctcgcggcaaccgcagtccaagtcatccgcaacaatgttttcccggagctgaagatcgttgagagccattggcaacatgtagaagacatcccggaagatgcttggtgggatatagaaatttttggagaccccgcccggtttatcgtggccagttcactgctgggttcccccttgggcgcaggcaggcaggtctggtacgatgttgccggagacgtgttccatggccaaggagtagaattgcttccccaacccattcccgatctgagcgagtttttccctgcggatggtgcggttgtctatgatcctgacctgagtgaacttgacctgttctggtccgcgctttccggtggtgaccgccgaacctgcgaacgcttgatagcccaaggtttcgatgtcaaccgatacgccgaggagttcagtcaaggctttatgcaggacattgaatacttctatcctaacgataccagttggttgtactatactgaagaagaggtcgcccgcgaagtgcgtgacatggcccatttccgggtaagagagctcacattattgaaatcctgcggattaagattaccgcggaaagcggaattactatcggcagcaatcgaatgtgacatgccggaactggtgatagaggccatcaggcaatactgatccccagggcttcgagtttgactatgttggtgtcatcatcggccccgacatggtctataacaagataaccggggccttggagtttgacatctcaaagacccatgatccggtgctcaggggagaccccgccaattttcatgcctatgtgcgcaacatctacaaggtcctcatgaccaggggcatcagaggctgctatgtgtattgcgttgaccccgacacagccaaccacatcaaatccctcctgcattgatccggaggcaatatgcttaattggtcgattataagagccaggggggctgtgtgagtaaaaccgcaggttggtcctcaaagttccccgctttcatcacaacgtctaaaaaagacatcagagagtgcttgcaggaatttgtcggggatgctgagcaagctcaggtgaatgcctggaaccagtcgatccccgtcatccaaagggaagcagccgagatcatggccgcggaccccagcgcgtcagactactcctcgataatggagtttcgcttacccctggaatccagacgcaccgatgtaatattccttgtgaggcacaatattgtggtactggagctcaagggcaaatactcgcccaaccaggccgatctcgatcaggtggcagcctatgtgcgtgacttgaagtgctatcacagggactgcgaaacccggccggtcatccctttattggttcccatgctggccagaggcgacatgggctatatcttcggggtcagagtggtggggcccgattatctaaacaaggtggtggacgaactcgacaaggcatcacccacagagcctgtagacgaagacaggtttttatcggaagaagcctaccgtccccttcccaccctgatccaagccgcccgagaattgtttcacaccggcgcattgaggaccataaaaagagccagggcggccacagaccccgccgttgacgagatatgccggatcatccatgaggcttatgagactcaaagccgacggctgattcttatcactggcgtcccaggcgcgggaaaaaccctggttgggctgagaatagcccacgcccattttctcgatgacctggtggtcgacaggggcaatggcaagcccagtgcccccgcagtgtttctgtcgggcaacggtccactggtgcgggtgctgcagtatgaattgcgcggagcaaacggcggaggcaaggcttttgtccgtgatgtgctcaactacgtcagaacttactccaccaccagagcaaacatacccccagaacatgtgctgatctatgatgaggctcaaagggcattcgacgccgaacaggttgccgccaaacacaaggatatcccggggtttgtttatggtaaatcggagcctgatctgttcatagacttcgcagaaagggttccgcgctggtgtgtggtcatcggcctcatcggcagcggccaggagatccatatcggcgaagaagccggcctgagccaatggagcaaagccatagaaaaatcgaagcggtctaatgagtggattcttcatggtcctgcccaggtccgtgaggaaatgctgagcaccaagttgccctatgtagaatccgaagacctcaatctggacaaagaaatacgtttccatttggcagaagatatccataatttcgtgagccaactcatagataatagatcctctttgctggatgacctgaaatccattgccataaaactggaacaacagggctaccatctcaggatcacccgggacatttccttcgccaggaaataccttcaggaccgatatagggataaccctgacgccagatacggcattgtggcatcttcgcgtgatcgtgacctaaaaaggtttggcattctcaacgactggcagtctaccaaaaatgtcgatttcggcccttggtactctgatgccgaagatgaccccaggcagaaatcatgccggctgatgagagacgttgtcactgaattcggcgctcaggggcttgagctggatgccgttctgctggcctggggcacagactttatggttaaagacggaaaatggtcaaatgcgaaagcctcgagatatcagaacagcagccgcataaaagacgcggaacagctcaggataaatgcctatcgggttttgctcacgcgaggacgtgattgcacggtggttttcatgccacaactgccagaacttgacgagacctacgagtatttgaccagacagggatttatgcctatatctatgtgactggagatcaaggtttcgcaagattctaataaacattcacccccacgcatgtggggaatacgcggaggtcggtgaagtcgtagcggatgatgacggttcacccccacgcatgtggggaatacggcatactgtcccatgagggcatcgaagcggccggttcacccccacgcatgtggggaatacttgatgcgctcccagatggtggcgaggcagaccggttcacccccacgcatgtggggaatacgtgatctgccgggctgttttcaatgcgcgcgccggttcacccccacgcatgtggggaatacttgacacggaaggcgatcaattagaacttgagcggttcacccccacgcatgtggggaatacctcagcgtggcgtagttggccgccgtgaagttcggttcacccccacgcatgtggggaatactgtggaaccggaagtcatggccgcgatcaacgcggttcacccccacgcatgtggggaatacgtatcatgccgccttcgggtagatgatatactcggttcacccccacgcatgtggggaatactccagtttccattgctgttcgttcttccaaaacggttcacccccacgcatgtggggaatacgccaagtggggctccgatcccgtcatgaaggacggttcacccccacgcatgtggggaatacatcacggtgcagggattgacctggacgagggccggttcacccccacgcatgtggggaatacggtcgtggcgtatttggacatcacgtcccattcggttcacccccacgcatgtggggaatacaaggcaagaccaagtggacgccgatgtcaaggcggttcacccccacgcatgtggggaatacagcatcgggatctgcctgatcggggtgcgggacggttcacccccacgcatgtggggaatacattgcgtccaggtcccacggcaccttcgcgttcggttcacccccacgcatgtggggaatactcaatccaatggatccgcacatacatcgtgtccggttcacccccacgcatgtggggaatacaaccaccaatatctggcggcggcggcctcaaacggttcacccccacgcatgtggggaatacacagacggcagccagaactatatcaatacgaacggttcacccccacgcatgtggggaatactcattatcttttttcctccgtctttgtgcttacggttcacccccacgcatgtggggaatacccagatcatctgcgcctggctcgtgaatctgtcggttcacccccacgcatgtggggaatactttttcagattcccggttttggggttgaccaccggttcacccccacgcatgtggggaatactcacgagctttgagcggaggcgggacatcaggcggttcacccccacgcatgtggggaatacccttagtaaataaagggtttcaggctaaccacactgccttaggtatggttcacggatgtttggtcataagttttagtccttcccactcggtcacgatcctttccgccgcaccccagaactcaatgccgaagccttgttcgcaatgtttgctgaagatcatgaggcaggtaccgcccgcacagccggatctgaccttgtcccacagcttttctctcaccatggccgatacttggccgacaaagacacctgcttttacttcgagaagccaatgagtgatttctcccctcagggaagagggtactttttcaagcaccaggaccatcatcatggcctcctggatcgtccaggccccaggacaagccgcctgggctggcgctctcatccgggttccaaagcccgcccggtgcggctgggtcgacatccgcatggtctggttcatcttccggtgtttccaggataccgaacagggagtggatatcagccacgatcttcttcagcaggccaaattgatagaactggtcccggcaggccatgcgtgtccggcggtccaggttttcgatcccggcggcagtagccaggaaggccgcgggtacggaggtttccatcttgtagagatcggcaatgtcataaacaaaggatagctgtttgccagtatggacgaaacccagggcgggagaataaccggcggccactatcgcggcgtggcagatgccatagaggcaggaattagccacggaaagagcccggttgatggggtcggttttactccagttgttcctgtcgtaatttctggtttccatgggcacgttgaactctttggacaacctgaaataggtgtcccgcaccctcgccccctcctttcctcttatctgctcaagagtgagggatgggtccaatttatccttgaacctcagttcatacatccggcgcactatcctcagatgcgcttcccgatctgcccaggcggctgcctgacgcatcagattggcggaactgcgggtggtccccgtcccggctgcgtaaaagcggaccccctgttcccccacccaagcgaccaagcagccacaatcggccagcaccaggatggccgcgtgcgtaatggaaacgccaggccccagcatcagcaaggcaagaccagcgcaaggaaccggagtggagcccatggcatcgtgaaaggcgatggcctgctcctctttgtccaccttggcgtgttccacatagagatagctgacgcggtcccgcatcttgggaatggtatgcaggtctttattacgcatcgcttaacggaaccacggagagcaggccgaagcccatgcttttagcgctgccgatccctttggccaacgcagactggaacagcacgacatcatccactttcaaatatccttccagcaaggcggagcggtatctcaagggacggtatttgttctcacgccgaggcgcatctccctggggctctggcttggagccatacacccaacccaggttcaccagctccgtgttaaggggcgtgaagcccagcctgtcggccttggcggcgaaccattgggctacagcgtcgccagggttggaatcggtctcccaggtaagggcaacccgtttgtgcaggacctgtccggatttttctttcccctcggggctctccctgacctcgtcaattttgcgtttgacgctggcattgatgaggatgcggtagcggagccgctgtcctgtggagaatctcggatcgtattccttaacctggggcggagcggccagaaaacccgtggcgttttggaaggcccagtcccaatccggcctaaggtgtgactgcaccaatatcatcgccctttgctcctctccgtcggtgttgttgtccacccggaagaggaactggcgttgttccaaatctgcaggatcgaaaggctgcaggaatttaggatctccatctctgcgctgacgcatgggaaaggccatggagagcctgcggtggatgttgtacacgttgttgagccacaggcgtcccggcctcggacggtcgggatttccgcctgtatcgatgagtagttgggataggtagatcatccgttctcctccttgggatcgagcttgcgcctgcgctgttccagcgagcggaatttgatgatctcctcacgtttggccagaatgcgctcccgccagtcagggtcgcaggggtcgatgcggtccatggtcatgccgctgccgtattccagcatggtgcaggcatcatggcagaggcggcagagggctcgcaggtcctcaggctcctcgttacctcccgcccggcggtaattcacatgctggacggtggtggccggggccttgcagaccatgcagagtcccacatccatcaccaaacgttcggcgcgtacccttttgtattgggaattactgtaatcagcgcgactgcggggcggatgccaggtcttaccgatgagcacctgatgtacctccaactcattgctcaggaccagttccctgctgaccacgaagcggggcaggtgccgcggaggctggaaggacacgggaatgtcataatggatctctgcctcatccggggctggctctccgtcaaaggcgggtatccagtcgagaatgcactgaagcgttgagggatcgggttctccgtctttgcgcttctgtatcggcgcggccgccagggcttcttccagtgaagcatggtctccgggcggatgttcccccaccggccgggaaggcgggcaggatttacggcccagatatagcgcccagacaggttttcgcaacgcttcggccaactgctccactatccttggctcaccctgcaaggccaccagaaagctggcatcagccaagtattcgcgccgggtcagcataccccggtcgtcatatttgaggtttttttgtcgcagcctggcttccctggcctcacccacatcgctcaggtctgtcggcgcttccagattggagatgcgcatttttatccccgcacccaccgtatgataatcccaccagcgtataccggggcggtctacgcggacccccatgcgcagtttggccagttccggcagccagtatttagcggcttctgccctgcccacacccagggcagcgcaaagcagcccgaatactcctgatttggtgggagcttcggaggtgcggcgcacggagaatttggcctcatggctgccccaggcctgaagcggcccctccagccttaagaacaaggtattggcagccatgtcagccttctgttttcagttgtttgatggcttcccaatcataaccgcacttgcggatggtcttcctgaccagttcttccagctggccgacctgttcggcatgcagcccgcccttctgcggctgcagaggatagcgtccgttgggtgagaaccaaaaggagttgccttccatctggccgggaaaatatccctcgctgatgtcctgcacatagttggccagttgtcccacgctgagttcgaccaggtccgattccgccaccagcttgaccggccgcacgaaggcattggcatagctgaccggggaacttttgaactccaccaggatgccgtcgggcaggttatgggcagcgaagctgttctgtttgccgctggggttggtgcgcgcggcagccaggaccaatgccccgacggtatgggcagccaattctttgtttcctttcaggttctcgaccagctgctcccagtcgatggaaaaatacttgtagaaacaggccgaggcgaacatggcctcatccacgtagcccgcaccggcatccgctcccttcacgtcatcagccgcgacatagtagtcgatctctggccgggccgcatgtgtggaaattgcatgggccacctgcagagctgcctccaccgtggtgtccgaccacttcacactcttgtccttgccttctggctccagcatcctgccgcagagggcaatgtcgggggtataggtcgcatgggcgatcacatcggcaacttgctgggcggcttccgtgatctccagggaagtatcaaggacgatccgggcaaggtcctttaccttgtccctggacatgaaaacgagcattttgctgttgttgtcctcatgcttgaagccacatttggtgagtatctcctgggctttttgccggcaatctgtctcaccggcctcctgctggatcaggtcggccagtctgcgggtgcgaactccgcccagcaaagcctgaaaatcttcgctggtcctgatgctgcgtttgaggcactggctggagatgcgcgaacgcagcactccaccgaaataacaggtcttgggcgcgccaagatcgtcccggttcagattggccgggctgtgattctggatcatgtggatctcgatcaacattttagttctccttgttgtgttcatatgatgcttgattaaaggcctcagcccatttctggcgcaccagttcattgtgccaggccgaaaggtcgttggtaagttttatccagtcgagggaggcgcagttatacagcccgatggtctgcagcgcccagccgagcgggtattccaactggctggagcttgcccgcaggatcgcgtccgttcgggccataaatgtgcgtctctccttgttagtgtgcagggtgccgtagatgcggccgagcaaagagggcagagttttaccgtcttcctgggcgagcgggaactgtgcgtagagcttggccaccagccaggcgatctcgcgccgggggacccttgatgatgtcctgcgcagagtccaccagaggcccgtgaacaggtcgaacccgtccaagtcctcgtgcaggtcgcagcctttcagttgcctcaggcggccaaggtcgcctgcttttagctcagagatccttttgacgaattgagctgtgggcgtgtcagtcactttggtcctcctgtgtttctttgttttgaacatcaggttgttccagccgggggcgcaggtgtcgcaccagactggcggcacttgcgtcagcagccgtggcttccggggcataagcccccgagatcaccgtgagcagccgccggtacagggcttttacaggatccggtatctcgccttcccgggggatgaatccacccgtcagccttaccgcagcatggaccaggtggggggagatggcgctgaccaaagcttcgctgagcggaaccttaagcctgcccgcgacagctttatcggccctggacagtctgtgccgctcatatgccccgatcaggcgacggttggcctgggcccagttgggcacgctgtgggtgtctttcccgggctcttcgtggggaattctgatcgttgtttcccagacatcgtcgatcttggcctgattcacggccacgcctatgcagagcacgctcaggccttcattgcgagatgattttgtgtccgcatcccgtagcggacgctgccagttcttatcctgcagcagaggtttttcagcgatcaggttttccaccttgagcggcttgttctctttgccgccgtagcagacgtgaggatcctgccaatggggattggcaatatctccggccgtctgataatcacaggaatggaccaagagccccggccgttcgccgcaaccggcacaagccacatctccggccacgggttcatgcaggcggctgcgtctggccaatgcggtcaggcccaccagcagcggcacgggatcggtcctggggtccacggtgttgtcaacccaggccggggttcccatcaggtcgcgtggctcccagttcaggcatagcgtttccgccagtgtctttccccagggtagcgcgtagaacgggggcattccgttgatgctggatttgagtttcggcagtccggaggtggcatagacggtgaaacgcagcaaaccctgtatgcagcagggcaggcacaggccggaaacataatccaggctgtgcttgaagtgagagaaattattcccggtggggatttcgtgcagcaggtcagttacgggtcgaacatgccgggcggcagggtcctgataaaaccgggggccattgccatagagctcgaaatattccctgttttcctctagccaggatatccagggggccggaagcggcttgccgggctcaggcggtctgtcggtgttggcaaaacaccagtagcccaaggcgagtatgaacctgaagaccgcgaaccggtccatgggattgctgtaggcaagatgcagcctgtccgcatcccgcagcgcctgcagcagacttatacggccagtagtgccatcgcggcgaagcacccttacccaatcattgttggttaaatcatacattcaacactcctttgcttagtgtcagtcccttcatggacacctatcaaggctaccttgcctactttggatcaggacaaccagaagttcgggcattccctgatgcgagcctgcctttctcataatggctttagaagcgctaccggagagcatgaaccttttgcgacgaacaggtggattccctgtagaatgactcgccgagaaggtggataataggtat

SEQ ID NO: 552 - DNA, 24962 bp, Artificial Sequence
  Synthetic Oligonucleotide
ccccccctgtatgtaaaattattcttgagcatttcgacgcctatgatcaacaccgtaaccgtgctgatatacttgagaaacgtgctattgaattcgtcaagtcttctacttttccccataaaacgggaagagtttccggcaaacaacttctttccatactgacatccgttcccggtatcggtccaatttcggcccttatatggatcgccgttattggcgacgtaacgcgctttccgtcagcaaagcaatgttctgctttttgcggctgtgatccctctcttcgcatttccgcaggaaaggtcaccagctacaagcgcagaaaaggcaatgctttgcttcaccatacgcttttgcaggccgctcaaggcctgctaaatcgttcttcagagccttttggcaagtgggcgcgcgttattgcctcaagacatcgtaaaggcggctggttcaaggccctcggtgccttggctcgtcgtcttgcaatgtctttatattactgtcacacccttctcgaagacttctcatataaaaaataccagtgtatcgaagacatacacggttaccctaaagtgcccgtggccgccgttgggctttccccggcagctaatcggatacttgatgccctcggcatcaaagatacccacgcacttatcgaggcctatctaaaggacctcggcaaacagcggggtatcggacaaaccacgctcgaaaggatagaacaatggcgactcaaaaatcggccagttctccccagtcaagtccagttcaagccctcgaaccaggatgctacatcatcggagtcattgcccgacgaaccaggcgcgaagtcggcgaaaagcgcaaagtcctcgtgcaatacaccgtccagtgcgccgactcagtccagacaatcgaacactgggagccacaatcggttgatgcgtgctatccggtcggcgcagagatcgccatcaaagtgaaccccaccgttcgcgttgataaacgcggcattccccgcttcgccttccgtgttcccggcggcgactcatctgaattttaggcggcgactcatctgaatttaggaggtccactttcatgccagaccctatcgaaagcacaccaacccctgaatatctttcaaacgaccaactacgcgcctccgaaatttcggaagaagcccatgacatgatgataaagtatcatctcgatgccatcgtcattctcgcgtccttcaaaagtgcagacggcatacttcatgttcgctgttgcccacaatacggcaatcccaacacttgcagcggacttcttcttcttcgtgccgcaagcacgatcgccgaggaaatagaaactcctttctaattcctcttgacttctgccaaggttatcgcctataattcgctcgtaacctggcacagtcaatatcggagggcctatcatggccaaagtaacccttgtttcccccatcggcactatgcgcggtcgtcagggcgatcaggtgttttccatgctcggaagacagcccctggcccggcgtttcgtcacgccgcgaaacccgcaaagcgcccctcaactcgaaattcgcggcatcatgacggcagtctcgcagctctattccggcctcactcgatccgtcgccgaaacgtgggacgcggctgccgcgaatcttcccgaacgcacttccgaaaccggcatcgcctaccccgtgacgggccgcgttctgtttcaggaagtcaacacgatgcgcctcttgcgaggccagtccaccacgacaaccgcccccgccactactgccccgtccgttcccatcatcacgcagcccgcacaattcgacatctccagcgccttgctcatcattcctgtggacaactccgaacttctcaacgacggcgacatctaccgcgtgcgcatcacctgcccccttccgacaaatgtcgttcaggcttccccgtcttggcttcgctcgccagactgggaagattcctccaagtccttcaccacaggcaccatgatcaaagccgaagaaggcacgattgtccttcatccggactcctccaagtgcggtgtcttcggatccgctaccgtccttcgcttcggcttcgaggtcatgtgcttgaattcggcctacgttcgccggaactcgcccaccttctatcggtcttggaccttcaccaagaccaacccctaaaccctcgtggcattccgccacttcctttgtgaggttctatcatggcacaggcaaatctcgttactcctctcgacaaggttcgcggcaagatgaataacatggatttctcggtgaacggggaatcccaactggttcgcggccacgtcaaaccggacgatccttcttcgaatccgcagcaggtcatccggggcattctcacgaccgtttcccagggcttcaaggcgctgtctcgggctgtcatcgacacctgggacgccgccgccgcgctccttccgaaacgcacgaaccgcgcgggctacgaatatccggtcaccgcccgcaccctttaccaggaggtcaacacctaccggatgttgaacggcctaaccttgtcctccaccgctcccggcacggcctacccgtcggttcccatcatcatcgatgacgccgaattcgacgacgacgaaggcatcatgttcattcccgtcgaaaacggcgcaaacctcaacgacaccgacatcttccgcacgcgcatcacctatccgcttcgcacgacggccgtgcttgcccgcgaaaacgacctgcgttatccgaatcccaacgacacgcaggttgccttcatcaccggcaatgaaatcaaagcgcagggaaacaagatttcgattccttgcgtttccgaactcgccgccgcgtttgccgtcgcctccatcaaacgcttcggcttcgaggtcgtctgtctcaacccgtcctacgttcggaccaacgatccactcttcttcgactcttggtcctattccatcatgacgtaggacgcccatcatctctctgggaggtttttccatgcctgagtgtccgcttgttcccattccgcttcttcgcacgaaaaccttctgggcgggtcttggctccatcgcggccggttttgccgccgccgtacagggcgacccagtagggggaatggtcctcatttcccagggttttctcgccatcttccagaggaacgccatctcgaaagcaaaataggtgtcgctgccaggtgccacacctgctttcgcgcgctcctctggcaggccccggaatcgttccttggtcgggttgttttcaaccggtcgatcgccttggaaccttccggggcctcttctttttcaccccgggttccgccgccttcgctcgcaaggcctcgctcaggcgcgcgccgcccggcctcgtaaactcgggcttgcgggcggcgtcaggcggccctagcctcttggtttgcaaggctctatctgcgtttggtatgtgatctcatgattgttgcgtttcgtcttcgatggggccgcctgattggcaaggcggatgcagtttatccaaccgccataggggattttttccatgagaagcgcctcctatcgaaaaggcattggggcaaaagtcaattcacggagttcgtcacgagaccgtatcgggagatgagggcagaggatggaatccataaagtccgcgccgccggataaacgccgccacggaattgggcagcacaccctcggggatttcgccctccgccagccgttcgcgcagccaggtcgaagacagcgcgcgcaggtccggcggcggctgattttctggcgctcggctttgtgcaaaactggattcgccattggaagaagcctctgccccggaattgcccgggcgctcccccaccatgcgcggcacaaccagcggcggggccaggcggacgacttcctcccacatcttccagcgcggcgcttgttccaggatgtcctcgccgatcagcaagcgccagcaatgtcccggacgtttcgcttgcagcaggcggatggtgtcgattgtgtatgaaacctcgttacggcggccctcaatgtcgagaacctctacccatcgttccaggcgcgccacggccaggcggcacatctcgacgcgatcctcgaaggaagcggccggttgcttgcccaaggcatggcgcaggcatggtattacaaaaatgcggtccagagcgcctgtttccagcgcccaaaggcatgccagaacgtggctcacatgcggcggatcgaacgacccgccaaaaatcccaagattcattgttgcttaccgattgacaggttggccggaaaagatacttcacttcataaggcccggcgctgccaggcccaatctatagttcaatctcttttccgccgcaagcacgagacatgcgcaaagacgttaaatttgctctccatcaaattacatggggaaacgaactgctccggtttctagatgacgcggcggctttgggcgcgttctccggcgtggaaacattctcaagcgtcgtgaatgagtatcggggaaaggaaaagcagtttgacgcggaattggcggcgcgcggattgcgtctggccgcattgtatggcggcggcccgctccacgaagaggcgcaggcgcgcaaggtgatagagcacaatctcgaactggcgcggttcctgcgagatcgcggcgcggaccggctggtgttcggcccccccgcgtgtcgtgatggggaaattctcaatcgcgacgatttccgccgcctggccgaccgcctgaacgatttgggcgcgcaaacgcgcaaaatgggtattttgcttgggattcacccccatcttggcacgatcatcgaatcggaaattgatttggccctgatcatgggcatgacggacccggagtgcgtgtatttcgcgcccgattgcgcccatttggcaggagcaggcatcaacccggcggacgtggcgctcacttatggcgaccggatgatctatatgcatctgaaggacctttcgccgcccgctggacacgaaatcccgatccagccacaagccggtgaggcaaaggaggcgcacaaggtcgaggcaaatgaaacgtcagaagcgaaatcaaaagcgagcagcgaaccggcgcctattttttgcgaactgggacgcggaattcttgatttccaggtgattttccgaaccttgggggacgtggggtattccggctgggtgacgctcgaattggactccacgatgctcacgccatccgaaagcactcgtatcagcctcgaataccttcgcgcgcaattccctggcatgatataaatttagccgcgaaaattgcataagaacgagaaaaaggaagaaaaggccggagataagtgggcgcttacaggagcgattggcggctttccagggcggcgcgaagcgtggtggggtcggcgtattccagcgcgccgcccatcggcacgccgcgccccagccgcgtcaggcgagcgcgcgtgcgttcggccaggcggtgctgaatgtagattgccgtcgcatcgccctctacgctcggattggttgcaagaatgatctcctgaaatccgcccgccgccgcacgctcgatcaagtcggcgatgttcaaatcatccggcgcgatgcctttcatgggcgaaagccgcccgccaaggacatggtagaatcccctgtagccgcctgccttttcgaaggcgatggcgtcgagaggctgctcgaccacgcacagaaaggcggcatcgcgcgagccatcggagcaaatcgcgcattcgccgccttcggcaagaaaatggcaggcggggcattcgccgatttcatccttcacgcggcggatggcatcggccagcgcaaaggatttttccgcatcggcgcgaagcaaatgaaacgccaggcgttcggcggcgcggcgtccgatcccgggcagtttgcccagctcggctacgagggcttccacggcggatgggacaatattcatcggcagatttcaggaggcaaatcagactggcaataacgcggcgagtcccaaggagtccgctagaacaatcccgggattttgatgccgcccgtcacctgcgagaccttgctttcatgcagttctcgggccttttccagcgcggaattcgtagccgccagcaccaaatcctccaacatctcgagatcgttcgggtccaccgcctcgggtttgattttcactttgacgatttcctggcgtccattgctcgtaacggccacgatgccgccgcctgacgtgccttccacgaacaggcccgccaaatcctcctgaacgcgctccattcggtcggaaaggtctttttgaagcttctggatgtggtgaagatcgaacatgcgagggaatgtctccatgagagaaatcagcggattccaatggaatccttcagagtatgggacggccgttgaaatcgcggggttccgctttgagcgttcgctgcacaagatcgacggcctggcgaaaatcaggataacgcttcatggcttcggtgaaactgagcatttcgagctgctgaggactgaatcccaaatcgcgcgcccagacgggcatttccgcgcggctttcttgcgcgccgtgcgcgtcgtccgcgcggatttcttcgcccggcgcttcatactcagagaccgaaccggccgcggcgaatccagccgaggcggctccggatggctcagaagatggcgcggaagctggcataggcgcggactccgcagaagcctgcgcagattcacgcgcggacgtagatggcggcagttgcgccgccgaaggcctcgcgccgccctccctttccgccggagcggtttgctcgataacaacacgcaacgcgcgcccagctaaagcgctggcggcttgctcgatccgctgccggcgctccggacgagtcagcgatttgaaggccatttcgccttcgcgtccgcctggcacgccaataaccagccgttgcgtttccagagagagaagactggcgcgttgcaggggcgtggcgatgctgactgcgctgcgggcaagctcgccgttcagcgcaatccaaaacttgcccgcatcgagcgttccgacgggcgatacatttgcggatggcgcggacttgaacggcggcgcggaggccacgggagcgataggcgccggtggctgaaaagaagaagcaggcgatgaggaaataggagccgaagcgggcaaaggcgtggaagccgtcggaagcggaggcaaagaaggcagcggcgtcgaggaggcgtgcgcggaatgcgcggggggaggctgtgcaggcatcgccggcctggaaattgcaggcgcccccggcgaaaatccatcagccgcaagagcagcgctggcatctgccggatcgaatgcaggcgcgcaagacgcgccggaagattccgacacggacaaaggaagcggcggttcaacggacgccgctggcgctgtcgaatccggcgcggttcttgaatagccgcctgcgccgcgcgagtatccgccagccgccgcgcctccgcccgcatacccgccgccgcgcgcatagccgcccgatgccgcgccgcctccgcccgggcctcgcccgatgccacctccaggcgcgccggctcctcccccgcctgcgccgccacgcatggaagaaagcgccgccagagccgcctcgatgtccgtcgagcgatccacggccgccaatttaacaaacgtaaattcgaggaggaaccgcgccggagttaccccgcgcagacgctcatccaaaagcaaaatttgatgaatggcatttagcaaaaagggaatatcggcgcgcccggccagttcgcgcatcgtttcgtatccggcgcgcgacttcgctacgccgaattcacccgcgcgttcctcgccgccgcctgtcacgcgcaaaatcaacagatcgcgcaaataatgaagcagcgtgcggacaaatcgcgggatatcgcgtccgcgatcgactaaatcacgcgcaatcgccagcagccgcaccatgtcgcgttcgagcaggccgcgcacacaatccgccagcatggcgctctcgacaatcccaagcaactgatgcacgcgttcgagcgtaatctcgccgccgccgagcgaaatcaactggtcgagcgtcacttcggcgtcgcgcattccgccctcgctcgcaaacgcgatcgcctccaggatcgcatcgcgctgccctggggcgacgcgcgccatcgcagtctcggaatccagaatccgcgcgagctggcgcatgatgtcttcgggcgtgatccggcggaaatccaggcgcgtgcagcgagattgcaccgtctcggggattttctccgggttggtcgttgccagcacaaacacgacgcgcgccggcggttcttcgagcgatttgagcagcgcgttgaaggcggagtccgaaagcatgtggacttcgtctataatataaaccttatatcttccggccagcggcgcgcggttgaagccctcttgcagttcgcggatgttttcgacttttgtgtaagtggcggcatcgatttcgatcgtgtcgagatcgaagccttccgtaatggccacgcagcgttcgcattttccgcacggctggggcgtcgggccgctggcgcaattgagcgccttggccaggatgcgcgccattgaggttttgcccacgccgcgcggaccggagaacaaataggcgtgcttgacgcggttcgcggccacatccacgcgcagcgtgtccacggcgtgcgcctgcccgatgacctcgtcgaaggtctgcggacgccacttgcgcgccagagaaacataagattcgcgcgaacgggccataatgaacatgtccttgccggaaggtgagcgccaaacgggatttcaggtgcgacggaacatgcaagtgaccaacaagatttcaagtggggcagacttccaggtctgccatccggtccgccacattgcctgcccgcgcatattttcacaaccatgcgcggacatacggcggcttttatccgacccccgctcactctggcaacgcgattctccaagttcgcatgattgcttgattacagcctgtccatctgtagcaaaatacctaccgcagtcctgcagcggtggatttttcttccctgacccgccgtaaaagaggaggcaccttatgacaacgaaagaaaaggtaatccaggccgtggaagacctgcccgccgatgccaccattgaagatgcaatggaacgcctgctgttcctggccaaggttgaacggggattgaaacaagccgattctggcgaaaccattcctcatgcctctgtgaaggagaggatgggaaaatggctgaaataaggtggactccccaagcggcggatgatctggaggccattacaagatttatcgccgcggattcaccgcattatgccagcctctttgccctggatgcccttgcagcagttgaacgcctccatgactatccgcattggggcagaattgctccggaattcaatactccttctgttcgggaaatccttcttggcaattattgaattgtatatcgcgccagtgacgacgcgatggaaattctgactctgttccatgcagcgcgcctgtttccccctccccacatggcagacctttcctgacaaaagccctttggggaggcacaagcattttccactgctattgtgtgaacaccaatcggtcaaatggggaaaaaggattggctgttagtccgatgtaggaagcggtttttcccagagcgggcgttttcggggcattccatcgcgccgcggatagcgctcgggtgtggcagaggtttttcgaatccataccgcggtgtgctgcgcgggcgaatcgccgacggggtaaagtggagaactctccaggcgtgcgccgagttcgccaaaagccttgttgctgacttcgatttccgcctggcactcgcgtcctttgtaagcgagcatccatccgcccagacgcacaagaggcaggcacaattcgagcgccacgggaagcacggccagcgcgcgcgccgtagcgagatcatgagcatcgcggcgggccggatcgcgtccgaagttttcagcgcgttcgcaagcgacctcgacatttgccgcgccgattttttctgccgcgcggcttaggaattcgcattttttgcggtttgattcgagcagcgtcacgcgccaagccgggaacgccaccgccagcgccagacccggcagcccattcccgctgccgatgtcgatcacgcgcggggctggtctggattcggattgggtattggcatcgggagaggcggctgctcttggatctaaaagggaacccgcgcattccgctcgcaacggacactcgggcgcggcaaagggcgcaagcgaatcgatcacgtggcgctcgaccatctcgcgcatgtcgtgaatagcggtcagattgaaattccgcgcttccacctgaagatattcgaggaaattccacagggtttccgcggcgggaggaatgcgctccgctgggaaatgacgccacatccagtcgaaaaggaggtctttgggtttcatggagaaacggccggagaagaataatcaccgcagaggcacagagaaacgcagagaaaggcagaaagaggaatttccaatttgcaattacattttctcatcccgcttcatccttcttcctttgtatctttgtgcccttgtggtggaataatttcctctcatcctacctccggtttgggatcgcgcagcatgagcgcatcgacggcgtctcgcgcccggagtttgcctgcgaggatcgcctggactgcctcacaaatcggaagcatcactccatattttttcgccagcgcacaggccgcacgcgccgtggcgattccctcgatggccattccaatttgcgcccgcgcctcatcgagcgtaagcccgcgcccgagcgcctcgccgcatcgccggttccgcgaatgcgggctgaatgatgtcacgatcaggtcgcccatgcccgccaagcccgcaaatgtccgcggatcggcccccatcgccgcgcccagccgcgtgatctcagccagcccgcgcgtgatcaaagccgcctttgtgttgtcgccaaacccgaggccgtcgcacatccccgccgctattgcgatgacattcttgagcgatccgctcaattccacgccgacgacgtcggtttgcgtataaacgcggaatcgcgacgtatggaaaatctcctgaatatagcgcgcgaaatttagatcggccgcggccgccaccacagaagtcggcacgccgcgcgccacttccaccgcgatacacggtccgctaacgaccccgatttgcggagccgctgcggattccgacagtggcagtgcggaggcagatgcctgcttcaatccaagcccgcgcgccaggcagtcggaaagcgtgtctcccgtttcaggatgcaggcctttggcgcaaatcacccatccatgacgcggccacaacgcgccgggatgtttttttgcgagcgcctccgctgcaattcctcccacacgctcaacgtcctttgccgccgttgccacaaccgccaaatccacgccggcccaagcggaattcgcctcgtcctccgattttcccgccgccagcgcctcttccgcgcttttcaccaccgcgaccgactcgttgagccgaaagccttcgagcgcgcgcggacgccgttcgcgaagcagatgctccacagcgccaggctccgggtcccaaacgcgaatgcagtggccctttccgtcgagcaatcctgccagtacggtgccccacattcccgcgccaaaaacggcgatggtttgcctggaacgatccgcgcccggttgatttggattcatgcgctcatccctgatatcgattttgccttgtttaattgatctcgtccaattccggcgcccccagtcggcctgttcgcagaaaggtccaattcacctgcgccaccacgtcacgcttgtgttcgtcgcgcagacgcacggccgaatcgttcacgggcgcaatctcgcgcacatgcccgaaaccgcttggaatccgcgcggccgcctggatgtaattcactgcgagcgggcgccgcgcggacagcgataccgaagtcggaattccttttttgctcaagggatttttctccgccgattccgcaagcccctggccgtaatacgacaaaacatcttccatgcccaacgtattgacgctgcgtccgctccaaggagcgtaatggcgtccgccgttgtcgtgccagagcatcgtcgagggaagcaccgccgggtccttgagcgtgaaccataccgcgccgagcgttggaaatgtcacggcgctccaggcaggaaatagcgcagggtccgagcaaaccattacaatgtcttcgaatccgcgccgcgccggatagcgggtcaggtccgcccacgcgccgtcaatccgctctacgcgcgagaggtcctcgaacggcgcacccgggcgcagaatggaatatccgcctttttccggaaactcgaactggtccggcttcacctggccgtagatgaaggggctgacggcgaccaggccgcttccgggcgcatcaggaaaagccagtgttggatgatgcgcaaaacacatccgccccgacatgccggagattacatggcggcagtatatcgcattgtgatcgtcgagaagggcaatcactttgcgcacccgccccggccggacgcgcacgcgcattgaaagagacagcgcagcgcccgctattcccttgcgcgccttggcgagcgcctcaaacgaccacttctcccctgctgtttcgccgtggggcggatgatgctcgccccgccaggcgcggtcgcttccgccaaacggcatgcaaaagaaatccccgcgcaacacgcgcaaaatcgccgggcaatcgcgctcaagcgtttcgttccaccagggcgcaacgcgataaggcgcaaaaggcgttttctcatcgcggaaaaaccgcactggcgcgatatggccgcccatttgtgttacggccagttccatccggcgcgtgtgaagcgtgtaactgggctgtccgtagattttcttcaaaggcgcggcagtcataaaagcctatctcctatatgcggggccgctttcccggcaattcaccggcgcgctgccggaaatctatccctcagattcgcacagattccgcctgcccaacttttcaaagcgagcgggaaggctcggcccacaaaaatcgttccgactaatacgacggagccaattggcctggcaaccggaacaggcggcgcgcccgagctctttcacaaaaaggaatcattcttccgcaacaacaagaagaagtctcccaaggcagagaccgcgccaatgctatgccctttgttcttgcccaatgatctttttgcttttcgtatttttgtcgtttttcatggcaaaatcatgcgtttgcagcaggcatgcgagttgcccgcgccgctttttgcctcaagccgcttctccttcaccaccgtgtgcttgactgcccgagcgcgtccgaagtctattgggcgcgcggagaacccgccccgtgcaagaccccggagtccaccgttattcacccccagccctgtgcagtttgcgggaacagttcagggatcgagcgggccgagccaaggcagcggatcgattttgaacgtggaggtcaacatgcgatggctttgagtgccaatccgctgatgcggcgtcaaattgccgcctttgccgctgtgtatgtgacatatttcagttattacctctgccggctgaatatgcccatcgtgaaaacgaatttcagccgggcatttcaatggagcgcggcggattttggcaaggttcttacggccctgacaatcttctatgcaatcgggcaatttgtgaacggccagttgggcgaccgttttggagctcgacgaatttcggccttcggggcgctcgggtcggtggcgatgaacctctgcgtttttgcgctggttttatttgccattcccgttggagacactgcggctgccggttccgccgcatccgccgccgcgccggatcacagcctgattctgaccttgctcatcgtattttggggcgcgaacggattcttccaatccatgggctgggggccgatggttcgcctgatggcacaatggtttcccgttaagggccgcggcaaagtcatgggactgctcggcacctgctatcaacttggcgctgccgtcgcgagcctgctggccatctttctcacgggcgattttgtgcgaaggttgggcggcgactggcgcctggcgttcctcgttccgtcagtgattctcggcgcaatcagcctgtgcttttatatggttgtccgcgacagccccgccgatgtgaatctgccgcccatctcggacgaatccgacgcctccccttccctggataaatccgcggcgcaggctcagacagcggcagcgacggtccgctctctttcgggtggcgaacggcgcaccctccggcaaaacctccttgcgacacttgccaatccatatctgtggcttgtggccggcgtgtttttcatgctcgacctcaaccggtatggatttgtgaactggatgcccgcattcctcgacgcgcaaacgagcaaaggcgccgcggcaacatcgtcagccggcctgggcaagatgataaaaatctgcatccatccgctggccggatcgctcggcgccctcgcggcaggatgggccacggaccgtttctttggcggacgccgcgcaccggtgattgcgatgcttctcgccgcgctcgggttgctatcgctctggttcccgcacattcacgcagaaaacacggcgctcgtggtagccatagtagcgcttgtgggcttttgcacctacggaccgcatatcctgatggtcgggcacgcggcccaggatttcggcaagaggagcggcgcttcaggcgcggcgggattcattgacagcatcggttatatcggcgcttcgcttgccgggtggggcgcgggaaagatgatagacgccagcgggtattccgtcacattttccgtgtttggcattgcggccctcgccggcgcggcaatggcctgcctgatctggaaggctggccctcaagccgccaagcactagcccaattgcatagcgaaggagaaacgatacgatgaactcgcgcgaacgcgtgcaactcgctcttgcgcatcaagaaccggaccgcgtccccattgactactgggcctcgggcgagatcaccgcgaaactgctcaagacgcttcgtttttcgtccgaagaggaattgctccagcactttgatgtggattttcgatatattccaggcccgcaatatatcggtcccgaactcactacgcggccggatggctcggtcgaggatttgtggggtgttccgcgcatccgggtcgaggttggcgcgggcgaacacaaagccagctaccgcgaggcgtgcgagccgccgttgaaagacatgacgctggaggaagttcaggcctatcccaaatggcccaatccggattggtttgactactcatgcgttcgcgaacaggcggccaaggttcgcgctgcgggcaagtgcgcgatcttcatgggcgatcgcatgaatcgctgcgcgcaactcaagccagcgatgtatttgcgcggcgtggccgacatcctgatggacatggtggtgaatcccgagatcgcgcagtatcttttcgaccggattgcggcgttttacctcgaatatgcacggcgcacgctcgaagccgccgggggcgaaatcgacatcttcatgatgggcgacgatttcggcgcgcaaagcagcctgctcgttgcgcccgatgtgtggcgcgaaatgctgcggcccaatttcaaggcgctgatcgaactcgggcaccgatacggctgcaaggtagcgcatcactcgtgcggatcgatcatgcccatcattcccgacatgatcgagtgcggcctggacatcttgaaccccgtccaacccgaggtgcaaaacatggaccggcgcgaactcaaacgccgctttggcgaccgtctgacgttccacggctcgatttcgattcagaagacaatgccgctcggaacgccggaagatgtgcgtgctgaggtgcgtgaacggtttgcgactctggggccgggcggcggatttattttctgcactgcccacaacatccaggtggacacgccaatcgaaaacgtcctcgcccttttcgccgcctaccaggaattcggccgctaccaatgatcgcccaattatgacgatggaattttccccacgaaatacgggaacaaaacgcaatcccgggtaagattttcaaaatcggggacataaaaatcgggaaaatcggggacaggttattcttttcgccctttccggcctgtttttcggttcgctcctttatttctcgaaggttttcggccgcgtttaagcggaagcaggattcggcccaatcgcgattccaatcgctcgataaacgacttcgatcccgtcgggcggcccgtatacgtgttttggcgtatccgttgcgccgtctcctcgtcaagcccctcggccagccactcggaccaattgcttacaggcccaggaaatggacgctcgggcgacaacagcgaatcgatttcgcccgaggcgtgcgcccgcgcgctcgaccaagcgttgtcctccggtgcatcggcgatccgagcacgaaccgggttcaactcgacatactttaccgccgcccacagatgcgattcatcaagcggcgtcgagtaaaaacaattcgaccatagatgcccggaccgctcccggcagcggttgatgaaacgcgaatagcgcatgtgcgcccgcccgattgcgcccgacagcgagtcgccccggcgcgccgccgttcacggacgggttgcgccattcgctcgcgatccggccccaggcgatgatggaaatgtaatggccaccttccttcgcctgaagtccctgaccataaatatccctgccctcagcgaaatcgggaatcccatccatgtccgcgccgccatcgttgacggggatgaggcagcctatgcgtgccttcaggcgccgccgatttctcgaaaaggcagtcgttctgctttggacattatggggctattaaaagtaaataaaccaattttgcttgcttcgggaaaaggcactacttatgaaaaagatagttagtgcctgataagccctccattccaagacaattgcgggcagattcagacaaaacgagaagcgggaggcggcaatggattttccagaacaggacaagaatttcaatttgctggatgcggaatggatacccgtcctctaccgcgatggcacgtataaacgcgtgggaattctcgacgcgctgaaggacgctgggaaaatccgccaaatcgccgcctccaaccccatggaccgcgtggcgatactgcggtttctgctggcgctgctctattggtgccaaggcaatccgcctgaagacaaaaacactcttccgcgcgatggctttcccgagacttggttctccaaactcaatgaacccgcccaccgcgaatgcttcaatctcctgggtgaggggaagcggttctatcagaacgcagaaattcgcaatcttcctgaaaagaaaatgaagcctatcggcgagctgttgccggagtttcctcgtgcggactcagtgaatcacatccgtcatatcgtccatgatggttcttatggtctttgccccgcatgttgtgctttaggaattctgcgtttttcggtatgggcaccagcaaatggcggttatccatcgtctgtcaatcccccctcaagtgtgtatttaatgacggaacttcgctctcttttgcatacccttgggcgctgtcttgccgacgcatcttcggaaaatacacctcccccttggattgagccagcggagcctgagcaacctttcggggccgtatcattattggcatggagacctcgcaaaatgtggttgggtatgattgaaggcgaaggtaattgcgcaaattgcggatgcagcaaaaggcttattcgtcagcttcgctttgcgccgggttggcccacgccgctcaacgatgaccaagcattcgcaaaacaggtgcaaaaagcgttcaagaaccgaggatttatcgcaaagcatgctaaagtaaagcctgtgctcgatgcgataccattgattctgtcgcgcatggatgatcttcggaacgcatgcagatcagcgcaatgcaatgtgcccgcaagtatggaccaagccgaggagattgcccagtcatttgtttcgctatgggaaagcagaaatcccgtggcggaagaaatcctgctgaacgaagctaagtatttcgctcacctaacaaagcgatgcttaacaaccttgggctgtaaagaggatgaccctgcagcgaaaaaggcagcaaatgccgcctggctgatctacaatacccgattgaacgagttgtgcaatatgtgtccggatccccttgccgcagaaattcaaatgctgagcctagatggggtgcccaccaaccatgcatgtgcgctggcgaaaatgatttgcttcattatgcaaaacaatgaggaggcattcaagaaaatcacacgcaagccaagcatgaaagaaaaagaagcactcatggcggaaaaaccacaaaaaaagaaattttggccgggagacccccatcttttaaaggagaaggagccaatcgcgtttccggtagcaggcaagaatgtggcagagcaagctaaagcatggaagcgcgcatttatagctgcctcaccgaacgatccccaaggcacaaatatcacaatagggccagtcgtcgcggacttgcagtcgggtatttacgcctgccacgacgttgttgccatttcgctcccggatcgttcatccgaaaagagagcagatcaatcagagcagatcagcaaattgctattcagcatgctgaaactcgcggtggatgctcaagagtggaagaaacctgatcggaagcgagaacatccagagattgactccgcgcttaccctccttactccggatcgggaatggcaaattcgatccgctctttcccgccccggcagaacaagcgacgacaaaggatttctgcttgcggtctttgccccgatggccagacatgcaatcttttcagcagtgcgcggttcaccacttcgccggaaggctgcggctcggcacgcgatgacaggattggaaaagagaatcgacgaggtaatcgccaaggcgaatcaatcggctgaaccggcggctgctgcaaacacgcagtctagtgtgcccgaggaacacaacagcggtggcaggaagagcaaggaggccggggaatgagcctgacagcggaattcattcggcgtctggaggacttgcaggaaggcgagcgttcgcgtctgcgccggcttgcgggccagccgcttgacaagacgctccagggcttcgacctgttcactggcctatggtggcctttgcgcgagaatagcccccgcgcaccacgccgccaagtcgcatggttgatcgccctgttgtatggcgcgattccggttccgcacgttcggcccgattcaggagcgggaccatcgcttgcggctcttcttggaatgtgtgaaccgagaaacgctaaagatcgccctcgttttcgtctgcgattcgatgccataatctgctcgtcgctttccgacatcgaaccgggattgaactgggggctgcgcgaaatcgccaaggcgatagcggggcgcgtgccgcacgcaaggaacattattgggatcgactgggcgctgctgctcgacgacctttcgctctgggacaaagaattcaacttggacgacacgtggcacaagggccgcctgaggacgcatgagcaactcgtccattgcgacgagacacaccgcacgccacaagacctatgggcgtgcgaatatctacacacgtcgaacagataatcgaaaggagaaagccatgttgattgaaattcacatgatccagaaccacagtccggcaaacctgaaccgggacgacctcggcgcgcccaagacgtgcatgttcggcggcgtcacccgggctcgcatttccagccagtgcctcaaacggagcatccgccgcagtccagaattcgcggcggcattggaaaacgatggcggggtgcgcacgcggcggctggcttcagtgctggctcacgttgcccaattgggtgactttgatttgacccctgcaaggctcgcgagcatgatcaaatcatctgaacccctttcccctgaagaagcgaaaatggaggtcattgcccgcgaggcgctcgaactcggaggtgtggcccccaagccaaagaaaaaggacaaaaaaagtgcccaagcgaaaaacgaagaggaaggcaatgacgagggtgataatgcagaaaccatctcgaaaatgttgctctttctttccacatcgacgatctcgaagatggccagggacttgaaggaggcatcgaacgcaaggaaccttgtggagaaattcaagggctatattgccgaaaatccctgtgttcccgacatcgctctgaatggccgcatgacagaagtcaaaaagagcaacgtgtttagcgacctaaacttttctatcgaagccgctctctcagcagcgcacgctatctcgactcacgcggttattaatgaagtggattatttcactgctgcggacgacatccccggccaggatgccggcgcgggccacgtgaatgaagggatgttcaactccgcctgcttctacaagcacttcgtgattgactggaaccagctcgttgaaaacctcacgcccgaagcgaaccgtaacgctcccgatgcagaaacaatcgaactcgcccgcaaaacggtccgatgtttcctcgaagccgccgccatggcaaatccctccggtaagcaacacgccttcgccgcatttaactgccccgacggaattctggtggagatcaagaccgaatcctccacgcccatcagctacgccaacgccttcgctgaccctgtcccggaaaaatcaccgcgtggtttgatcggcgagagcattgctcgtcttgggcaatatgcgcacgagatcatcgaaggctattccattccggccgagcgattttggttttctcccagcctctcttctcccagccagtcttctgcaagacagccttatcgcctgacgtggattgacaaaagccaaaaggagcacgaacaggagcaatcggttgtgggtgatggcaaagaattcggtaatttccccaaatatgtgcatgccatcatggaaaaggttcccaagggaggcgcggcacaggcgggaggaaaaccatgaccgactcttcaacgctcttcctccgtttggaaggtccgctccagtcgtggggtgacacgtcgaagttcgtcattcgccggagcatggaagcgccgacaaaatccggcgtgatcgggttgatcagttgcgcaatgggatggtcgcgccccaagggcgtcgaagacccaatccccgacagcaacttgcgcgacagggcgcaacgcctgatcaagcgccacgagaaagacgaggttgaaccacgacgagcgttgctggaccttctaaacatgctgacgatgggagtccgcatcgaccgtcctggaatgcgctggtgggactatcacacggtcggtgccaagatcggcatgacgacagcagcgggcggactcaagaccgatgcacagggcacagtcatcaagcgcttggagtatctggccgacgcgagctttctcgtcgcgttgcagggcgatgcggatttggtcgggaaggtcgcggaagccttgcattcgcccaaatggcccctgtatctcggccgcaagtcctgcccccctagcgtgccggtgcttatcaccaagaggcgcgacgataactccagggagccgctgctggaaagccatgcaacgcttgagtcggcattgagttccccttctgttccttggcggcctcgatatgaagacgaccttcgcgacgatgagcggatcctgcgggacggacaaccacgcgacaaatggaagattgtgttggacatccttatcgaatggcgaaaaagcgatgccgaaccagacgctccagacgacgccgatgtctggtatgacgtgcccttttccttcgatccgcctgcccatcgtccgcgtttggtcaaacgcgacggcaaagtcacggtgaatatcggcccggcgcttcagcatcccacgccgccgccgccacggccccgcgcaaactataaagacgccgagtggacaagcgaaaggctcgtcgaggttgttgacccgaaaaccggaaaggtcacgctggaaccttatagcgcgcgtccccggcgtttgcgccgggatcaaggactgtgcgtgttctgcaagtcgcccgcaactacggttcagcacgtgacctatcgccgcgccggtggcaatgaagaccaggacgatcttcggtccctgtgccgcctgtgccacgacgccgtcaccatgatcgaatacggcctgggcatgggtctcgaccgcatcaatcccgaagacccccgctggcgcgacgacatccttcgcacccgctgcgaaattctgcgctggcgcagcgaggagacccgacgtcgcgccctacgcagcgcgcccgagaaggtgcgcaaggagatgctggaggaggaagactgagtatgtatcattctcacttgctcatcaatgttggcgacaaccctgaccggccagattggaacatcacacgcaagtggctgcgaaacctttaccgcgtccatcagcggctttgcatggctttcccgtcgaatgctccagtttcgcaagccgaacgcgttgttgcctattgcgcgccgtttggcagcgcgggattgaatgatctgcgcgaattgcccagcgaaccgaatgcctccgatgttcattgtgctcgcagtgataaggctggttttctctttcgcatcgattatccagcctatgatatcgtcgatggcaaggcaacatcacggtccggacatccgcgacgccgcccaatcatcctcgtgcaatcctcacatgaagcagcgcccgattggaatctcgctttcggattggatgaaaacgcgattgacgatctcggacgccccattgggaacgcttcgtatctgttggccgcgccgccgcaaaccaaggaaatctgcatcgaaataaaggacgaaacgcttctattggcatgtccgacgcggccggaacaggatttttcgatacgttcaggcgaccttgtgcgctttcgtcttcgagccaatccgacgcggacaatccaggaaggatcaccaaacggcaaacgcaagcgcatcagtccgaccttggataagcatgcggattggttggcgggcaaacttggaaacgcatgcatctcgccaatctgcatcgagacattcgtgcctggatgggcttacggctggcgcaccaaacacgaaccgcagcccggccagagaatgcaatggtggtctgtgttgtttgaaggcatattccgggttggcgatgtaaacactttgaaaaaattgctggaatccggcatcggctccgccaaggccttcggattcggcctgctctctcttgcgccggtctgatcctgttttctttcgtttgctcctgctatctccccgcgctcgttcgcggcgccgctctccggttctttgacataaccaatttccacagcccacgccagcaacatggggagggaggatagcattttgggaggcggggaaaaggaggaaactccccatgaaagacctgcacgaactcccgcgattcagcgagggtctcagttatctctatctcgatcattgccgcatcgaacaagacgccaaatccatcgcagcgtgggcgcaagacggcatcacgcgcattccggccgccgccctcggcctgctcctgctcggtcccggcacgacggtcacccactcggctatgcgcgtgctcgcggaaaacggcgtctcggtcgtctggtgcggcgaactcggcgtgcgcacctacgccgcctcgacgggcgaaacgcgccatagccgcaatctgctgcgccaggcatggctcgccacgcgcgagccgctccgcctcgccgtcgtcacgcgcatgtatcggatgcggtttcccgatccgttgccgcccggcctgacgctccagcagattcgcggcaaggaaggcgcccgcgtgcgtgacgcctacgccgccgccgccgcacaatacggcatcgaatggaccggccgaaccttcgaccactcggactggaatcaatccacccctgtcaatcgcgccctttccgccgccaattcctgcctctacggcctgtgccacgccgccatcctctcgctcggatactcgcccgccctcggattcatccacaccggcaagcaactctcctttgtttatgacatcgccgatctctacaaggtcgagttgagcgttcccgcggcattccaggccgccgccgaaagtcctgaagccgtcgagcggcgtgtgcgactcgccatgcgccagatcatgacgcgcgccaaactcctcgaacgcatcccgcgcgacatcgcccattgcctcgacgtcccaaatcccgaaaccgaacccgatcccttcgccgacaacccctccaatccagccagcctctgggaacccagcggcggcgcgggcgcctgcatcctcccgcgcgatcccgcctacgcctataccagcgcttccggggcgggggaatctcccggcgcaagcaacagcggcggcggcgcacttccggttccgcccatgggagcgctggaaccatgatcctattaaaccgcaaataggcccgcgaaacgcttgaagcagcggagccgaaacccagcaaagatgaacgaaccacagatgaacacgaatggacacagacgaaaatcgtcgcaagaagcaatgattgaggaggatggcaataccaaaagacgcgaaatagaaggattttcattcagaacctgttttgcccgccagataactcaggctctgaattaaattcctggagtgtagcgttttttcctcaagcggcgagaaggggcgcataggtcttgataattgtccggatgttcacgccgcgccgggcggcgcgggccgatgcgcgaagcagtcgctcggcgcgaagcgcccgaagactgttgcg

SEQ ID NO: 553 - DNA, 24962 bp, Artificial Sequence
  Synthetic Oligonucleotide
ccccccctgtatgtaaaattattcttgagcatttcgacgcctatgatcaacaccgtaaccgtgctgatatacttgagaaacgtgctattgaattcgtcaagtcttctacttttccccataaaacgggaagagtttccggcaaacaacttctttccatactgacatccgttcccggtatcggtccaatttcggcccttatatggatcgccgttattggcgacgtaacgcgctttccgtcagcaaagcaatgttctgctttttgcggctgtgatccctctcttcgcatttccgcaggaaaggtcaccagctacaagcgcagaaaaggcaatgctttgcttcaccatacgcttttgcaggccgctcaaggcctgctaaatcgttcttcagagccttttggcaagtgggcgcgcgttattgcctcaagacatcgtaaaggcggctggttcaaggccctcggtgccttggctcgtcgtcttgcaatgtctttatattactgtcacacccttctcgaagacttctcatataaaaaataccagtgtatcgaagacatacacggttaccctaaagtgcccgtggccgccgttgggctttccccggcagctaatcggatacttgatgccctcggcatcaaagatacccacgcacttatcgaggcctatctaaaggacctcggcaaacagcggggtatcggacaaaccacgctcgaaaggatagaacaatggcgactcaaaaatcggccagttctccccagtcaagtccagttcaagccctcgaaccaggatgctacatcatcggagtcattgcccgacgaaccaggcgcgaagtcggcgaaaagcgcaaagtcctcgtgcaatacaccgtccagtgcgccgactcagtccagacaatcgaacactgggagccacaatcggttgatgcgtgctatccggtcggcgcagagatcgccatcaaagtgaaccccaccgttcgcgttgataaacgcggcattccccgcttcgccttccgtgttcccggcggcgactcatctgaattttaggcggcgactcatctgaatttaggaggtccactttcatgccagaccctatcgaaagcacaccaacccctgaatatctttcaaacgaccaactacgcgcctccgaaatttcggaagaagcccatgacatgatgataaagtatcatctcgatgccatcgtcattctcgcgtccttcaaaagtgcagacggcatacttcatgttcgctgttgcccacaatacggcaatcccaacacttgcagcggacttcttcttcttcgtgccgcaagcacgatcgccgaggaaatagaaactcctttctaattcctcttgacttctgccaaggttatcgcctataattcgctcgtaacctggcacagtcaatatcggagggcctatcatggccaaagtaacccttgtttcccccatcggcactatgcgcggtcgtcagggcgatcaggtgttttccatgctcggaagacagcccctggcccggcgtttcgtcacgccgcgaaacccgcaaagcgcccctcaactcgaaattcgcggcatcatgacggcagtctcgcagctctattccggcctcactcgatccgtcgccgaaacgtgggacgcggctgccgcgaatcttcccgaacgcacttccgaaaccggcatcgcctaccccgtgacgggccgcgttctgtttcaggaagtcaacacgatgcgcctcttgcgaggccagtccaccacgacaaccgcccccgccactactgccccgtccgttcccatcatcacgcagcccgcacaattcgacatctccagcgccttgctcatcattcctgtggacaactccgaacttctcaacgacggcgacatctaccgcgtgcgcatcacctgcccccttccgacaaatgtcgttcaggcttccccgtcttggcttcgctcgccagactgggaagattcctccaagtccttcaccacaggcaccatgatcaaagccgaagaaggcacgattgtccttcatccggactcctccaagtgcggtgtcttcggatccgctaccgtccttcgcttcggcttcgaggtcatgtgcttgaattcggcctacgttcgccggaactcgcccaccttctatcggtcttggaccttcaccaagaccaacccctaaaccctcgtggcattccgccacttcctttgtgaggttctatcatggcacaggcaaatctcgttactcctctcgacaaggttcgcggcaagatgaataacatggatttctcggtgaacggggaatcccaactggttcgcggccacgtcaaaccggacgatccttcttcgaatccgcagcaggtcatccggggcattctcacgaccgtttcccagggcttcaaggcgctgtctcgggctgtcatcgacacctgggacgccgccgccgcgctccttccgaaacgcacgaaccgcgcgggctacgaatatccggtcaccgcccgcaccctttaccaggaggtcaacacctaccggatgttgaacggcctaaccttgtcctccaccgctcccggcacggcctacccgtcggttcccatcatcatcgatgacgccgaattcgacgacgacgaaggcatcatgttcattcccgtcgaaaacggcgcaaacctcaacgacaccgacatcttccgcacgcgcatcacctatccgcttcgcacgacggccgtgcttgcccgcgaaaacgacctgcgttatccgaatcccaacgacacgcaggttgccttcatcaccggcaatgaaatcaaagcgcagggaaacaagatttcgattccttgcgtttccgaactcgccgccgcgtttgccgtcgcctccatcaaacgcttcggcttcgaggtcgtctgtctcaacccgtcctacgttcggaccaacgatccactcttcttcgactcttggtcctattccatcatgacgtaggacgcccatcatctctctgggaggtttttccatgcctgagtgtccgcttgttcccattccgcttcttcgcacgaaaaccttctgggcgggtcttggctccatcgcggccggttttgccgccgccgtacagggcgacccagtagggggaatggtcctcatttcccagggttttctcgccatcttccagaggaacgccatctcgaaagcaaaataggtgtcgctgccaggtgccacacctgctttcgcgcgctcctctggcaggccccggaatcgttccttggtcgggttgttttcaaccggtcgatcgccttggaaccttccggggcctcttctttttcaccccgggttccgccgccttcgctcgcaaggcctcgctcaggcgcgcgccgcccggcctcgtaaactcgggcttgcgggcggcgtcaggcggccctagcctcttggtttgcaaggctctatctgcgtttggtatgtgatctcatgattgttgcgtttcgtcttcgatggggccgcctgattggcaaggcggatgcagtttatccaaccgccataggggattttttccatgagaagcgcctcctatcgaaaaggcattggggcaaaagtcaattcacggagttcgtcacgagaccgtatcgggagatgagggcagaggatggaatccataaagtccgcgccgccggataaacgccgccacggaattgggcagcacaccctcggggatttcgccctccgccagccgttcgcgcagccaggtcgaagacagcgcgcgcaggtccggcggcggctgattttctggcgctcggctttgtgcaaaactggattcgccattggaagaagcctctgccccggaattgcccgggcgctcccccaccatgcgcggcacaaccagcggcggggccaggcggacgacttcctcccacatcttccagcgcggcgcttgttccaggatgtcctcgccgatcagcaagcgccagcaatgtcccggacgtttcgcttgcagcaggcggatggtgtcgattgtgtatgaaacctcgttacggcggccctcaatgtcgagaacctctacccatcgttccaggcgcgccacggccaggcggcacatctcgacgcgatcctcgaaggaagcggccggttgcttgcccaaggcatggcgcaggcatggtattacaaaaatgcggtccagagcgcctgtttccagcgcccaaaggcatgccagaacgtggctcacatgcggcggatcgaacgacccgccaaaaatcccaagattcattgttgcttaccgattgacaggttggccggaaaagatacttcacttcataaggcccggcgctgccaggcccaatctatagttcaatctcttttccgccgcaagcacgagacatgcgcaaagacgttaaatttgctctccatcaaattacatggggaaacgaactgctccggtttctagatgacgcggcggctttgggcgcgttctccggcgtggaaacattctcaagcgtcgtgaatgagtatcggggaaaggaaaagcagtttgacgcggaattggcggcgcgcggattgcgtctggccgcattgtatggcggcggcccgctccacgaagaggcgcaggcgcgcaaggtgatagagcacaatctcgaactggcgcggttcctgcgagatcgcggcgcggaccggctggtgttcggcccccccgcgtgtcgtgatggggaaattctcaatcgcgacgatttccgccgcctggccgaccgcctgaacgatttgggcgcgcaaacgcgcaaaatgggtattttgcttgggattcacccccatcttggcacgatcatcgaatcggaaattgatttggccctgatcatgggcatgacggacccggagtgcgtgtatttcgcgcccgattgcgcccatttggcaggagcaggcatcaacccggcggacgtggcgctcacttatggcgaccggatgatctatatgcatctgaaggacctttcgccgcccgctggacacgaaatcccgatccagccacaagccggtgaggcaaaggaggcgcacaaggtcgaggcaaatgaaacgtcagaagcgaaatcaaaagcgagcagcgaaccggcgcctattttttgcgaactgggacgcggaattcttgatttccaggtgattttccgaaccttgggggacgtggggtattccggctgggtgacgctcgaattggactccacgatgctcacgccatccgaaagcactcgtatcagcctcgaataccttcgcgcgcaattccctggcatgatataaatttagccgcgaaaattgcataagaacgagaaaaaggaagaaaaggccggagataagtgggcgcttacaggagcgattggcggctttccagggcggcgcgaagcgtggtggggtcggcgtattccagcgcgccgcccatcggcacgccgcgccccagccgcgtcaggcgagcgcgcgtgcgttcggccaggcggtgctgaatgtagattgccgtcgcatcgccctctacgctcggattggttgcaagaatgatctcctgaaatccgcccgccgccgcacgctcgatcaagtcggcgatgttcaaatcatccggcgcgatgcctttcatgggcgaaagccgcccgccaaggacatggtagaatcccctgtagccgcctgccttttcgaaggcgatggcgtcgagaggctgctcgaccacgcacagaaaggcggcatcgcgcgagccatcggagcaaatcgcgcattcgccgccttcggcaagaaaatggcaggcggggcattcgccgatttcatccttcacgcggcggatggcatcggccagcgcaaaggatttttccgcatcggcgcgaagcaaatgaaacgccaggcgttcggcggcgcggcgtccgatcccgggcagtttgcccagctcggctacgagggcttccacggcggatgggacaatattcatcggcagatttcaggaggcaaatcagactggcaataacgcggcgagtcccaaggagtccgctagaacaatcccgggattttgatgccgcccgtcacctgcgagaccttgctttcatgcagttctcgggccttttccagcgcggaattcgtagccgccagcaccaaatcctccaacatctcgagatcgttcgggtccaccgcctcgggtttgattttcactttgacgatttcctggcgtccattgctcgtaacggccacgatgccgccgcctgacgtgccttccacgaacaggcccgccaaatcctcctgaacgcgctccattcggtcggaaaggtctttttgaagcttctggatgtggtgaagatcgaacatgcgagggaatgtctccatgagagaaatcagcggattccaatggaatccttcagagtatgggacggccgttgaaatcgcggggttccgctttgagcgttcgctgcacaagatcgacggcctggcgaaaatcaggataacgcttcatggcttcggtgaaactgagcatttcgagctgctgaggactgaatcccaaatcgcgcgcccagacgggcatttccgcgcggctttcttgcgcgccgtgcgcgtcgtccgcgcggatttcttcgcccggcgcttcatactcagagaccgaaccggccgcggcgaatccagccgaggcggctccggatggctcagaagatggcgcggaagctggcataggcgcggactccgcagaagcctgcgcagattcacgcgcggacgtagatggcggcagttgcgccgccgaaggcctcgcgccgccctccctttccgccggagcggtttgctcgataacaacacgcaacgcgcgcccagctaaagcgctggcggcttgctcgatccgctgccggcgctccggacgagtcagcgatttgaaggccatttcgccttcgcgtccgcctggcacgccaataaccagccgttgcgtttccagagagagaagactggcgcgttgcaggggcgtggcgatgctgactgcgctgcgggcaagctcgccgttcagcgcaatccaaaacttgcccgcatcgagcgttccgacgggcgatacatttgcggatggcgcggacttgaacggcggcgcggaggccacgggagcgataggcgccggtggctgaaaagaagaagcaggcgatgaggaaataggagccgaagcgggcaaaggcgtggaagccgtcggaagcggaggcaaagaaggcagcggcgtcgaggaggcgtgcgcggaatgcgcggggggaggctgtgcaggcatcgccggcctggaaattgcaggcgcccccggcgaaaatccatcagccgcaagagcagcgctggcatctgccggatcgaatgcaggcgcgcaagacgcgccggaagattccgacacggacaaaggaagcggcggttcaacggacgccgctggcgctgtcgaatccggcgcggttcttgaatagccgcctgcgccgcgcgagtatccgccagccgccgcgcctccgcccgcatacccgccgccgcgcgcatagccgcccgatgccgcgccgcctccgcccgggcctcgcccgatgccacctccaggcgcgccggctcctcccccgcctgcgccgccacgcatggaagaaagcgccgccagagccgcctcgatgtccgtcgagcgatccacggccgccaatttaacaaacgtaaattcgaggaggaaccgcgccggagttaccccgcgcagacgctcatccaaaagcaaaatttgatgaatggcatttagcaaaaagggaatatcggcgcgcccggccagttcgcgcatcgtttcgtatccggcgcgcgacttcgctacgccgaattcacccgcgcgttcctcgccgccgcctgtcacgcgcaaaatcaacagatcgcgcaaataatgaagcagcgtgcggacaaatcgcgggatatcgcgtccgcgatcgactaaatcacgcgcaatcgccagcagccgcaccatgtcgcgttcgagcaggccgcgcacacaatccgccagcatggcgctctcgacaatcccaagcaactgatgcacgcgttcgagcgtaatctcgccgccgccgagcgaaatcaactggtcgagcgtcacttcggcgtcgcgcattccgccctcgctcgcaaacgcgatcgcctccaggatcgcatcgcgctgccctggggcgacgcgcgccatcgcagtctcggaatccagaatccgcgcgagctggcgcatgatgtcttcgggcgtgatccggcggaaatccaggcgcgtgcagcgagattgcaccgtctcggggattttctccgggttggtcgttgccagcacaaacacgacgcgcgccggcggttcttcgagcgatttgagcagcgcgttgaaggcggagtccgaaagcatgtggacttcgtctataatataaaccttatatcttccggccagcggcgcgcggttgaagccctcttgcagttcgcggatgttttcgacttttgtgtaagtggcggcatcgatttcgatcgtgtcgagatcgaagccttccgtaatggccacgcagcgttcgcattttccgcacggctggggcgtcgggccgctggcgcaattgagcgccttggccaggatgcgcgccattgaggttttgcccacgccgcgcggaccggagaacaaataggcgtgcttgacgcggttcgcggccacatccacgcgcagcgtgtccacggcgtgcgcctgcccgatgacctcgtcgaaggtctgcggacgccacttgcgcgccagagaaacataagattcgcgcgaacgggccataatgaacatgtccttgccggaaggtgagcgccaaacgggatttcaggtgcgacggaacatgcaagtgaccaacaagatttcaagtggggcagacttccaggtctgccatccggtccgccacattgcctgcccgcgcatattttcacaaccatgcgcggacatacggcggcttttatccgacccccgctcactctggcaacgcgattctccaagttcgcatgattgcttgattacagcctgtccatctgtagcaaaatacctaccgcagtcctgcagcggtggatttttcttccctgacccgccgtaaaagaggaggcaccttatgacaacgaaagaaaaggtaatccaggccgtggaagacctgcccgccgatgccaccattgaagatgcaatggaacgcctgctgttcctggccaaggttgaacggggattgaaacaagccgattctggcgaaaccattcctcatgcctctgtgaaggagaggatgggaaaatggctgaaataaggtggactccccaagcggcggatgatctggaggccattacaagatttatcgccgcggattcaccgcattatgccagcctctttgccctggatgcccttgcagcagttgaacgcctccatgactatccgcattggggcagaattgctccggaattcaatactccttctgttcgggaaatccttcttggcaattattgaattgtatatcgcgccagtgacgacgcgatggaaattctgactctgttccatgcagcgcgcctgtttccccctccccacatggcagacctttcctgacaaaagccctttggggaggcacaagcattttccactgctattgtgtgaacaccaatcggtcaaatggggaaaaaggattggctgttagtccgatgtaggaagcggtttttcccagagcgggcgttttcggggcattccatcgcgccgcggatagcgctcgggtgtggcagaggtttttcgaatccataccgcggtgtgctgcgcgggcgaatcgccgacggggtaaagtggagaactctccaggcgtgcgccgagttcgccaaaagccttgttgctgacttcgatttccgcctggcactcgcgtcctttgtaagcgagcatccatccgcccagacgcacaagaggcaggcacaattcgagcgccacgggaagcacggccagcgcgcgcgccgtagcgagatcatgagcatcgcggcgggccggatcgcgtccgaagttttcagcgcgttcgcaagcgacctcgacatttgccgcgccgattttttctgccgcgcggcttaggaattcgcattttttgcggtttgattcgagcagcgtcacgcgccaagccgggaacgccaccgccagcgccagacccggcagcccattcccgctgccgatgtcgatcacgcgcggggctggtctggattcggattgggtattggcatcgggagaggcggctgctcttggatctaaaagggaacccgcgcattccgctcgcaacggacactcgggcgcggcaaagggcgcaagcgaatcgatcacgtggcgctcgaccatctcgcgcatgtcgtgaatagcggtcagattgaaattccgcgcttccacctgaagatattcgaggaaattccacagggtttccgcggcgggaggaatgcgctccgctgggaaatgacgccacatccagtcgaaaaggaggtctttgggtttcatggagaaacggccggagaagaataatcaccgcagaggcacagagaaacgcagagaaaggcagaaagaggaatttccaatttgcaattacattttctcatcccgcttcatccttcttcctttgtatctttgtgcccttgtggtggaataatttcctctcatcctacctccggtttgggatcgcgcagcatgagcgcatcgacggcgtctcgcgcccggagtttgcctgcgaggatcgcctggactgcctcacaaatcggaagcatcactccatattttttcgccagcgcacaggccgcacgcgccgtggcgattccctcgatggccattccaatttgcgcccgcgcctcatcgagcgtaagcccgcgcccgagcgcctcgccgcatcgccggttccgcgaatgcgggctgaatgatgtcacgatcaggtcgcccatgcccgccaagcccgcaaatgtccgcggatcggcccccatcgccgcgcccagccgcgtgatctcagccagcccgcgcgtgatcaaagccgcctttgtgttgtcgccaaacccgaggccgtcgcacatccccgccgctattgcgatgacattcttgagcgatccgctcaattccacgccgacgacgtcggtttgcgtataaacgcggaatcgcgacgtatggaaaatctcctgaatatagcgcgcgaaatttagatcggccgcggccgccaccacagaagtcggcacgccgcgcgccacttccaccgcgatacacggtccgctaacgaccccgatttgcggagccgctgcggattccgacagtggcagtgcggaggcagatgcctgcttcaatccaagcccgcgcgccaggcagtcggaaagcgtgtctcccgtttcaggatgcaggcctttggcgcaaatcacccatccatgacgcggccacaacgcgccgggatgtttttttgcgagcgcctccgctgcaattcctcccacacgctcaacgtcctttgccgccgttgccacaaccgccaaatccacgccggcccaagcggaattcgcctcgtcctccgattttcccgccgccagcgcctcttccgcgcttttcaccaccgcgaccgactcgttgagccgaaagccttcgagcgcgcgcggacgccgttcgcgaagcagatgctccacagcgccaggctccgggtcccaaacgcgaatgcagtggccctttccgtcgagcaatcctgccagtacggtgccccacattcccgcgccaaaaacggcgatggtttgcctggaacgatccgcgcccggttgatttggattcatgcgctcatccctgatatcgattttgccttgtttaattgatctcgtccaattccggcgcccccagtcggcctgttcgcagaaaggtccaattcacctgcgccaccacgtcacgcttgtgttcgtcgcgcagacgcacggccgaatcgttcacgggcgcaatctcgcgcacatgcccgaaaccgcttggaatccgcgcggccgcctggatgtaattcactgcgagcgggcgccgcgcggacagcgataccgaagtcggaattccttttttgctcaagggatttttctccgccgattccgcaagcccctggccgtaatacgacaaaacatcttccatgcccaacgtattgacgctgcgtccgctccaaggagcgtaatggcgtccgccgttgtcgtgccagagcatcgtcgagggaagcaccgccgggtccttgagcgtgaaccataccgcgccgagcgttggaaatgtcacggcgctccaggcaggaaatagcgcagggtccgagcaaaccattacaatgtcttcgaatccgcgccgcgccggatagcgggtcaggtccgcccacgcgccgtcaatccgctctacgcgcgagaggtcctcgaacggcgcacccgggcgcagaatggaatatccgcctttttccggaaactcgaactggtccggcttcacctggccgtagatgaaggggctgacggcgaccaggccgcttccgggcgcatcaggaaaagccagtgttggatgatgcgcaaaacacatccgccccgacatgccggagattacatggcggcagtatatcgcattgtgatcgtcgagaagggcaatcactttgcgcacccgccccggccggacgcgcacgcgcattgaaagagacagcgcagcgcccgctattcccttgcgcgccttggcgagcgcctcaaacgaccacttctcccctgctgtttcgccgtggggcggatgatgctcgccccgccaggcgcggtcgcttccgccaaacggcatgcaaaagaaatccccgcgcaacacgcgcaaaatcgccgggcaatcgcgctcaagcgtttcgttccaccagggcgcaacgcgataaggcgcaaaaggcgttttctcatcgcggaaaaaccgcactggcgcgatatggccgcccatttgtgttacggccagttccatccggcgcgtgtgaagcgtgtaactgggctgtccgtagattttcttcaaaggcgcggcagtcataaaagcctatctcctatatgcggggccgctttcccggcaattcaccggcgcgctgccggaaatctatccctcagattcgcacagattccgcctgcccaacttttcaaagcgagcgggaaggctcggcccacaaaaatcgttccgactaatacgacggagccaattggcctggcaaccggaacaggcggcgcgcccgagctctttcacaaaaaggaatcattcttccgcaacaacaagaagaagtctcccaaggcagagaccgcgccaatgctatgccctttgttcttgcccaatgatctttttgcttttcgtatttttgtcgtttttcatggcaaaatcatgcgtttgcagcaggcatgcgagttgcccgcgccgctttttgcctcaagccgcttctccttcaccaccgtgtgcttgactgcccgagcgcgtccgaagtctattgggcgcgcggagaacccgccccgtgcaagaccccggagtccaccgttattcacccccagccctgtgcagtttgcgggaacagttcagggatcgagcgggccgagccaaggcagcggatcgattttgaacgtggaggtcaacatgcgatggctttgagtgccaatccgctgatgcggcgtcaaattgccgcctttgccgctgtgtatgtgacatatttcagttattacctctgccggctgaatatgcccatcgtgaaaacgaatttcagccgggcatttcaatggagcgcggcggattttggcaaggttcttacggccctgacaatcttctatgcaatcgggcaatttgtgaacggccagttgggcgaccgttttggagctcgacgaatttcggccttcggggcgctcgggtcggtggcgatgaacctctgcgtttttgcgctggttttatttgccattcccgttggagacactgcggctgccggttccgccgcatccgccgccgcgccggatcacagcctgattctgaccttgctcatcgtattttggggcgcgaacggattcttccaatccatgggctgggggccgatggttcgcctgatggcacaatggtttcccgttaagggccgcggcaaagtcatgggactgctcggcacctgctatcaacttggcgctgccgtcgcgagcctgctggccatctttctcacgggcgattttgtgcgaaggttgggcggcgactggcgcctggcgttcctcgttccgtcagtgattctcggcgcaatcagcctgtgcttttatatggttgtccgcgacagccccgccgatgtgaatctgccgcccatctcggacgaatccgacgcctccccttccctggataaatccgcggcgcaggctcagacagcggcagcgacggtccgctctctttcgggtggcgaacggcgcaccctccggcaaaacctccttgcgacacttgccaatccatatctgtggcttgtggccggcgtgtttttcatgctcgacctcaaccggtatggatttgtgaactggatgcccgcattcctcgacgcgcaaacgagcaaaggcgccgcggcaacatcgtcagccggcctgggcaagatgataaaaatctgcatccatccgctggccggatcgctcggcgccctcgcggcaggatgggccacggaccgtttctttggcggacgccgcgcaccggtgattgcgatgcttctcgccgcgctcgggttgctatcgctctggttcccgcacattcacgcagaaaacacggcgctcgtggtagccatagtagcgcttgtgggcttttgcacctacggaccgcatatcctgatggtcgggcacgcggcccaggatttcggcaagaggagcggcgcttcaggcgcggcgggattcattgacagcatcggttatatcggcgcttcgcttgccgggtggggcgcgggaaagatgatagacgccagcgggtattccgtcacattttccgtgtttggcattgcggccctcgccggcgcggcaatggcctgcctgatctggaaggctggccctcaagccgccaagcactagcccaattgcatagcgaaggagaaacgatacgatgaactcgcgcgaacgcgtgcaactcgctcttgcgcatcaagaaccggaccgcgtccccattgactactgggcctcgggcgagatcaccgcgaaactgctcaagacgcttcgtttttcgtccgaagaggaattgctccagcactttgatgtggattttcgatatattccaggcccgcaatatatcggtcccgaactcactacgcggccggatggctcggtcgaggatttgtggggtgttccgcgcatccgggtcgaggttggcgcgggcgaacacaaagccagctaccgcgaggcgtgcgagccgccgttgaaagacatgacgctggaggaagttcaggcctatcccaaatggcccaatccggattggtttgactactcatgcgttcgcgaacaggcggccaaggttcgcgctgcgggcaagtgcgcgatcttcatgggcgatcgcatgaatcgctgcgcgcaactcaagccagcgatgtatttgcgcggcgtggccgacatcctgatggacatggtggtgaatcccgagatcgcgcagtatcttttcgaccggattgcggcgttttacctcgaatatgcacggcgcacgctcgaagccgccgggggcgaaatcgacatcttcatgatgggcgacgatttcggcgcgcaaagcagcctgctcgttgcgcccgatgtgtggcgcgaaatgctgcggcccaatttcaaggcgctgatcgaactcgggcaccgatacggctgcaaggtagcgcatcactcgtgcggatcgatcatgcccatcattcccgacatgatcgagtgcggcctggacatcttgaaccccgtccaacccgaggtgcaaaacatggaccggcgcgaactcaaacgccgctttggcgaccgtctgacgttccacggctcgatttcgattcagaagacaatgccgctcggaacgccggaagatgtgcgtgctgaggtgcgtgaacggtttgcgactctggggccgggcggcggatttattttctgcactgcccacaacatccaggtggacacgccaatcgaaaacgtcctcgcccttttcgccgcctaccaggaattcggccgctaccaatgatcgcccaattatgacgatggaattttccccacgaaatacgggaacaaaacgcaatcccgggtaagattttcaaaatcggggacataaaaatcgggaaaatcggggacaggttattcttttcgccctttccggcctgtttttcggttcgctcctttatttctcgaaggttttcggccgcgtttaagcggaagcaggattcggcccaatcgcgattccaatcgctcgataaacgacttcgatcccgtcgggcggcccgtatacgtgttttggcgtatccgttgcgccgtctcctcgtcaagcccctcggccagccactcggaccaattgcttacaggcccaggaaatggacgctcgggcgacaacagcgaatcgatttcgcccgaggcgtgcgcccgcgcgctcgaccaagcgttgtcctccggtgcatcggcgatccgagcacgaaccgggttcaactcgacatactttaccgccgcccacagatgcgattcatcaagcggcgtcgagtaaaaacaattcgaccatagatgcccggaccgctcccggcagcggttgatgaaacgcgaatagcgcatgtgcgcccgcccgattgcgcccgacagcgagtcgccccggcgcgccgccgttcacggacgggttgcgccattcgctcgcgatccggccccaggcgatgatggaaatgtaatggccaccttccttcgcctgaagtccctgaccataaatatccctgccctcagcgaaatcgggaatcccatccatgtccgcgccgccatcgttgacggggatgaggcagcctatgcgtgccttcaggcgccgccgatttctcgaaaaggcagtcgttctgctttggacattatggggctattaaaagtaaataaaccaattttgcttgcttcgggaaaaggcactacttatgaaaaagatagttagagcctgataagccctccattccaagacaattgcgggcagattcagacaaaacgagaagcgggaggcggcaatggattttccagaacaggacaagaatttcaatttgctggatgcggaatggatacccgtcctctaccgcgatggcacgtataaacgcgtgggaattctcgacgcgctgaaggacgctgggaaaatccgccaaatcgccgcctccaaccccatggaccgcgtggcgatactgcggtttctgctggcgctgctctattggtgccaaggcaatccgcctgaagacaaaaacactcttccgcgcgatggctttcccgagacttggttctccaaactcaatgaacccgcccaccgcgaatgcttcaatctcctgggtgaggggaagcggttctatcagaacgcagaaattcgcaatcttcctgaaaagaaaatgaagcctatcggcgagctgttgccggagtttcctcgtgcggactcagtgaatcacatccgtcatatcgtccatgatggttcttatggtctttgccccgcatgttgtgctttaggaattctgcgtttttcggtatgggcaccagcaaatggcggttatccatcgtctgtcaatcccccctcaagtgtgtatttaatgacggaacttcgctctcttttgcatacccttgggcgctgtcttgccgacgcatcttcggaaaatacacctcccccttggattgagccagcggagcctgagcaacctttcggggccgtatcattattggcatggagacctcgcaaaatgtggttgggtatgattgaaggcgaaggtaattgcgcaaattgcggatgcagcaaaaggcttattcgtcagcttcgctttgcgccgggttggcccacgccgctcaacgatgaccaagcattcgcaaaacaggtgcaaaaagcgttcaagaaccgaggatttatcgcaaagcatgctaaagtaaagcctgtgctcgatgcgataccattgattctgtcgcgcatggatgatcttcggaacgcatgcagatcagcgcaatgcaatgtgcccgcaagtatggaccaagccgaggagattgcccagtcatttgtttcgctatgggaaagcagaaatcccgtggcggaagaaatcctgctgaacgaagctaagtatttcgctcacctaacaaagcgatgcttaacaaccttgggctgtaaagaggatgaccctgcagcgaaaaaggcagcaaatgccgcctggctgatctacaatacccgattgaacgagttgtgcaatatgtgtccggatccccttgccgcagaaattcaaatgctgagcctagatggggtgcccaccaaccatgcatgtgcgctggcgaaaatgatttgcttcattatgcaaaacaatgaggaggcattcaagaaaatcacacgcaagccaagcatgaaagaaaaagaagcactcatggcggaaaaaccacaaaaaaagaaattttggccgggagacccccatcttttaaaggagaaggagccaatcgcgtttccggtagcaggcaagaatgtggcagagcaagctaaagcatggaagcgcgcatttatagctgcctcaccgaacgatccccaaggcacaaatatcacaatagggccagtcgtcgcggacttgcagtcgggtatttacgcctgccacgacgttgttgccatttcgctcccggatcgttcatccgaaaagagagcagatcaatcagagcagatcagcaaattgctattcagcatgctgaaactcgcggtggatgctcaagagtggaagaaacctgatcggaagcgagaacatccagagattgactccgcgcttaccctccttactccggatcgggaatggcaaattcgatccgctctttcccgccccggcagaacaagcgacgacaaaggatttctgcttgcggtctttgccccgatggccagacatgcaatcttttcagcagtgcgcggttcaccacttcgccggaaggctgcggctcggcacgcgatgacaggattggaaaagagaatcgacgaggtaatcgccaaggcgaatcaatcggctgaaccggcggctgctgcaaacacgcagtctagtgtgcccgaggaacacaacagcggtggcaggaagagcaaggaggccggggaatgagcctgacagcggaattcattcggcgtctggaggacttgcaggaaggcgagcgttcgcgtctgcgccggcttgcgggccagccgcttgacaagacgctccagggcttcgacctgttcactggcctatggtggcctttgcgcgagaatagcccccgcgcaccacgccgccaagtcgcatggttgatcgccctgttgtatggcgcgattccggttccgcacgttcggcccgattcaggagcgggaccatcgcttgcggctcttcttggaatgtgtgaaccgagaaacgctaaagatcgccctcgttttcgtctgcgattcgatgccataatctgctcgtcgctttccgacatcgaaccgggattgaactgggggctgcgcgaaatcgccaaggcgatagcggggcgcgtgccgcacgcaaggaacattattgggatcgactgggcgctgctgctcgacgacctttcgctctgggacaaagaattcaacttggacgacacgtggcacaagggccgcctgaggacgcatgagcaactcgtccattgcgacgagacacaccgcacgccacaagacctatgggcgtgcgaatatctacacacgtcgaacagataatcgaaaggagaaagccatgttgattgaaattcacatgatccagaaccacagtccggcaaacctgaaccgggacgacctcggcgcgcccaagacgtgcatgttcggcggcgtcacccgggctcgcatttccagccagtgcctcaaacggagcatccgccgcagtccagaattcgcggcggcattggaaaacgatggcggggtgcgcacgcggcggctggcttcagtgctggctcacgttgcccaattgggtgactttgatttgacccctgcaaggctcgcgagcatgatcaaatcatctgaacccctttcccctgaagaagcgaaaatggaggtcattgcccgcgaggcgctcgaactcggaggtgtggcccccaagccaaagaaaaaggacaaaaaaagtgcccaagcgaaaaacgaagaggaaggcaatgacgagggtgataatgcagaaaccatctcgaaaatgttgctctttctttccacatcgacgatctcgaagatggccagggacttgaaggaggcatcgaacgcaaggaaccttgtggagaaattcaagggctatattgccgaaaatccctgtgttcccgacatcgctctgaatggccgcatgacagaagtcaaaaagagcaacgtgtttagcgacctaaacttttctatcgaagccgctctctcagcagcgcacgctatctcgactcacgcggttattaatgaagtggattatttcactgctgcggacgacatccccggccaggatgccggcgcgggccacgtgaatgaagggatgttcaactccgcctgcttctacaagcacttcgtgattgactggaaccagctcgttgaaaacctcacgcccgaagcgaaccgtaacgctcccgatgcagaaacaatcgaactcgcccgcaaaacggtccgatgtttcctcgaagccgccgccatggcaaatccctccggtaagcaacacgccttcgccgcatttaactgccccgacggaattctggtggagatcaagaccgaatcctccacgcccatcagctacgccaacgccttcgctgaccctgtcccggaaaaatcaccgcgtggtttgatcggcgagagcattgctcgtcttgggcaatatgcgcacgagatcatcgaaggctattccattccggccgagcgattttggttttctcccagcctctcttctcccagccagtcttctgcaagacagccttatcgcctgacgtggattgacaaaagccaaaaggagcacgaacaggagcaatcggttgtgggtgatggcaaagaattcggtaatttccccaaatatgtgcatgccatcatggaaaaggttcccaagggaggcgcggcacaggcgggaggaaaaccatgaccgactcttcaacgctcttcctccgtttggaaggtccgctccagtcgtggggtgacacgtcgaagttcgtcattcgccggagcatggaagcgccgacaaaatccggcgtgatcgggttgatcagttgcgcaatgggatggtcgcgccccaagggcgtcgaagacccaatccccgacagcaacttgcgcgacagggcgcaacgcctgatcaagcgccacgagaaagacgaggttgaaccacgacgagcgttgctggaccttctaaacatgctgacgatgggagtccgcatcgaccgtcctggaatgcgctggtgggactatcacacggtcggtgccaagatcggcatgacgacagcagcgggcggactcaagaccgatgcacagggcacagtcatcaagcgcttggagtatctggccgacgcgagctttctcgtcgcgttgcagggcgatgcggatttggtcgggaaggtcgcggaagccttgcattcgcccaaatggcccctgtatctcggccgcaagtcctgcccccctagcgtgccggtgcttatcaccaagaggcgcgacgataactccagggagccgctgctggaaagccatgcaacgcttgagtcggcattgagttccccttctgttccttggcggcctcgatatgaagacgaccttcgcgacgatgagcggatcctgcgggacggacaaccacgcgacaaatggaagattgtgttggacatccttatcgaatggcgaaaaagcgatgccgaaccagacgctccagacgacgccgatgtctggtatgacgtgcccttttccttcgatccgcctgcccatcgtccgcgtttggtcaaacgcgacggcaaagtcacggtgaatatcggcccggcgcttcagcatcccacgccgccgccgccacggccccgcgcaaactataaagacgccgagtggacaagcgaaaggctcgtcgaggttgttgacccgaaaaccggaaaggtcacgctggaaccttatagcgcgcgtccccggcgtttgcgccgggatcaaggactgtgcgtgttctgcaagtcgcccgcaactacggttcagcacgtgacctatcgccgcgccggtggcaatgaagaccaggacgatcttcggtccctgtgccgcctgtgccacgacgccgtcaccatgatcgaatacggcctgggcatgggtctcgaccgcatcaatcccgaagacccccgctggcgcgacgacatccttcgcacccgctgcgaaattctgcgctggcgcagcgaggagacccgacgtcgcgccctacgcagcgcgcccgagaaggtgcgcaaggagatgctggaggaggaagactgagtatgtatcattctcacttgctcatcaatgttggcgacaaccctgaccggccagattggaacatcacacgcaagtggctgcgaaacctttaccgcgtccatcagcggctttgcatggctttcccgtcgaatgctccagtttcgcaagccgaacgcgttgttgcctattgcgcgccgtttggcagcgcgggattgaatgatctgcgcgaattgcccagcgaaccgaatgcctccgatgttcattgtgctcgcagtgataaggctggttttctctttcgcatcgattatccagcctatgatatcgtcgatggcaaggcaacatcacggtccggacatccgcgacgccgcccaatcatcctcgtgcaatcctcacatgaagcagcgcccgattggaatctcgctttcggattggatgaaaacgcgattgacgatctcggacgccccattgggaacgcttcgtatctgttggccgcgccgccgcaaaccaaggaaatctgcatcgaaataaaggacgaaacgcttctattggcatgtccgacgcggccggaacaggatttttcgatacgttcaggcgaccttgtgcgctttcgtcttcgagccaatccgacgcggacaatccaggaaggatcaccaaacggcaaacgcaagcgcatcagtccgaccttggataagcatgcggattggttggcgggcaaacttggaaacgcatgcatctcgccaatctgcatcgagacattcgtgcctggatgggcttacggctggcgcaccaaacacgaaccgcagcccggccagagaatgcaatggtggtctgtgttgtttgaaggcatattccgggttggcgatgtaaacactttgaaaaaattgctggaatccggcatcggctccgccaaggccttcggattcggcctgctctctcttgcgccggtctgatcctgttttctttcgtttgctcctgctatctccccgcgctcgttcgcggcgccgctctccggttctttgacataaccaatttccacagcccacgccagcaacatggggagggaggatagcattttgggaggcggggaaaaggaggaaactccccatgaaagacctgcacgaactcccgcgattcagcgagggtctcagttatctctatctcgatcattgccgcatcgaacaagacgccaaatccatcgcagcgtgggcgcaagacggcatcacgcgcattccggccgccgccctcggcctgctcctgctcggtcccggcacgacggtcacccactcggctatgcgcgtgctcgcggaaaacggcgtctcggtcgtctggtgcggcgaactcggcgtgcgcacctacgccgcctcgacgggcgaaacgcgccatagccgcaatctgctgcgccaggcatggctcgccacgcgcgagccgctccgcctcgccgtcgtcacgcgcatgtatcggatgcggtttcccgatccgttgccgcccggcctgacgctccagcagattcgcggcaaggaaggcgcccgcgtgcgtgacgcctacgccgccgccgccgcacaatacggcatcgaatggaccggccgaaccttcgaccactcggactggaatcaatccacccctgtcaatcgcgccctttccgccgccaattcctgcctctacggcctgtgccacgccgccatcctctcgctcggatactcgcccgccctcggattcatccacaccggcaagcaactctcctttgtttatgacatcgccgatctctacaaggtcgagttgagcgttcccgcggcattccaggccgccgccgaaagtcctgaagccgtcgagcggcgtgtgcgactcgccatgcgccagatcatgacgcgcgccaaactcctcgaacgcatcccgcgcgacatcgcccattgcctcgacgtcccaaatcccgaaaccgaacccgatcccttcgccgacaacccctccaatccagccagcctctgggaacccagcggcggcgcgggcgcctgcatcctcccgcgcgatcccgcctacgcctataccagcgcttccggggcgggggaatctcccggcgcaagcaacagcggcggcggcgcacttccggttccgcccatgggagcgctggaaccatgatcctattaaaccgcaaataggcccgcgaaacgcttgaagcagcggagccgaaacccagcaaagatgaacgaaccacagatgaacacgaatggacacagacgaaaatcgtcgcaagaagcaatgattgaggaggatggcaataccaaaagacgcgaaatagaaggattttcattcagaacctgttttgcccgccagataactcaggctctgaattaaattcctggagtgtagcgttttttcctcaagcggcgagaaggggcgcataggtcttgataattgtccggatgttcacgccgcgccgggcggcgcgggccgatgcgcgaagcagtcgctcggcgcgaagcgcccgaagactgttgcg

SEQ ID NO: 554 - DNA, 24574 bp, Artificial Sequence
  Synthetic Oligonucleotide
tggaggagggttagttcggagacagagaacccggcggcgttgccgcgccgctcgatccagttgcgcaaggatttctcgtcgccgccgacgccaatccgcttgcctacccacttctcctgcatgggttggccgctgcgatgtaccgactgacggcgcgcgcggaagaccgcgttggccaacagacggaagcgcaggcgctggccgcgtgcaacggccggcgagaacggctttgtctgcggggggcttgccagaagatgtcgtgcgttgtggaaggcgtattcccagtccggttcaagggccgacaggacgagaatgacggcgcgcccgccgggctggagatcgacacggaacaggaacccggcattgtggtcgcgtttggcgtgaatatgacgaagggcatcggctgcgacgtcggagggcttctggtcggcccaaaagcgatcctcggggaagtgcgctggatcgtagggcttgaggaaggcaggatcgtcaccggcgcgatccttggatggaaacgccatacagaggcgctgatggacgcagtagaggttgcgcaaccacaatcgccccggccgagggcggtcggggttccggccaacatcgatcaggagcatcgacaggaacatcactccacctcctccggggcaaggcgccggcggcgagtttccagggagcggaaggcgatgatttcgtctcgcttggctatgatctcactgcgccactgtggatcttcgggattgatgcggtccaggcccatgcccaagccatactcgatcatcgtcaccgcatcatgacagagccggcagagagaacgcaggtcatcgagtgcctcgtcgcctccagcacggcggtacgtgacgtgatggacgggattggccggctgcttgcagaacacgcacaggccgtggtctgtgtcaaggcgctgctggcggcggacgcggtattcgctgttggtgtagttcgcccgtggccgctggggcggtggcgtgcgggtttgacgcggcagcaagtccacggcgacattccgtccctcaccgagagtcaaacgtttgcggaccacgagtcgtggctcgtgtcctggcacatcgaacgactgtgcgacgtcgtaccagacttcggcatcgattggggcgataggttcatcggcggaggctcgccactccagcaggcaatccaggtgctccggctgctcgtcgtcggcaaggcgcttgcgccacgggaccgagcatatcgccgacagcaggtcaggagattcgcccatgtcgggttcgccgttcaggccggccaacgggagcgacgggggacagcatttgcgccccaggtacatcggccaggcagggtacaagaccgcctggtgcaagtcacgcaccaactcaggatcgccctggagggcgacaaggaagcttgcgtcagcaaggtattctcggcgggttagcatcgcgccggacttggtcttaccctcggccgttcgcattctcatgcgagcgccaacggtatggtagtcccaccagcgaacgccggggcggtcgatgcggacaccaatccgcaagtcgttgagtatcggcagcctgtgcctcgcctcggccctggaaacgccgagggcggtgcaaagcagaccgataaccccggatttggtgggcgcgtcagccgtccttcgaatgacaaacttcgactcgtggtttccccacgattgcagcggcccttcaagccgaagaaaaagagtattggggaccatcgtcgcgccctccttacgtcaccgtgaccttttgaacctctgcccagtcaaagccgatggcccgtaccaactcgacgaccaattcgtccagggacttgaggttgtgggcagtaagcgggacctccttcttatcaactgttgccgttagggaatatcgcaggttcggggagaaccagaagcgattgtccggcttgccgtagccggtgtcgaggtcgtgaacgtactgcccgagctgcgtgatgctctgggacaccatgtcgcgcggccccttgcatgggaccgggctggcgaaagcattcgcatagctgatgggagtctgtttgagttcgacaagtatcccatccggcggattatgagctgcgaaactgttctgcttgccggttggattggcaagagccgcggcgcgcaagaacgcgccgacggtgtgcgctgccagatgttccttattgcctcggaaaccctggagattgtcgacgagggttttccagtcaatagagaagtacttgtagaagcaggcggaggtaaacatggcttcgtcaacgtaaccggcgccagcgtcgtcgccggggatatcgtcagccgcaacgtagtaatcaacctccggcagggcctcgtgcgtcgaaattgcgtgagcaacctgaagcgaggcctcgaccgtcgtgttggtgaggacaccggtctccagcattctgccactgagtgccatgtccggaacagctacgcggctggcaatgagcttcccgcagtcatcgacaagttggtccgattcgccaccattcttctggagcagttgagcgatctgggtgattgcctcctgggtcgtgtacaccaacatgtcgctcttgctctcatctttggacttgatgccgcactgctccagtatcttagtggcgcgtttcttgacgtcggccttgccggtcaccttctccgcgatgagtttggcgagctgccgcgtgcgaatgccgccacagagcagcttgaactgctcgctggtgcggatgctccgtttgaggcattggctggagatgcgagaacgcataacgccgccgaagtagcaggtcttcggcgcacccaggtcgtcacggttgagattggcggggctgtgattctgaatcgcgtgaatctcgatcaacatggagttctccttctcgcaaggttgtcaacacgtgaggcccaggaagtccctggaccagttcaggcggggttcctcccgctcccagatggacagttcatcggttagccggacccaatccaagcccttgccgccgtccgcaatcaacgtcagggcccaccgtaaggccggttcgatcctggctagcggaagcagaagcatgttgtcgaatcgccgctggtggcgggctctggcctccttgtctgggagaggtagcctgccgagttggccggccagcgttgcaccgctggcttggggcagagggcagaaggcatagagcttggcaatgagccaggcgacctcgcggcggggcgatctctggttcttctcgcgcaggggccaccagataccggcgaataggtcgaagccgtccaccgattggtcgagggacaggccggcatgattccgtagctgccccaaatccccggctttgagggattccagcgtctggatgaattgctccgtgggcgtcattcgtcaccaccttccttcgcgctgggcttacggagcttgggtgccgatttgaccgtcatgtccggcagcgcactggcaatctcatttcgccgttgcaccgcccgcgtggtgaacccaggggcaagcgattttgtgataaccggcatcattcggcgatattcgtcaaccgcttgcgtccacgccgagtcgggctgtgtgagaagataggctacattggccgaaacgcaggactcgacatggggtcgaatggcggcgaaggctgatagaagctctgggtgctttaggccagacgacttggcctcgcgaggccttgccttggcccaacctttctgcgcatcctttatccagtgctccaggtgagtgatcgccggttcagatccatcgcgtggcaccagtgtcacgggtattgtcagacgcctctcccatgcctcaagatacttgtcattcttcacgctggaaaacccaaccacggacacggagaccgccgacgatgccgatcccgccaatgtcgcagcatggcacatggtcaacggtgcagccccttcagtcagcagatcgcggagacatttcgcccactgatttgacgccacatccggggaactgagcgagtcccctgaatgagctgagagtagcgcgccgtccttatctcttttatacacgacatgcgggtcccgccaatcccgtgctggtgcgtcatcaaccatctttgcgctggtgacgcctgcgaatacgcaagtgtgaaccaatgcgccttcctgccggccacaggcaatgcaggtgccactgggcggtgatgggtcaccgagccatacccgtcgcggcagccaggtgagtcctgcgagcaacggcacattgccgctcgttggcagccgtacgccagggctcacccatgcgggcgtcccaaggctgctaaccggcgcccagtttaactgaagcgtttccagcagcgatttcccgaacggcacgacatagatgggcggctttgcgtttattcctgggggcttgcccctgccccctgaggtcgagaacagcggcagacgaaccaaccccattgcgcaacagctgaggcaaaggccatcgtcgccgtcggtggaatgcttgaaatgtaatgcgttcgtcccagtaggcacctcatgcatgaggtagttagcggtgagaacattcccatgtgcccctgatgagtcgccatactgatagaaccgcttcccagtcccaagcaggttgaagcagtcctcttgctggtcaagcttggcgaaccagtccgccgggaattggcctgcggcgagtatctgatccttctcgccctgagctggcggactgcctttgcaccagtacagcaccgccagcaggaaacgcagcagggcgacgccgtccatcgggttggatgcggcaatctggcggatgctcccggcttcagtgagtgcctggcggatgcctatgcggtctggccggccattggcataaagcaccggaatccacttctcaatgagcaagtcaaaagaatcctgcatggtgtactccccaatgcccaagaagcgttcgcgacggcttacttcccgcttgcccacgggggtcgggctgccgataacagccgcgccttactactcgcgactggtggccaggataaccacccggccattatgccgacaaggtatgacaagtgtggtcacaactcaagcggaatcatgatgcattctgcgactgtaactgaggctacatgctggggagcaatctgtggcagaaacaccaagtcgtggacgagagcttatcccagaggaaagctaagttgttcctgctgctcgtcccacagcagcggcaggttgcccgtcagcttgcggagggataggccgctgggctcccggccgtccacgatggcctccacgatgtcgggagccagcgtggccagccggaggatgcgggcgatgtaggaggggttcacgcggttccgccgggcaagttccttgatggagccgacctggctactctccatcatcttctgccacttgaacgccttggccagggccacgaccagtgggcgctgtggctgcggcttgggcggttcggccgcgtccacgccctccggcaggatgatctccttccgcccgccgcacttcttgaaggccatggggatgcgaatgacgatcgcgccgtcctccgcccagaccttcctgcccggatacttcgtgttcagttccgcttccaggtccgattccgcctgccggatcatgccgtcaccagcctttccgcgacgccgtcggcgacggcgttcatctccgcgaccaccgcgccgagcccgacgggccggagcttcaccgtcatgctgtcggtgtccattacgacctgctcgaccaggagccgcacgatccgctccttctcggccgggaacagctcgtcccacagcggatctatgttccgcagggcgtctgcgacctcccgctcagtggggagagcggcctgctcatcggcaacctgggcggccagttcgtccagacgcgtctcggcggccgagcattcctcgttcaacttccgcagttcctcagccattgcggcagccgagccttcgcccgtcgcccgggccacgctgcggatcatcttccgcagttccgccaggcgtcgttcgagggcgtccttctcgcggcgctggccctgttgctcgacctcggcctggtcgagcatcgctctgtacgtcccggcgatcatgtccgggctgcggaacaggccgcgaaactggtccaccacggcggcctcgatctcgccggcggcgacggatttgaccgggcaggtgtcgtagccgttcttctcggcgtggttgcacaggtagtactggtagcgcttgccgcgacggttggtgaacgtcgcgcccatggccttgccgcagtggccgcaccgcaggatgcccttgagcagcgccgccgtcttgcggcgggtctggacggcacggttccgggcgttcttgtccatgatggcccgggcgcggtcccacgtgccctggtcgatgattggtgtatgctggccggtgtagttctgccccttgtagtcgatcaggccgatgtacttggggttggccaggacgcggtggacgtacaccttgttccacggctggccgccgttgcccttgcccttggcggtcttccaggatttggtgcggtggccctgcttgttcaactcgcgggcgagcttcaggcacgagcccgtccgcaggaacccatcgaatatccggcggaccagcttggcctcctcctcgttgaccacgagcttgcggttgggatggtcgatgtcgtagcccaggaacggatgaccgccgatccactggccgcgcttcttggcggcgctgatcttgtcgcggatgcgttcggcgattatctcgcgctcgaattgcgcgaaggagagcagaatgttcagcgtcaaccgccccatgctgcttgtggtgtcgaaccgctgggtgaccgagacgaacgccaccccgcgctggtcgaacgtctccatcaacttggcgaagtccagcagcgaccggctgagccggtcgacgcggtggacgacgacacaatcgaccttcccggactcgatgtcctgcatgagccgctggacgcctgggcgatccgtgttcgcgccggtgtatccgccgtcggaatactccgtcggcagcgcgccccatccctggctcttgatgtacgccaggcaggcctcctgctgcgcgtccaagctgttgaacggcatgtctaggccttcctcgtggctcttgcggacgtagacggcgcagcgcgtcgggcgtttctcactgtccgtggcggactggttcataccttcgcctccccatacgggtctttgcttcgctgcgacttgcccggaccggccagcccgaagaaccgaggcccgctacagtgctggccgctgatggccttggccacggccgaaagggtcttgaaccgcttgcccgcgtactcgaacgtgccgtcgtggcagacggtgacctcgtgtcgccagccgcgccactcccggaccaggcgcgttccgggcgcgggtgcgttggccgactttcgcttccggcgggcgctgcgccggccttcgccgttgcccacctcctttgcggcccgggccagcttctcccgcgccgcggtggccaagccgccgtagcggagttcctggagccggtacgccagacggcggaccatgtgctcggcgctataggccggggcatcccggccgaacagcgccagccacctctggcaaagcgcggcggcgtccatccgattgagcgccgcgacctgctgtaggaccgttggttccatgcgttttctcctatgggttaccagcggccacagggggcagagtttcgacgggacagccaagaggattcccgccggaatctctcgaaactcctctctccaggcgtttccgccgcaccatccgcagcatggcggcggcgaggatcatcgtcacttcgcacatccgctgctcgggcgacatcttctcggggtcgatggggttggccatgcgatcctccatgatcttcacactgtctggccgacgcgcgccggccgcgcccgttacctaccgccgacaatgcggtcgcgtcccaccgcgccgagcgtttgggggtcttcacggcagcaggtcgtttcgtggcgtgggccttggcgatataatcactgcttgcgttgcaccccccgccaggcccagggatagtgcctgtttgtgccgcaatggggggattgccggcaaggacggttatgaggcagttttatgtctgacgacgtgaacattctgagcgatgagatgctgctacagatatgccgcgtctcgcagaaagacctggaggagacgccggcactgggcgatgaacttcggttggcgcgacggctcattccgcccccgcgggcgcggcacgacgggcgtctggagcatgcggtgacgctgttggcgtccgcgatgggcaggatgcagcagtataaccccacgcacctcccattcgggtttcagggcccaaccgtcacctcgtgcggctggatcgaccgcgacgacctggaactgctcgccaagcagattgtgggcctgacgtgggtgaacagcgacccggacgatgtcgcctgcgtcgtcggccaggcggtctcgacggcagtcagactgagcctggtcgagcagaaagagtatgatgcctggcgtccgggcatggcgagcggttcgggttggcgctcggcggtttccgcaacgacctatggcgtcgccaaggcaaggtctttgagcgaacgccagacggacgcagcagtgaagccatctgttcccagcccgccagttcaacgccccgcccagaaccccccgtgggctcggccggtcgctcagcccgatagccggtccactgttgacgcctcggcgagtcagcgatctgtgcccgtgtcctggcaggatgcgcccgctccgcatctcccctccggaatggagccgttcgacaaggcccttgccgaaatgcttctacgattaccaacgatgtgggcgtcggtggacttcgagcggttaacgaacacgcaagagaaggcgctggcacgcctggtggaagcgggtctggtggaagagcgggtcgtggccacggcctggatggatgggtttccccaggtggcgattctgcggggccgcgtcaccggggacttcaagcggaagctcctctgggaatcggtgcagtcagtgccggagtggttgaccaaggacggcaagacccgcggcaaatactcgttctggtacgacgtgaccgaggtgcgccttacggaagcaggcgagaccgcgaggcatgactggaacagccccaagccctccttcgtcctggccatcgtccggggcatcggaggcccgacacgagggatttcgccagacggcattgtcaagatcgaagaacgtaaggtcgaaacgagggagaaaccgcccgcgccgtccgatgtcagggcgctcctgcgggagggtttcgcgctgaaccgcgtgccaagttccgacgaggtggatgccggcatggccactgcggcggtccagcatgacgccgacgaggccgaatctgcggagcagtcccttgatgatctgcgccggcggtatgcgattgtgcccttggagccggtcgaagttgacgatgcccagcgggagatgcttcgcagaggcgtactgtccctgacattgtcagagacgcacaaagttgccgagttgtgggacggtctctctatcgatctggccaacggcggccccgtgcttttcgacagccaggacaaagccacacaggagtggcttgccaagggccggccgctggagacgctggagttcttgcccatgagcctgctggagcaggtgacagcccagattgggctcctggccgaggccctggaggtcgacccggactcgatggagcagtacgcctacgggttggtgcatggttccgaccagaatgggaagctcaaggaaccggcttactatgcgctgaaccagctctatcgcagattgtcgctcgccgacgagagggcccgcgtggcgggcaagaaacccgaggagtatacggttgcggaactgatcggttgcgtaccggcagccgccggcaacgggaagccggcgtcagcgggcaagccatccggcgatcagcgtctccgcaagcgcgcagaacgggcagccaacatcgaggccctcacgaaggaactggtcgagcacatcaattccgccaaggaccacgcctacacgctggagcagaacaacaaggagccggtgctcctgcctcggccgaatcagagggaactggctcagcgggtggatatctccgaggccgccgccagccggtgcttcaacgatccttgcgcccaccagcttcggatgctgttccagatggcgggagacctcgggtccgtcatgaagttcggtcgtaagaagtagcccttcccaacacgctcgtccccagcggcttgcacttgcacatcgtcctctttgatgcaagtgcaagccgctttttctttgcgcacttccccttgaaatacaaggccttacgtctcggctgacatctctttcagcccctttcgtgcaagtcccgcgggggttgtccgggcgcattcgggcgctccggtccaccgtaactccctcgcacgaaagggactcccatgccgagcgcagacaccccccgcagcaccgttgcacagtcgcagtacgcccccgtccaggatgacgccgccgcgttggcggaagactggggcccgctggatgcctggtgcatccggctgatccgattcaaggcctcgcagatggtcggcaaggccgggctgaccaggagcgaccgcgaggacctggaacacgaacttgccgccgacgtgctggcccgcctgagcaagttcgacgccgcgaaggccagcttccacacgttcgtggaccgggtggtcaaccacgccgtggccaacatcctggcctacaggggcgcggcctcccgcgattaccgccgcacggggccgtcgctcaacgaggaggtcgccctggccgacggcagccgcgtccagcggatcaagaacgtcgccgaggagaactctatcggaatgaggacggtggagtttcgcacccagcgcgagctggcggaactgaagctggacctgatggcggcgacggccaaactgccccagcggctcagggcgctgtgcgagctgctcaagtcgatggacatcccccagatcgtgcggcgcacgggccggtcgcggtcctccatctaccgcgacatcgccgagattcgcggcgtcttccgggacgccggcctggaggagcacctgctgcgcaagtgaggcacttgggacgccccgggctcgcgccggtaggtatcgggtgcgggccggtggcccgccaacagagaaagaaaggaccaaaggtgagcaagatgaacaaggttctgtaccgctaccagttcaaggaacgcgtcaggctccaggatgcggaggagacgctcctgctgagcatcttcgccgcgatgggcatccacggcgaggccagggtccgcatggactgcggctacgccctggacgcgacgatccgggtgattgtcgtggacgccggcacgacggtcggccgggatgtgaacgccatcttctcggcgctggcgatgcgggagttcggcccgctgtcgttccaggtccgccgcgtcgaaggtctgcccgagggcaaggaggacaagcatgttgattgaactggacaagatacgcacgaacggcggcacccaggtgcgcgaggaaatcaccgcccacatcgtctgggagtacgccgagttgatgcgcgatggcgcacacttcccgccggtggtggtgtacttcgacggcaaggactattggctcgccgacgggttccaccgctgccaggccgcgaaaagcgccggcatcgagcagatcgaggctgacgtcatccagggcacccggcgggacgcaattctccactccgtcggagcgaacgccgaccatggcctgcgccgcagccacgccgacaagcagcgcgccgtgatgatgctcctcaatgacgaagagtggcgcaagtggagcacccgggaggttgccaagcgctgcggcgtgagcaagtcgttcgtggccgacctgcggaagtcactgtccgcgacggacagtgaagagcggacctacaccacccggcacggcaccaagtccaagatgaagaccggcaagatcggcaagggccgcaagcggatcgtcacgaaggaacagtacgaggccgaggccagcgggcaggcccaggaagatgcgcccgtccaggaacacgtctctgcccccgacgcgcaggtgccggccgatccgccggcggccaccgagccggtcagcaagtctgtcgcttccgtctcggtgatcttgcccaaagaccccgtgctgatggcggcggccctggtgaatcacttcggcctggaattctcggccaagctcgcgaaagagctggcccgcatcgtcaaggaaaagtcgcaagccccctctgaaacccaaccctcaggagaccaagcatgaccacgatgacggcaccccgtgtcgcacccccgcagcgccaaactccacaaccgacaccgcgcccgcccgggcggacggtgaccttcggcaagatcgacccgcccagcggacaccgcgtggcagtcttcggctgcggcggcagcggcaagacgacgctggcctgcctggccccgcctccggtggcgttcttcgacctggagcggtcgctgcccatcctgcgggcgcagcttcccgccgacctggacatccgccccgtcggcggcatccgcacctggcaggacatccgcgacgcgctgcacagcggcgggtgggacggcatcggcacgatctgcatcgacagcgccacggtcgccgaggaactggccatcgagcacgtgatcgcccacgtacccagcgagaagggccagaaggtcgtcaagatcggcgactatccctacggcgcgggctacaggtacgtgtacgacgagttcgtcaacctgctgtcggacctggacgcccacgcccgcgccggcaggcacgtcgtcctcatcgcccacgagtccaccgagaagcaccccaatccgcagggcgaagattggcttcgcgccgagccgcgcctccagcactcaccgaaaagctccatccgcgagcgggtccgcgattgggcggatcacgttctgtacctggcgtatgacgtcgttgccgaggacggcaagggccgaggcagcggcacgcggacggtctacccggcggaacttccgcactgcatggccaagtccaggacgctgggcgagccggtgccgatggtgaaaaacgatcggtccgtctgggaccgcctgctgggcggcgcgggaaaggcgggatgagcatgacgtccaccacgaggatctggggcacatacgagcagttccgggacaagtgcatgcggcccgacgcggcggcgctgctgacgctggcggtgatcgtggccgacttccgggaagacctgatgaccaagttcatccgcgaccagtcctgccgggccgggcggcacgacagccgaagggattccgccggcgagaaggagacctgattcatgattgccaacagggaaggacgattcaaggcgaccattctggaccacggcgtggccgagagtgggcccaaccacctggccacgttcgtgtgcaggtatcggctggtgtcggagctgtcgggagccgagtgggcgccggtggacgatgacctggagatcagcggctaccactacatggagaagcgggacggctcggtcaaccagaccaccatcgacatgctcaagcgagccttcggctgggacgggcgcgacccgttctggttccaggacgccgacatgggcgagctggtggtgcaggtgagcctggcggccgagacctacaacggcaagacccgcctgaaggtgcagtacgtggacgccgaggattccgccggcggcaccgtgcccaaggccgacgacgccacgcggcggtcgatcagcacgcgcctgggagcgaagttccgggccctggcgggcagcgcacccgccccggcggcgaaagcttccccacgaccggccccagccccatccgcaccagcgcccgccgccagcgccgcgcccgcatcgaccgcgacggccgatccgccgccggaggcgactatgcaggcggcgtggaatgcgttcgtcaaggagtacacgtccaggccgggcggcagcgacgacgacatgaaccagcagtggttccgcctcgtcggcgagcttgcgccgggcaagcaggtcgaggacatcaccccgccggaatggggcgtcatcctggtcgaggcccccggtcgcataattccattctgatctcacgaatgggtgttgcgcggcgcgacggtcaaggatggccgtcgcgggccggcaagggcggggctgaacggagtcggccccgcccggcgggccgcgccgtggttggcacggttctggttccctcgcggtagatgatgtcgggatgcggcgcgccacgctgacggtgcgcccatccggcaaacatggaggtcgcacatgatcacgaacgaaacgtcgatcgcgccggatgacctgatgggcatggagatcacggacgtgctgaaaatgaccggcatggccatgaaacgtcttgttgagcacgccgatcatccggcctgtgagcccgaagatgccgtcatcgacgtggccgtcagggcagatgaatccctgtgtctggccgccggcgttgtcatccgcgcccgcgccggggaaatccttgccctctgccggtcggccggtatcaggggctgcgacgaggaattcatccgcactcgcacgttcgaggcggcgctggcattgtgcaaatgcatggggatcgtggatggaatctgacccgctccaaaccatcctgggccgcctggcgggcgtcaagcagacgggcgagaaccagtggcaggcccgctgcccggcgcacgacgaccggcacgccagcctgtccatctcctgcggcgacgacgggcgggtgctgctgcactgccacgccggctgtgcggtgatggcgatctgccaggcggcagggattcgcctgcgcgaccttttccccaagaagaaggacgccttgggcggcatgggccggatcgtcgcggcgtatgactaccgtgacgcccaggggcagcttgtctatcaggtcgtgcgctttgagcccaaggacttccggcagcgccggcccgatggcaatggcggctggacctggaagatgggcggggtcaagcgggtgctctaccgtctgccggaacttctggctgcagacccgggccaatggatcgtgatcgcggagggtgaaaaggacgtcgacaccctcgtcggcctcggcatggtcgccaccaccaacccccagggcgcgggcaagtggtcgaagctctccgacgacagcgcgcttcatggccggcgcgtcgccatcatccccgacatggaccagcccggccgcgatcacgccctggacgtcgcgcgccggcttgctggcaaggccgccgaggtcaggatcgtcgagcttcccggcgacggtaaggacgccagcgactggatcgccgccggcggcaaccgcgacagtctcctggccctgatcgaggccgcgccgcggcacgtgccgtccgcagatgcgccagcccagacgtcggacaagcccaaggtgctattaccgggcggctccgtgcccatcctggaggccgccgctaagctcgggacgctcctggcgaagacggacctctattacgtccggggcggggccgtggtcacgatggataaggacgaccagggcttccccatcctcagccccgtcaaacccgccgccatggccagcatcttcgagtcggtggcccatctcatgacgctggccaaggtcgacggccagatcgtcgaggtcgacacgatctgctcggagcaggcggccaagatgatcatgcatgccgggacgttcctggcggcgctgccgcccatccgcgtcctggcgcggtgcccggtattgatcgaaagggacggcgcgctggtacaggtcagcggctacgaccgccagtcgggcatcctggcgctgggcgagcctgcgcctgatgtccccctggaccgggcccgcgccattctgcacgacatgctggaggacttccagttcgccgcgccctcggatcgctcccgcgccctggcggccatcatcacgccggcgctggtgttcggggggctcttgcgcggccgagcgcccatcgacctgggcgaggccgacaaatcgcagacgggaaaaggcttccgcaacaaactgaccgcctcgatctaccgccacaacgtccgcaccgtcacccagcgcaagggcggcggcgtgggcagcatggaggagaccttcaacaccgccctgatccagggcatgaacttcatctcgctggacaacgtgcggggcaacatcgactcgccggccatcgagagcttcttgaccgaggatgtctactacgcccgcatcccgtaccaaggcagcgtggagatcgacccccgccgcgtcgtcgtgctgatgacgtccaaccgggcggacatcacggtcgacctggccaaccgttcctgttgcgtcaacatccacaagcagcccgagggctatcagttcaagcaatacgccgagggcgacatctgggagcacgtccaggccgaccagccgctgtacctgggcgcggtctttgccgtggtgaaggcgtggttcgaggcaggcaggccgctgagcaacgagacccgccacgacttccgccgctgggcgcggacgctcgactggatcgttcagaatgtcctgggcgctccgccgctgctggacggccatcgcgagacgcagatccgcatgtccaacccggccttgaactggctccgcgacgttgccttggctgtccgccgggccgaccagctcggcaagtggctccgcgctcacgccctggtggagatcatcgccggcgatggccgaattgaaatcccaggcctgggcgagggcgacgacctggtcagcgaagatgtccgcaggacggtcctccaggcggtgggccgaaggatgtccatctgcttcggcaacgagggtctccgcaacatcgagagcatcaccatcaagcggcgggaaacggtggatcatctcacccgcccgacgaaggagtactggttcgagattgccaagcccagcacatcttctccaagttctccgctatgcgccccctatgcgcccgctatagaccccgctatgaaaacccaagaacccgctatacccgctaatgatcgccaacattttgtccccggcgagtctgatgctcgggatgtgtgtagtggtgatgaatacataggaatgttgccgacccatagcgggcatagggggtttcgaggaatccatagcggggcgcatagcgggcgcatagagggggccataggggggaacgcccccgaacctccggccggcgatgatcaggaggaggtagtcgaatggcgggcatgacgctcctggaagaggcccggtcagtggggctcgaggttcgcaccgacggcaacgacctggtggtccgcggccctcgcgatgcccggcacgtcgccgagaagctcctggccgagaaggcatccatcgtcgaggccatcaagcaggaacagcagcgcgagcaccgcgcatggctcgatagtctcgcccttgatgatcgcctccgatacgaccgtgccttcgggaaggcatggttcgagggcaggggcgccgatgagtgccggcagatcgcacgcgaccatgtcgtgaaacatcagcagcgtgggacgaaccgcatggatcgcggtatgtgatagtgccaaggacaaggagagaacatggattggctcgaagagaacaacaaggacgtgctgatgctggccgggatggaactggaagccctgaacgcggacgtgcttcagctagagggcgacctgctggccgatgccctggccaaccacggcaaggtgatggacctgttcaagcggttcaatcaactcgccgccgaccgccgcaatctggtcgacttcgactgctggcgggacaaggacgccacgtcgttccaggctgaacggtcgcggctgttgcgggaaggatgggacgtcctgcatgcacttcagcacgtcctccaggagcgcgaagccctcctgggccgcctcagggactcgctggatgcatgcgtcgccaagttgaacgtcaatcgcgagaaggtcgtcgaggccgtccgcaagggcatgtcgaaggtccacaaggagtacgtgcgggccaatccctatggcggcgagatgcacttcaacgagctcgtggagaacagcgatgaggtcaacgccgtcgatgatcggctcggacccgctcgtcgcgcgttggagtcggccgtttatgcgaagcacgccatgagcgcgaagttcactaggttgaccaaccgccggcacgaggtcttccggctgatgctgtcgaacggatggtaacactcggtgggcaagtgttaccccttcgaaacgcgagtcctgccataagtcccagtggattcaatggttccttcctggcgagacgcgccgtgcccgcggcgggaacggcttccgacataggcagacttgcttgccgcgagaaaaaaccgatgcccgcgggcgtgactggccacggcggacagtgagataacgctgcggatgggtgcggccccgctcggcgtggcaaggtagcgcagggccggatgatcgcggcggtcgggcgggatgaagtcggccccgcccagcccagcggctggaatcatagcgaaaggaatcgcaatgcagatcgaaatgtggagcatcgaccggatcagggagtacgaccgcaacccccgtgataacgaggccgccgtcgggcccgtcgccgaatccatccgccagttcggcttccgcttcccggtgctggtggacaaggacggcatcctgatcgcgggccacacccgcgttcgggcggcgcgcaagctgggcatgacggaagtcccggtcatacgcgccgatgacctgacgccccagcaggtgcaggccctccgcgtggccgacaacaagctccacgaactggcgtcctgggacgtggacctcctgccggtcgaactgcgagaccttcaggtgtcaaacttcgacctgtcggccctcggtttcgaccaggaggagcttgcgaagttgcttgacccgggcgtccaggcgggcctcaccgaccccgacgacgtgccagcgccgcccgatgaggcgatcaccaagccgggcgacctgtggattcttggcaaccacaggctgttatgtggcgacagcgcctcggcgtccgacgtcgaccgccttctcgacggggcgcggattcagctgtgcaattccgatcccccgtacaacgtatccctggccccacgctccaataacgccatcgccgcccacggcgaccatcccatcggccagcaagggatggacatggccatccggggcaagacgcacgcgacgaccgagaagatgcgggccaaggaccggccgttggtcaatgacttcgtgtccgatgaggagttcgccagactgctccgcgcctggttcggcaacgtcgcccgcgtcctggagccgggcaggtcgttctatctctggggcggctacagcaacctgggcaactacccgccggccctggcggactgcgggctgtacttcagccagtgcgtggtttgggacaagcagcaccccgtcctgaccaggaaggacatgatgtccacctgcgagctggccttctacgggtggcgagagggcgcggcgcacaagtttttcggcccgaccaacgccactgacctgtggcacatcaagaaggacaatccccggacctacgtccatttgacccagaagcccgtggaacttgccgtgcgggccatccagtactcgtcgctgacgggggagaatgtcctggacctcttcggcggcagcggttcaacgctgatcgcttgcgagcagacgggccgcaaggcgttcctgatggagatcgaccccctctacgtggacacgattgtccataggtttgagcagttcacggggaggaagtccgagcgggtcgccgcggagagttcgcaagagagaaccccggctcttgctggagccggggttggtgcggagggtatgtgatgtcggcgctactttgccgcgaacgcctgccgggtggcatcaacctcggccttccccgcgtcggtcaactcccacatgccgcgcttggccttgcggaatcgcgttttgtcgccatcgtcgcgggcctctctgagcatgcaggaatagagcgtggcatgcggggtcttgcccttgcccggctcataccagccgccggcggtggctgcttcgacgatggctttggtgttcatcggttccttggcatgcgccagtaccaggacggccgcgctggccaggctctttcgcggggcggcgggcttgcgctcattggccggttggtcggccttgccggacttctttgcacctgcgccaacgtcggcggccgtgggcgcggaggttccgttcgccttcctgtccgcctcgtactcggccagcgagacgatcttcttccggccgtgcggccgcccgtcggggtgtttggccggccgcttctcggtgctgctggtctgcttcttgctgctcctcttggtcgtcatggctgcatcctttctattgggcccggcactgagtcgggatccccaacgcgattcgtcgcgttggggtgccccgccgcgccgggcgggttgttgtcgttagctggcgctgacttgcccgaagcgtcccatcgcgtcgccgaaggcgaacctggtcttgtatcgcgtcctcggcttgggcggcgcggcgggcagccaccgcgtgatgaggccctcggccgctatctgctcggcgtagaacgccacgcggcgatccgcttcatccggcgtgaaggcgctttgctctttcatgccgttggcgttcagccaccgccgggcgtcggccaggatcgccaggtcctgcttgtcgtagtccacataccggtgcccgcggcaccgtcgcatcggcgtcctcgttcgtttcccgttggtcttcatcgcgttctccttgtcgtgttcgatgtccacgagcacatgaggccatgggtcggtgcggatgctaagcctgattcccggaacccccgcagatttactgccgccacatgcttcgaagggggcgcgacttatgtcgcctgaggcagaatcttcgacaattccgctggcagttaccgccggcccggccggacccctgacgcccacggcgctgacgccggatgccctggcccggctcctcagcgccgccggcggcaaggcggtcacgatcgacatgattcaggcggccgtcgacgccggcgcgccggtgggcgtcggcgggcggatcaacatggtggaattcatggcctggctggaacgggagcttgcgtaaacgtgagcatcgacctgcgacaacttcggcccggcaagctggcgggcctgctgaactccacgcggctgggtgaggtcacgtcagagtcccgcgtccgccgaaacgtcgtccgcgccgggtggcgcgtgggcgatggccgtcaggtcaacgtcctggcctacgcggcgtggctgatgtccacctggcatgcccagtcgtttccggcggcatcggcctcggggccgacgggctacgacgcccgcaaggaacgcgagcgactccgcgccgccgaccagtcaaagaccgggcgcgacatcggcgcgcaactggacgaactccccgccgtggaacggcccgacctccgcgccgcgtgcgaggcggacttcaagctgttctgcaccacgtacttcccggccgccttcacgctgccctggtcgcaggaccacctgaaggtgatcgccaagatcgagcgggcggtgaaggagggcggcctgttcgcccacgccatgccgcgcggcagcggaaaaacgactttgacggaaatcgcctgcgtctgggcgatcctctgcggctacaggccgttcgtgtgcctcatcggcgcgaccgccgatcccccaggctgcatgtcccgcccaatcagcaggatgacgatccgctcaagggcctggaatgccgcaactgcggttgcaggcatttctacgtggtgtacacgcgggcccacgtcggctgcatcacccgccggcgcgagtgccgccactgcgggcgacggatcatgacgcgcgagcggtacatcgggtagcgccacgcgacgccagcggaagccgccgccaggagccacttccatgaccgaaacatacatcgccgaaaccgagccggccgtggcgacggccgaagcgccacccgctggcccattactgccgcgggagtacctgccgccctacacgccggagcagcttctccagatcgccgaacgcatcacggcccgctacgacccggccgaccgggaggatgccgcccaggagttcgtgctgggggcgctccaagccgccaagcgtgccaagccgggcacgctcatacgctcctaccaatgggcctacggcatggggcgagtaaagaacttcctcacgaaaaagactcgccgcaaggccaaggtccgcgtcatcctggacgcgcccgccggcgacggcacaagcggcttaaccaagggcgacctcgtgcccgatcccaaggccgccgatccgggggcattctctgacgccgccgacctgcggcacgaactccgcgcgctggtggacgccctgcccgacgagcggatgcgatacatcatccgcgagcgattctggcgtagccgggagcttgaagccatcggggcggacttggggttgacggcagaacgggcacgacaactgcttacagaggagttggccgtcgtccatcgaatgatcgagcttggtgagagaccgtttctcagggacaggccaatgccggaataggcgaaatggaacgtccgtccttgtttgtgcccaacgatgctgtctcaggtcatatttctccgtccatgttccacggggcctggacgtttttttcgccgaccagatggatgatcgcccgcaggtaggcgtcttcctcgtcccggttgtgcaaggcgcgacggatggcctcctgcttgagcgagaagctctgcatgtcctcggcgtattctgcaaagtggcgtgaagcctccgacaagagcaggcccgcaacttcatcgggaacggctgatgccacaaggcccagatgccgcaggcacaggccctgcgaacgcatgtacgcatgacggttttcgctctcctgcaagaaactggccagacacttcatgtactcctgctccgcctcgcgcaggacttggcatgcgcggcagttccggcccggcacaagcgaccggatggccggcgccgacttcgcaaaaggcggcagcgcggccaactcgcgtgcgacgtgctccaccaacctggtgtatcccagggagatcccatgcggcgaggacattgccagcagttgccatgtgtgtagcgggcagaatccaagctcggcggcgaagccggcctggaccttttcgtcggaggccagcacgtattgccaatgcgaatataggtccagagcggcctccaccagatggcggcacgcagggcagccacgagtcttgaggtccgccgcgatgttcacaggctcagtcgccgcgcgaggtaagttctccggcgtgacggggggtgcggccgattgttgtagctcgacgctcttggccggaggctccggctgaatcaagctgcatcgcaaggccgccagtctcgcttggatcgcacccagtgctttccgtcccgccgcatccggccctttagcaggctcagcgcacggctcgctcgattcctccaccagaatgcggacggccttgtcgatgatcgccgccagaaacgtcgcggccttctcttccgccaggaacgtcaccagcgtctcttccaggtctttcaggccgctctgcgcatacgcatcagcatcgcctgccattcgggcggccatgcctgatcgcgaggagagcggaaagacccttgcggtatcgtcgccaacctgttgctgtatagtccgagaaatgaactccagaacttcctgtcgttccgtttggcccaggaggtccgtcttgttcaccacgaagaagaccttatggacgtattggcggattctctgaaggaattcgatctccacggccgtcagcggcgtatccacgctggtcacaaagatcaccgcgtcgcagttcggcaggaagccgtaggcagtcgcagtgttcgcttcgatggccgaaccgacgccaggtgtatcgacgaactccaagccgcgccggaggaacggcaacggaagctccaggatggccgtcttgacctgcttggcgttgccggggttgctcttttcggtaacgtactgggccagctgcgacagtggctcttcctgcggccaggaccatccctcgcggtagatcagaagcctttcgaccgggccgaatttgagaaccgtgattgccgaggtcaacggcaggacaccagtgggcaatacctcccggccaacgatggcgttcatcagcgaactctttccccgcttgaactggcccaggaccgccagcgtgaagcgatcttcggccagtttcaccatcagctcatggcaagcttcctccctggcggcatggcctcgttcgtgaacaaccttccgtaaagcccttaccgctccggcaatgtcctgtttgttccgcatgtaggcgcgcagcgccttgtagtcagacg

SEQ ID NO: 555 - DNA, 23471 bp, Artificial Sequence
  Synthetic Oligonucleotide
aaagaggaagcctatgcctacggggccaaggaggcgcccgttgtctgaccggcaggccagcgcactcgcgcaccatttcgaggacctggaacagcagcacgaggcctccagcctcggcatgtggctgtttctggccacggagatcatgttctttggcggggtgtttgccgcctataccgtgtatcgcggcatgtatcttccgggcttcgaggtaggcagccacctgctgagcgtgaagctgggtgctttcaatacggcgctcttgcttggcagcagcctcacgatggctctcgccgtccgcgcggctatgctcgggaaacgccgggacctcgtcacctttctagttttgacaatgctgatgggccttacgttcatcggcgtcaaattgtccctcgagtggtaccacgaatatgagcaacgcctgatcccgggcctgcactgggaattggacagcccccattccaggggcgcagagctcttttttgtcttctatttcacgctgaccggcattcatgctctgcacatggtggtgggcgtgggagttcttgccgtgctgatcgggatggcggcgaagggacggttcacgccggagcgctgcaatgccgtcgagatggccggcctctactggcacttcgtggacatcgtctggattttcctgtttccgctactctacctgatcggggcacactattgatgtcgcaacacgttatccccaagaagatctactttgttgttttcgccgcattaatcgtcctgacgggcgttaccgccaccgtggccacgatcgatctgggtccgctcaacattgtggtcgccctgctcatcgccatgggcaaggccagtctcgtcatgctgttcttcatgcacttgcgctggagcacgcgcctcatgcacatcgtcgctgtggcctcgatcttctggctggggatcctgatcgctctgacgctgagcgattaccggacgcgtcactggacaccctcgcccgagccctgggagatttcccgcgcgccgtgaggaccggcccgcgggtgcgcggtcggtttaatccgcctttaccggatcgggaggagcagtcaagcgccgcgtggcccgccgttgtctctcgagttcggcggtctgcctttcgatgcgccgaaatacttccagggcggcctggctctctttaagtttcccgagtttgcggtacgcggaactcagcacgtagtggtactgcgccgaagtgggtttgatggcgatggctttctccagcgcttccgcggcctgggcccaatctccctgggtccggtaggtcttggccatctgatagtaggcaaggtcggagcggggattgagctccagggctttccgcgcgtagtacagcgaggtttgaaactccccccgccgtccgtaatagccgctcaagttcacgaaaggcgcatcgaacttggcgccctgctgttcggtgagctggatagccttctggtagctcgccagggccgccgcgtcatcgccaagcgcctcgagggcgaaccccagagcgttgtgggcttccgtgtaattgggactgaggcgtagggccgcctcgaactccgcccgggcgcgatggaagtcgtcctggatggaatagacgcgcccgcgattgtagtggacctcggcggaatggggcatcaagcgccccgcctcgtcgaactcgcgcagcgccaggtcgtaccggcccagaatcgagagcgcgcgaccgagcatcttatgggcttcgccgttttcaccgttgagctcgagggatttggccagcgcccggatggcatctcccaggcgatgctggcgaaagagcacaaagccgtgcagatagtggaccagggatgagccgggttgagtctccaggtatttcgccaggcgcggctcaacttcctggaatttcccttcctctatcaagccgacaaattcgcggatgacggcggggtcttcccctcccagcggggaggccgggaccggcggcggaccgtccagtaagacaggggtacgcggtgcctcaggaatggcgtggccggcggggacttgaagttggggttctttttgccaatcttgtgccgccggaggtgcggtcttctctaccgcgccggcggcggtggaagggcgagactgcgcaggcgcagacgcacctccctgaaccgccgcaccgccaaacgccagcgggtaacagacggccagggcaaacagagagcccaaccaggccggccggcgagtgggggaggagccatgggttggccattcgaccgcctgcttcgcgcgtctgacgtccatctcttctccgtggaagaatcatatgccgccctcccccaccgttcaagtgtaggccgccgcgccctggggcacggggatcggccaagttgctcccgcgtcgggcggagcatgaaacggttgtgtcggggcaccaaggcgcttgtccgtggacgggatgtatgtatgctatgagcttccaaccagcgcacgagggagattgcaatgaaaaggaacttcatcgcggcttgcttgctggtcgggaccatccctccccccactctgctcggcgagacggtctcgcaatacgtgaaatcgtccagcgcggaggcgcgcatcgaggtgctggcaaatcagcgcgcatcgttcaggattccgcgcacggtgtacggaacgtttctcgagaacatcgggttctcgatgtacggcggcctctccgcgcagctcctcgacaatcctagcctcgaaacctactatgcgagcctggaattcctcgagcagcgattcctcacgccgccgttccgccgctccacccacatgggattgcctctcccctggctgcctttgcgcgaggcggatggctggcggtatgagccgcgctggggcggcgccccgaattcctatgcttacctctacttgatgggattggacggccgcgaggtgggcattcgccagaacatctatctgcccgtccatcgcgagcgcacctacgacggatcgctttttgcctcctccgagaaaggagccgtgccgctcgatatcagcatccgccagcaggactcgccggatgcggcgctggccgccacgcgcctcctcgtgcccgccggcggacgctgggcgaagctcccctttcgcctgacgcttccggaaggcgccctcgccccgctcgcttcggcggattttgttgtctccgtgcggggcgagcatcgcgtctcgctcgatttcatccggctcttccctgccgacgctgtgcgcgggatggacccggacgtcatccgcgcgtcgaaaaacctacacactcccctcctccgctatggcggaaactttacgagcggctaccactggcgggacggggtcggcccgctcgaccagcgacccacgaaactgaaccaggcgtggggctatcccgaatacaacgacatcggcacggacgagatcatggcctattgtgagttgatcggtgctcaggcgcagatctgcctcaatctcggcagcggaactccggaggaagcgcgtgcctggatcgagtactgccagggcgccaccacgacggccgaaggcaagcgtcgcgccgcgaacggacatccccaaccgttccccgtcgctgcctgggaatttggcaacgaactttgggggcattttcaaatcggctggcaaacgccggagggcaacctccgccgctatcgcgagtattaccgcgcgacgcgcagcacgattccgaaagacacgctcgtgatcgctacgggcgccgatccggatgctttcgagaaatggaacgcggcgcttctcagcgccgaccccgaggccctacattacatttccacgcatttcgttgtgaacatgggcgagatggttagagacggcgccgcccgggacttcacctggaccgccggactggcccttcccgtcgccgtgggacgcgcgctcgaatccatgcgcgcccagattgactcgcacgcggcgacgcgcggccgcgtgaagatcgcattcaccgagtatctcttctgggcgcgggaaggctcggaaaacatccggttcgacaacctgggcggcgccatcaacggcgcggcctggatgaacatgctgctcgcccgcgccgactccgttcggctggccaacatgaccggaattatcgacttcgccggtatccagaagaaacgcagcagggtctttctcacgccgcaggcctgggcgttttcgctctattcgaatcacgccggagacactcccctggtcacccgcaccagcgtcaggcactacgacgtgcacgaagggcaacggcgttttcctgaaatccccgatgtcccctatctcgacgtgttggccacgcgtgatagcaagaaaggcgatctcgtcgtcttcgtcgtgaaccgcgactggaaaaacgcgatggcggctacggttgagatcagagacttcgcgccggcgggcgaggcgatggtccacacactgaccggcgactccctcctcgtcaggaacgacgaagaaaatcccgaaaggatccggccggtggcttcgcaggagaatgtaggcagcggcagtttgcggcacacattcccgcccgcctcggtcaccgtgctgatcttcaagccgcggcaaggctgacggggccaaatagttaagaatagggccaaggaatcgagccgcacggtctttctgcggccgctaccgcggcgagacgagggccttcctcgccttgatctcttccactttctagtccgcgtaatccttgagcaccgtgccctggccgaggttcgaagcattctcgaaagcgtcaatggcttggtccagcttccccaagttctcgtatgcttcacccagccggtaataattcatgggattggcgccggtcgccgtggaaatggccgccttgaattcctctacggcctttggagagtcgtcccgatgcagggcgaccatgcccaacgccgcatgggcatccgaggcgagtgccgccttctgcttttggagctgctcatcgttttcgagtgacgcggcggggatctggtccaggagctgcaaagcacgcgtggcataggattccgccgtcgccagattcctatcattctcggccggtgtgccctgcagcatccgcggctgagggagaaccaatgccacaagcacgaggctgaagacattattggcgtcgagtttgaggcttcgctcgccatgctcgacggtcttcgcgtaatcccccttctgctgatagacgcgtgcggtctggctccacacgtaggtcatgagcgggctagtgggatgcttctgctcaaaatccgcggcaagcgtgcgctgcctgtcggggtccatttcgttctgcacctgaaggaaggcggctttctccaccggtgaaacctccagcttatcgccgagaggcgtcttgaacgtgcgccctgaagggctggcgcccaccaccgcctggaaaaactccagctcggcaccggtctcttcgagcttccgctgaaattccggcgtcacgtcaaaggtgacgccgcgctcgcccacgatggccacggctttcatctggtctttcttgtgcttcttgagcagcttcaacacttccttctcggtgagaggcggctgcgcttgctgtgccccgaccgctgagggcactagacatataataataagcacaagaatgatcgtctttgacatatgctctctccttccggatcgataaacgcccgcccgctcgaatgcattggcggcgggcagagtcccattttagcccggatggcgcgggccgcacagcaccagcagcgatagattttgacacggtgctcctcggagggttacattcgctcagcatcctgtgctccagtgtgttgggcggggcgccgatcccagcgttgtcgaggcgccccaggggccccgcacaaaaggaatttgaaaaatggtctctcggcaactgatgacttctatcctcttcctggcggccgcgacgtcgctgcaggcgcaaagtcccgtcctcatcgaggttgatgccgccggtgtgcgcaaatccttcgcgcccgcatgggcctatttcggctatgacgaacccaactacacgtatacggcgaatggacagaagttgttaggcgaactcgccgctttgagttcagcccccgtctatatccgagcccacaatctgctgaccacgggcgacgggcaatacgcgctgaagtggggctcgacgaacgcctacagggaagacgccgccggccggcccatctatgattggacgattctcgatcgaatctttgacacctacatggagacgggcgtgaagccgctcgtcgaaatcggcttcatgccggaagcactttccacgaagccgcagccctaccggcatactttcccgcaaggcccgatctggacaggctgggcgtatccgcccaaggactatgagaagtgggcggagctagtccaccagtgggttcgccgctgcattgcgcgctatggccagacggaggtgcgatcgtggtactgggaagtgtggaacgagcccgacatcggctattggcaaggcacacccgaggaatatcacaagctctacgactacgccgccgaggcggtgaagcgcgccttgccggaggcgcgggtcggcgggccgcactcaaccggaccggcggaaccgaaggcggcggaattcttgcgccgctttctcgagcactgcgcccgcgggaccaactacgccacgggccgcaccggctcgcccctggatttcgtcgccttccacgccaaaggtagtcccaaggtggtgggtggccacgttcggatgggcagtagccgtcagttgcagtccatcgcaaagggatttgaaattgtcgcctcctttcccgaatttcgtcatttgccggtcatccttggcgagtccgatccggagggctgcgccgcatgctcggcgcgcgtccatcctcagaacgcctatcgcaacggcacgctctatccttcctatacggccgcgatctacgagaagaccctggcgctcgccgagcgccaccagattcgtcttcagggcgcggtgacctgggccttcgagtttgaagaccaaccttacttcgatggcttccggagcctggcgacgaatggcatcgacaaaccggtgcttaacatctttcgtatgttcggattgatgaagggggagcgcattcccaccacgagcagccagtcggccaggttggatgaaatcctgaaggcaggagttgccggtgcgcccgacatcggcgcgatggcgacgcgcagcgaacgaaccgtttcggtcctggtgtggaactatcacgacgacgatgtcccggcccccgcggcggagatcgatttgggaattcaagggcttcctctcgaccttgagcgcgttctggtccaccactaccgcatcgaccagactcacagcaatgcctataccgcgtggcagcagatgggcgcgccgcaagatcccagcgcgcaacagtacgcgcgactcgtcgcggcgggccagttgcggatgctgacatcgcctgcgtggttgagcgtggagaatggcaaggtaaggatccagttctcactgccgcgccagggaacatcactggtgcagctgagttggtaggggtgggattccatgcgccgcgaccctgcacaccgtcgcttgtggctctgggcgccgctgcttgtcaccccagcccccctcccgagaagtcaggactttctccccctcaaggggagggctggggaatcaaatttcccctcttcccatgagagagaggttgagggtgaggggcgcgccgatattcattacctctcgaccgaaaacgcgtacaccgtccgcgacatgtaggttttccccggtcgcagaatcgttgatggaaagttgggcttgttcggggaatcggggaaatgctgcgtctcaaggcagaacccgaaccgccgtttatagacgtagccgcctttaccggtcagggtgccatccaagaaattcccggcgtagaactggatgcccggttcggtcgtcaagacttccatcacgcggccggtcgtcggctcaatgacgcgcgcggcaagcgacaggccttcgcctttgcggttcaccacgaagttgtggtcatagcccggtccgtacttgatctgctcatcgtcggcatcgatgcgcgcgccgatgggcgtgggcttgcgaaaatcaaatggtgtccccgcgacgctgcgaatctccccggtagggatcagcgtggagtccacgggggtaaagtggtcggcgttcagcatcatgtcgtggccgaggatgtcgcgccggcccgctcccgccagattgaagtaggtgtggttcgtcaagttgaccggcgtggccttgtcgctcgtggcgtggtagtcgaagatgagttcgttcttgtcggtgagggtgtaggtgaccctggtcttgagattgccaggatagccctcctcgccgtccgggctcgtgtaggtgaacacgatgcccaccgaatctttcttctcgaagggctcggcctgccataccaccttgtcgaaacccttgaggccgccgtggagatggttcgggccgttattggcagcgagcttgtattcgacgccgtccagcgtaaatttggcttggccgatgcggtttccgtagcgtccgatgattgcgccaaaatagggatgcccggcgagataaccttcgagggaatcaaagccgagcgctacgtcgtccagcttgccgttgcggtccggcaccttgagcgaaacgacgatgccgccgtaggtcatcgcgcggacttccataccctgagcattggtgagcgtgtacacgtccaccgcctggccgtcgtgggtcttgccgaaaggatctttttttaccatgtgactactcccggacgaagatgttggagcttgcgcgcagccgagcagtaatgccagcacgcacaggacgaatcgagagggaattcgatgcctcatggtcaaaaccgccagaattcattttggggctatcgccccgacacagcgggacgggaaacgtatacagcttctgcggggtttcggcaaggggattcaaggcggcgtgaccaaccgtcgccgcgcggggcgccgacgccctgcggtataatcccagcgtcatcggagcaggattggaaatacagagcgcgggaccgcaactccacgggaggtgtcattcgatggaaaagcccactcgccgcgcgttcctcggagggatgaccgcaggcgtggcgggagcggtggccgcattgcccttgctcgacgcccccacagcgcccgccgtcaagggcacgatgccctatcgcacgctgggggcacgggcgaaaagttgtcgccggtcggcatgggtggatggccattcggtcgcagggcgggcgaggaagaaagcacgcgcttcatccacgccggcatcgatgaagggatcaactacgtcgaagctccagtgggctccctgcgggccaagacggcgccgaccggcaatgccggccagtacgaatggtccataggccgggccggcctgcggcggacgtaggaactcaagggcacctacgtgtgagtgagggagcggaaacttccctgaccccacatgagcaaaggacaccttcagaccccggatggccgcgagcgcctggcgttcgggattgatcctgccacgaccaagtatccgctgcggctcgctcgctacctggctttggcggagttcttgcgctctgaactggaacagaagcgggcgctgcgtctgctggatgtcggctgcggtatcggcaagctgcgccgcgcatgtccccacccgggaatcgagttcatggggatcgacgtccgcctatcctcgctcgaagtcgcccgacagaacggctatgccgccgtcctacaggccaatctcaacgagggtttgccgttcgcgccggcgagcttcgatgtgctggtctgcagccacgtgctggagcatttgccgaatccggaacgcctggtgcaggaagtgctccgtgtcctgcggcccgggggactgttcctggcgggcgtccccatgtcctggtggtggacgcgctggctgcgcattcatctcctgccccggctggtgccggagaaaaaggcggacgtcctcaccgccaacttcggccatgtcacgttcttcactctgccatctctcaaagcgttgctgaaggaattcgagatcgtggacattcgcggcttccgtttcttttcctcgcgtcaccttcccctggaaaactggtggtggtatttccgcctcaacaccttgtgggggcgggcgttcccgcgtctgacggccgacgtgaacgtcgtcgcccgcaagcgcgccgcagtctcctgagtcagaaactccgcaacctgcgttgtccgcaacgcggaacctgcaaggctctgtagcatgggcacgctgcccatgcgcatagccaagatggccgtgctacgtgcgcctggcccttttgaacggactctcgacttgggacacaggttgaggttgacgttatgttgctgcattgggcttgcgagtcgttttagaatgcgtgtcatgagcccccgacgtgcgccggcgactggagcgacccccctgcgtcgccattccgctcaaggcatgattcagttgaagactctgctggccttgctcctgctcggggtagccgggtacgtgctgttcaaagtcaccccaccctacttcgcgaactcgcaattaaaggacaagatgtgggaagaagcgcgctttgccgaggccaatgaccggacggccgagcaggtgcgcgccaatattctccgcgccgccctgcagcttgagattcctctcgaggcggataacatccaggtcgaaatgggccccacgggcactcgcatcaccgctgactactcggtgatcgtggacctctactactaccagctccactgggatttccataccacctcggcccgctgagggcgcgcattgccggacgcatgggccagagcccatttctctgagtttgctcagcgtcacttccaggccaagcctgtaatctgcgcttgaaccccgactgacttcagatgatgataagcagccgacggtcagctagcatgactttgggggagccaagggggtaaggaagaaggggatgatgcaaggcagagcaggctggttcaggagcgtggcgcttttcgcctgcgcctttacgggcgttgccgcgaatgcgcacgcccaggacgacgtgcgatggcaggaagcgctcaagcaggcggccgaggcccgccagagcgggcaactggccgaggtcgaaaaactcctgaagggcgcgctcgccgaggcagagaagttcgggccgctcgaccagcgcgtggtggtctcgttggatgccctgggcacctactactaccagcaaggcatctacgtcgaagccttccctgtgtacacccgcctgctggagattcgcgaacgcaccctgggcccggatcatcccgcggtgggggattccctggatgacatcgcggtcattgagaacctccagggcaaactggccgaagccgaagcgcatgcggaacgcgccctgctgattgccgaacgcgccgccgcggggctctccggcgtaactcacctggcggccggccagaatcacacttgcgcgatagtgggcgcgggccaggtgcagtgctggggatccaatctgagtggccagctcggcgtccccggggcggcggtttccgcctttccggtgaccgtgtccaaactgagcaacagcgtggcgttggccgccgggttggcatttacctgcgccctgctttccgatcacaaggtgacctgctggggcgcgaatcaaaggggtcaggcgggcgcgacgcccagcgaactcaccgaacccgtgctagtgggagggatcttgaatgcccgcgccgtcgccgccggaggcgagcacgcctgcgctctattggccgacgggacggtgaaatgctgggggaacaacgagcaggggcagctcgggaatggaacgacggccagttcggccagcccggtcacggtgagcggcatcgcgggcgccaaagccattgctgccggaggccatcacgcgtgcgcggtcgcgacggatggcggcgtcatgtgctggggttcaaacgtggccggacaaaccggcaaagtcggcacggagcctgcccttacgccggtgcgcgtggcgggactgacggcaccggccaccgcccttgccgccggggccaaccacacctgcgcgctgctggccgatgggacggtggcctgctgggggcgcaaccagtccgggcaggcgggaactccggccagtgcccgggtggcgacacccacgctggtcaaagagctcgcgcgggtcgaaggcctcgtggctggctactcacatacctgcgcgctgctggcggatggctcggtccggtgctggggcaataacgaggaaggccagctcggcgatggcaagaatctgaattcctccagccccgtggtggtggcggggctgccgcgctcgacagcgctggccgcaggcgctactcacacctgcgccgtgttgagcgatgcgacggcgcgctgctggggcaccgacagccacggcacccccgccggcgtcaccttcagtttgcgctcgagagcgcccgtggccgtagggcgagaagcctccggccttacgatcgcactcaacattctggcggatgtctaccgggctgaaaggaaattcgaccgagcggagccgctctaccagcggaccctcagccttgtagagaagatgcgcggcccgcaagaccccagcctggttcccatcctcaacggctacgccgaaatgctgcgccgagccggccgcagcgaagaggccgccaagctggacgatcgcgctcggttcatccaacgcaagcctgtgctcatcgacgttcctgcgcagccgccggggccgcggtgaggatcccggcgatggcaatgacggacccgcgggcccgcgcccgagtctataattgtggcacgagggaggaaaaggctcctatgcgcacactgctatggatcgttacagcttggatgttgtcccttcccgcggttttcgcggccaccgatccgaatcagaaggaatggattcagctcttcaacggcaaggacttgaacgactgggcggtgaagatcaccggctacgccttgaacgagaatttcgggaacacctaccgggtggaaaacggcgtgctcaaggtcgcctacgaccagtacgatgaattccggggaagattcggccacatgttctatcgccggaagttttcgcactatatcgtggccgttgaataccgcttcgtcggcgagcaggtgcgcggcgcgccggattgggcgtatcgtaatagcggggtaatgctgcattgccagtcgcccgaatccatgcagaaggatcaggacttccccatctcgatcgaagtgcagttgctcggcggacgcggaaccggagaacggcccacggccaacctctgcacgcccgggacgcacgtcgtgcgcgacggcgtccttttcaccacgcactgcctgaactccagctccaaaacctatcacggcgaccagtgggtgcgcgtggaagtgatggtgctgggcgattccgtcatccgccatcagatcgacgggcagaccgtcctcagctacgaaatgccgcaaatcggcggcggcgcggtgaacaggtacaatccctgggcgaaaaaggacggcaagctcctcaccgagggctacattgcattgcagagcgagagccaccccatcgaattccgcaaggtggaattgctgaacctggcgggctgcatggacgagaaggccacaaactacaagtcgtattacgtcaaggcggagaacggggagtgtcagtactgaggcgcttgcgttgtgaagatggcaatcacccggagggtggcgggactcccgttcccgggggaatgacgatagacgccggaaggacgatcataggcgcggtagcgacaacaaggatggccctggcctgccgttggcttgttacccacccaagccggggtccaggacgcgccgtctcttaagccccgcgctaggttgtcacttccgttgagcgggggccccagcccattcccttccgcggtcttcgcgaaggccaagcttgcgcgggatggacaaccgttgcgaaaatggccgcgaaggagaccatgcttcaagtgcgggggtgacggaacaggaagacgcaagggacttaaaatccaaaaagtaactgatgcatggtttagtaagggcccgcaagcgcaagtaaaatcggcaaaatgccaagcgcagtcctaatccctgcaaagccctctaaactggcactagctacaaaatctgctacagtaggtccgacaccgaagcccgccgcttcaagtatgatctggcctcactctttccgccacttggagtgccggactactgtcgccaacgagacgccaagccgtgcggcgcattccgccaaagccgcgccttgccggcgcattacggcgagccgctccaggcccctcgcgtccagccgccgcggacgcccgcccaagcgcgcccatgcgcttaactgagcgtggtcgtgccgcgcggcgcgcgcacgtccgcccttcgagccgatttcgctaaggtatccccgtaccagatcgcttagttcggccattttcgggcctccatgggagaccatagcccaaagccctagaaaagtcaatacttgtccgctaaggtctgacatcggagattatgttaggtcgaacttggccgcaacctattgaaaaaacagcacgactattgccgccactttccccatatcaaaccacgccccgcaccccatctgcgcgtcctggggcatcctgccgcgattacggccattttaggcgaaagtctgataaagtacaggccccaatcgccacgggcggcccccggccggataggtcctgggatggggcggggtgcgtcgcccttgccttgcggaccgccgcccagacacggaaccgtttgtgctcgcatgggcgagaccccgcacccgctttccaataagtggaagctccaggcccagccgaaccccttgacttctgctgaggagaagcctccatccggggttcagagcccccccttacgccgacctgcaaggcgtcggcccacaagccagatggaatcccctggctcaggacaaaaggacgcgccacgtttcagacggttttaatttatccttgctgcctttcggggatacaatcccctcgccaatccaactcagactgcgaacggaaacgccaaggcgcagtcggcggaggaagccgtgaactataacttgcttgatcaggagtggattccggttctctacaaacaaggaacaccgcgtcgcgtggggattattgaggcgctcacccaagctggtcacattcggcagatcgcctccagtaatcccatggaccgcgtggcgatattgcgcttcctgcttgcgctgctctattggtgcaatgacaatccccgggacggtcccatcccggccgattcctttccgcgagagtggttcacgagactcgacgacaacagagaatgcttcgaacttctgggcgaggtgaagcggttctatcagtacaagtccagctcacaaaacgacaaaaagcctcccgttaattacctcgtccacgaagttcccacgggaacaaacgtttggcacttccgacacgcgacagacaaagttgacggtctctgtccggcatgttgcgctctcggcctcgtgcgacttcctgttttcaccacccagggaggggccggaaagtcacccgggatcaatgggcggccaccggtctacgtcattcctttaggctcttcgctcgcgcataccctgagcctgtcgtggcagaacgtttcgaacctgggaacacccgcatgggaaaatccggctttacaactccccaagaccggggacgtgcccctgctaaccggactgacatggctaccgcggtgcgtttggttagacgaccctgaggaacccgaaggtaaatgcatctcatgtgcgcgcaaagaactgttgatccggcaaagcgtatatgccggcaggggcagcataaaggcgaaggccgcaagccgaatctggcatgatccgcacgtcattcgcgaccctagggacattctcgtgacttcccgcaatcctcttgacgccgctgacgcaatggctggtgattgggcaagggtagccgccggggtgctccggaaggctgtacccacaggcacgcgtcaagtctggattgttgggtttgctactgatcgaaacaagtacctggaggcgaaggaatacgagattccccttctgtctgcaaccgatgagcagaagcttcaggacagcatcagcaagattcagacttggcagaaagagggctcaagactcgccggaaaagttcagaatctattgcgacgcaccgaggggacccgccagggagcatctcgccaaagagaacatgtggaggtgcagccaatgcttgccgccctccgcccccatgtcgaagacaaagtctctacgaatgtgggcgagttgctagccgggggcgatcacgcctggcagcaagcggcccgcgaatatagtccagggatggacgccatcgcccgatcgctttcgccgggttacaccactgccgccgtggagatgcggcgacggattgccagcgtggagccgaacatgcgtctaaacgcaaaagcggccaagaagcccggctcgcggaagggagagaagaagtgactccaaccgagcagtacatcaaacttctaacgggcttgaagcccggtgcactgggactgttacgcacgcatgctgggcagggcctcgatgaaactgtggacgggttcgacctgttcacaggcctatggtggccattgcgtcgaagaaacgagcgcgcgcctcgccgccaagtggcctggctcatcgccaagctctatgccttgcgtcccatcaaacattcacccggcgagacactcccccgccaactcgcaaagctccggcccgatgaggaacgagcacagaaacgattccgccagaaggttgacaaacagaaacgattccgccggaaggttgacaaaatgcttacccttccgctcgacaagatcgaaccggccttgcaatgggcgctcgacctgctcggctcaaagggcctgaaactcgactgggtaagcctgacgaatgatctttccatttgggaacgcgaatccgtccgcctcaagtgggcggaagaattcttgaaatcaaccaaggaggacagcgatgttgatcgaaattcacatgattcaaaaccacagcccggccaacctgaaccgggatgacctgggcgcccccaaaacctgtttcttcggcggggttctgcgctcccgcatttccagccagtgcctcaagcgaagtatccgcaggagtgaagagttccagcgattgctcggcgggaagcgtactcgccagctagccagactgatcgccgagaaggtccgggaaaaggacgtgaagaagcgcgctgagaaggtactcgagatgtgcggcttcaaacctaagaaatcggaaggtgatggggaaggttccgagagaagcaaaatgcttgtctacaccacggaccaggccatagaagaaatggcaagcctcttccgcaacggcgacggcaaagacgacaaccaattggcaagagagctggccgagattattgccaagcgcaccgccgtcccggacatggccttgtcaggccgcatgttggaacccgatgagtccgggaagaaagtatgggaagaactcaataccaccgtcgaagcggcgctgcaagctgcccacgctatttccactcatgaggcccgcccggaggtggattactacgttgccgccgacgacatccccggcgcggatgcgggcgctggctatgtggacgaagctatgttcgcttcggcgtgcttctacaagtatttctcaatcgactgggaaacccttgtcgacaatcttgagggttacggagacaaccacaagaagctggccgcacacaccgtgggcgccttccttcgcggtgcggcgcttgccaaccccacgggcaagcagaacagctacgccgcgcacaatcatcccgacgggatactggtcgagatcagaaactctcccctcagctacgctaacgcctttgccagaccggtgggtgtcggggccagcatcaaggaagatggccgcgacctcatttcgcagagcatcgcgcaactgggccaatacatctacgacctggataacggctacggcaagccgaccgagcggttttggttctcccccaatctccgctgtcccttgacggtttccatcaaggcaaaggagaacggaaaggagaaaacccgtgaggtcgcgcttaccgaaaacaacctcggatcgctcgatgagttgatacccgccgttattaaggcaatcgggcatgattgggaggaggttaagaaggtcatcgtaaacacggaggtggcctgatgacccccaacacccttcttctccgctttgaaggccctcttcaggcttggggcgaccagcaatcgaaatttgtcatccggcgcaccgctgaggccccgaccaagtccggagttttcgggatgctctgcgcagccttgggcgtgtctcgtaccgaggccccccaagagtggctcccaaagctcagtgccctgcgcatgggtgtccgcattgatcgacccggcgtgcgctggtgggactatcacacggtgggcgccaagattggtatccgcagggcagatggcaagggcatcaagcggacggctacgacgggggaaatcgaaaccctcgtcacccgccgcgagtacctttgcgatgcctccttcctggtcgctcttcagggcgaatcggccctgattgctgaactggagggggcaatcaaggcgcccagatgggccctctatctcggcagaaagtgctgccccccttcgcgccctttgcttgacccgaagcatccggcgggttacttcccggatttgcttggagcgcttaaatccgtcccttggcaaaaacggctggaggatgacccacagccccaaaggctcgtatgcctgcgcgactgggcgcccacgccagaagagccagaagcttccgatcacgccctcatctggtatgacgtgcccctcaccttcgatcctccctcgcattctccccggtttgtaatccgcgaggaattgcgagtgggtgcgaacggcgaggttgccagcgcaggtgaacctgcccagagcattccgctggcaccgccgcggcctcgcgcgaactataccaacacgaagttcagggaacggcgaaaggagcgcctcgacctcgaccatcacctctgcgtcttctgcaaggcccccgccaccaccgtccagcacgttacctaccggcgggctggcggcgacgaggttgccgaggatttgcgcgctctctgccgctactgccatgacgccgtgaccatgatcgaatacggcttgaacatgggaatggaccgcattaatcccgaggagccccgctggcgcgacatgattgttcagaaacgagaagagatcatctgcttccgctcgctcgaaacacgccgccgcaagctcgcggctgaggaggtagagtagccatgtacctctcctatctcttaatcgacgtgggcgacaaccccgaccggccccggcccggacgcttgtggcttagaaacctctatcatgtccaccagcgcctatgcatggcgtttccgtccaatcccagaaaacggcgtgatccagactttcttgccccttatgcacctgaggacttcccggagcagcgtcacttggcagataaaaagaagaccgaagtcgatccagaaatcttaaaacacgtacacagcaagcgaggaccggactccggttttctctttcgcatcgacccgcagcccggcggccgcgttgtgattctggtgcagtccgccgcaaagcccgactgggactacgccttccacaatgccggctatctcctggccgcgccgccccaagtgaagtcattcgacccatccttcaagccgaggcagcgccttcgcttctgccttctggtgaatccgacaaggaaggtcggcacgatcaacaaggcggagagacagagtctctccaaagacgagcttgctcaaaaacaaggacgccacggcaggcgcgtcccggtgccaagcgcgcgggaaatcgaggattggctccgcaagaatgccaatcaagatccgcgccccttcattgagagtaagctcctggagtggctcgccaaccgaggggcaacatccggattctgtctcgaccagcgctcaactatcgttcagccgagctatcagtatttcaacaagcgtccggttgtcgggaaagaagaagcggaagccttgcggaagagccagcaggcccggctgcgctcggtccgttacgagggcattctccaggtcacggagcccgccccattccgcgaaactctgatccacggcatcgggccgggcaaagccttcggcttcggcctgctttccgtggccccctgccacacgccagtcccagcggagcaatgatgaggattgaagacctccacgtcttgcccaagttcagtgacgggtggagctatctctacgtggagcattgtcgcgttgaccaggaggaccgggccatagccatccacgaccaggccggcaagacccctgtgccttgcgcgaatctggctttgctcatgttagggccgggcgtctcgatcacgcatgcagccatctcggtactcgccgaccacggttgccttgtagcctggtgcggtgaggagggagtccgcttttacgccacaggaatgggcgagacgcgcagcgcggccaacttcctgcatcaggcgcgaatgtgggcgcatgagggcttccacatgcaagtggtgcgacgcctctaccagcttcgcttcaccgagaaattcgatcccggtctgacccttcagcaaatccgaggcatggaaggcgtaagggttcgggaggcgtacgccaaagccgcgcaggaagccggcatcacgtggtcaggccgaaactataaacgcgatgagtggagcaaagcagaccctgcaaatcgcgctttgtccgccgccaattcctgcctgtacggaatctgtcatgcggccatcgtgtcggcgggcttctcccccgctctcggctttatccacaccggcaagatgctctccttcgtgtacgacatcgccgacctttacaaaactgaaattaccgttcccgtggcatttcgagccgtcgctgaggagaaaaagccgctggaacggcaggtccgtatcgcctgccgcgaccagtttgtctccactcggcttctggaaaggattatcccggacattcaatccgcgctgatgttgtcagtcgcggctgcctccgatactgatttcgacctcgatggtgccgcccccggcttcttgtgggacgatttggaaggcaaagtcgaaggcgggcgcatacaagtggcggaagccgacgaaacggaacccaacgatggtggtcctgattcttgagcgcgtcccgccgggactgcgcggcgaactcacacgctggctcctggaaccccgcgccggcgtgtttgtgggacgtgtttctgcgctcgtccgtcagaagctgtgggagttggcctgcagcaaggcgagcggtggcggatgcctgatgatctattcgagcgacaatgaacaaggcttccggatcgaaacttggggacgaacgagtcgccgagttgaggacttcgaaggcctttttctcatccgcatcccgccgaatcagtaacttgagaagtgtcgtccccacgcgcgtgggggtgaaccacatgaggttccccacaaagtgcagcatgggacgtcgtccccacgcgcgtgggggtgaaccgtcacgcgggcccggttccggctctcgactaaggtcgtccccacgcgcgtgggggtgaaccgagtaagccgtgcaggggcggcttgcctctttagtcgtccccacgcgcgtgggggtgaaccagattcagcaatcatcaatctcgccaaacggcggtcgtccccacgcgcgtgggggtgaaccgtatgcggcgtccatcgcatcccttccactctggtcgtccccacgcgcgtgggggtgaaccgcaaggcggcagcttgccacatattttggcgctgtcgtccccacgcgcgtgggggtgaaccgaaggattgagcttaagcaccagccttatcaacgtcgtccccacgcgcgtgggggtgaaccgcatacgattggtattacgaggcgaggctccgagtcgtccccacgcgcgtgggggtgaaccgtttgctgcccgcgcacaggcggcgggcggggagtcgtccccacgcgcgtgggggtgaaccggctgctattgattgggcacaagaacatggtcagtcgtccccacgcgcgtgggggtgaaccgacggtgagtttgagtttgcggttgatttaggggtcgtccccacgcgcgtgggggtgaaccgactcacgaacaataccttcacgcaatccgcgagtcgtccccacgcgcgtgggggtgaaccgttcaagccgccggcgtttaaggttatgtggcagtcgtccccacgcgcgtgggggtgaaccgtagacggggtaagtcagggaacgctttctggcgtcgtccccacgcgcgtgggggtgaaccgttgtttggcgttggtagttggcgcggacagtcgtcgtccccacgcgcgtgggggtgaacctcgtgacgcgcgagcgtaaaatgcagccatgcggtcgtccccacgcgcgtgggggtgaaccgcgctcgaagcggtcctcatagagctccagccagtcgtccccacgcgcgtgggggtgaacctcgcgccgcgcgagcgtaaaacgcagacatacggtcgtccccacgcgcgtgggggtgaaccgaactcaacagcgcgcgttcaggttacggatacgtcgtccccacgcgcgtgggggtgaacctaccggaactgtggatgtgaatgttgccgtcgggtcgtccccacgcgcgtgggggtgaaccggtcctggcgcgggaaggcaaggccagcgtcgagtcgtccccacgcgcgtgggggtgaaccgcgccgcgcacggagcgtcacccgccgcgtcggtcgtccccacgcgcgtgggggtgaaccgttgtggcgggcctgtatgttcgggtggtgggagtcgtccccacgcgcgtgggggtgaaccgtcgtggacctcggtagcctccggccgggaggagtcgtccccacgcgcgtgggggtgaaccgtgtttacgaggctcgtggtgagtactcccaatgtcgtccccacgcgcgtgggggtgaacctcgcgtacttggcgtggtagcgggcctgctgtcgtcgtccccacgcgcgtgggggtgaaccggcgccgccgcggccgtagatgtcggacagccagtcgtccccacgcgcgtgggggtgaaccgaactccgacaaagccaaaaacttgaacgacgcgtcgtccccacgcgcgtgggggtgaaccggaattatgggtaggcgaaatgaaaactgcgtagtcgtccccacgcgcgtgggggtgaaccgcgca

SEQ ID NO: 556 - DNA, 22339 bp, Artificial Sequence
  Synthetic Oligonucleotide
aacgaaacttaatgacagtcaccagataatcacctataataaattatgtcaagttaattttgccggataaggtaaaggacaaaagaatctgccctgaaggcggttcagcgaccgcctttactgtagtggcgcttgctatagcgccgtttgggacagtcatccagccccgaaacaagtccaccaagctatatcggcctgcgagccgggatccagtcttttaaaaatatccacaaattacacaaattatacggattaaaagaacagaataaggacaaacgtccaacccaaaaacaagcatcagccccgaaacagaccacgacagacactaaaattgtgtcatcccgggctgtcggggtggcttgacccgggatccagttttttaaaaaccacataatacacagatagaaagagggtgaatattttacaacacgacacaaaaaagaactacaaaaaaccataaaaccccgtcaccccgatttcaggtcaattacaaaaccaccactttagccaaacgataaaataccaacaaactacccagattggatgcttgtcccctcaaaataattcccgcgataatcctcatattacttcataccgctctcccttgctgctactggctttggtgccatcatccttaggtcatccatataaaggttaaggttgaccccaggaagaccaaggtctgagcgccagatgcaaatgagagtcgcccgcgcgcgaggaaatcgcaacacccccacatgcgtggggaatacaggatcagatcctcgatgatgccggcgtcgatcggttcacccccacatgcgtggggaataccaatacgcgctgcccatgcggttatgccgcgtcggttcacccccacatgcatggggaatacgccgtagccaggctgaaaagcggcgctatgaacggttcacccccacatgcatggggaatactccacatcgacagcggatgactgcatccggaacggttcacccccacatgcatggggaataccttcttgtttaattcctgctaattgttgccatcggttcacccccacatgcatggggaataccttgctattgctcactggactgccctttataacggttcacccccacatgcatggggaatacatgtccaggatgatcgtgagaatctggacgatcggttcacccccacatgcatggggaatacattgcctgtctcagtagggtgatagattcaggcggttcacccccacatgcatggggaataccatcaggtcaccaagccgcctcgctacgtcctcggttcacccccacatgcatggggaataccccaacgatcagcaggttgctggtttcgttgacggttcacccccacatgcatggggaataccccttgaagactctttgttatttccgataattcggttcacccccacatgcatggggaatacctctttccggtgacaacaaggaaagctccgcgcggttcacccccacatgcatggggaataccatcaggtcaccaagccgcctcgctacgtcctcggttcacccccacatgcatggggaatacctctaccaggataccgacaaagccgccgccgccggttcacccccacatgcatggggaatacgttaccagtcccttcatcgctatttcgtcggcggttcacccccacatgcatggggaatacggcatcacctacctggatggctttgtcaaagtcggttcacccccacatgcatggggaatacgtcttgcctggcactacgttaattcctggtttcggttcacccccacatgcatggggaatacgcgttggcctgggcggcatagacgggattcgtcggttcacccccacatgcatggggaatacatagccagcagtgccgccggctggcgggcgttcggttcacccccacatgcatggggaatacgatacaaggcaatgcagaaggcaaaacagatgcggttcacccccacatgcatggggaatacttgacactcatatgatcacctcgttttgtagtcggttcacccccacatgcatggggaatacattgaattcttttgcgataggttgaagggtctcggttcacccccacatgcatggggaatacaggtcacgtgcagcttgtagcattcggataagcggttcacccccacatgcatggggaatacctgtgccgaagccagatcttggtgacgtgatccggttcacccccacatgcatggggaataccggacagcctatgcaaccgatgcgtgtgtatccggttcacccccacatgcatggggaatacgttttgtagtgtgtcgctaatgttgcggatgtcggttcacccccacatgcatggggaatacacttgatcaatagaggtctaagaggtcattgaactccttcaagccttagtttaaggatgcttggtcataagtttgataccctcccattccgtaacgactcttgatgcggcaccccagaattcgatatcaaacccttgctcggtctgactactccagatcatcaggcaagttccaccgctgcaattgcttctaaccttatcccacagtttatctctaaccattgctgagactttacccacaaacaccccggcttttacttccagcagccaacgtgtgatcttacccctcagggagcttggcacattttccaatactaaaaccaccatcaatcttcctttggcagatcatcctgcccgtaagatatgccgcctggggaaacttctccatctggagaccagagtcctccaggcaaggctggttcttcggcaaaacagtcatccgggctatcctctggcataatatcaccgaagagagaactaatatccgcgacaatgcgtttgagtagattctgcctgtggaattcatcacggcaggcaagcctgactctgcggtcgagttcgccgatcccttcagcggtcgcccggaatgcggcgggagcagccatttccattttgtatagatccgcgatatcatagacaaatgacagttgcttgccagtgtggacaaagcccaatccgggagagaatcctgcagcaacaatggcagcgtgcgatatgccgtagaggcaggagtttgccacagataatgcccggtttatgggatccgctttattccagttgtctctttgatagtttctgccctgcatgggcacaccatacttttgggagagttggaaatatgtatcgcgcacccgggcaccttccttgcccctgatctggttcaaagttaaatcaggagaaagctcatcctggaacctcaactgatacatggagcgcacaacccgtaaatgcaaaaccgggtctgcccagtactttgcctgtttcataagattgacggcgctacgggttgtacctgtgcctgcggcatagaacctgacgccatgttcccccacccaggctaccagacagccacaggcagccagtgaaagtattgccgcatgggtgatggttatgcccggtcccagcatcagcatagccaagccggcacaaggaaccggggtttctcccagggcatcgtgaatggcgatggcttgcccgttctgatcaattttggcatgctccacatagagatagctaagccgatctctgatccgggggatagagtgcaggtctttattcatcattcctgattggcagaacggacagcaggccaaagccgaagcttttcgcttttccaatgccgcttctaagcgtttccaggaacagtttcgggtcatccactttgagaattccctccagtagagccgaacggaagcgcagaggattgtatgtgtgttcacgccagtagccctgtccctgttcctttgctttgacatttttaggttcaggcttggagccataaacccaacccagttgaagaagctcacagcgctgaagggtgaagcccagctttgggcttttggcagccagccagtcggcaagggcctgatccggggtggaagagggatcccaggtgagagaaacccttttgtgcaggatgttgccagtttctatggtttgaccgtcctgttgcaccttctcaggaatatgacggcgtacgctggcgtttacccgcagcctgaaccggagcagttgtcccgcttgaaactctggattatactcctttgtttccggtggcgctgccaggaaatcaagcgcgttttggaagcaataatcccaatccggctcaagaacggactggacgataataatcgcccttttatcgtttccgtcgatgttgttatcgacccggaaaaggaagggagttttttggaagtcgtttggcgaaaagggcttcaggaaatgcggatcctgctcccggcgcaaacctgaagggaacgccatggaaaggcggcggtggacgttatagatattgtccagccactttctgccggggcggggacggtctggattgcctccagtatcgatcaatagcttggacaagtagatcatccgttttcctcctctggcttcattttgcggaaacgctgcccgcgcgaacggaactcgactatatctttgcgctttgccagtattcgctcccgccagatggggtcgcaggggtcgatgcggtcggtggtcatgccggaaccgtattccagcatggtgcaggcgtcgtggcagaggcggcacagcgcccgcaggtcttccggtatttccttgcctcccgccctgcggtaattcacgtgttgaacagtcgtggcgggagctttgcataccatgcacgcggcatggtccatcacaagccgctccgccctgaccttcttatactcggaattgttataatccgcccgggttcctttgggcctccaaacgctggttccggtttccctgctcacttgcacatcctctcccacaaccagctcacgcctgatcacgaagcgcggcaaatggcggggcggctgaaaagaaaccggcagatcgtaatgaatctccgcgtcatcaggcgcatgttctccgtcctggctggggatccagtccatgacgcaaggcagtatttgcggcaggggttcattgtgccagcgcttttgcaggggaaccgcggacagcgcctcctccaaagtgttataaaagcccggagcatgctcgcccacgggacgtgaagggggacaggatttgcgccccagataaattgcccagaccggcttggccagagcggcggagagcttttccacaagttccggctcaccctgcaaggcgaccagaaaactggcgtcggcaagatattcgcggcgtgagagcaaggtctctgccctggtttttactttgcttggtgtcagggtatcagccagggcagctccaaccatggaaggttttttgggtgccttcagctctgccatgcgcattctttgtcccgctccaacagtatggaagtcccaccagcgtatgccggggcggtctatccgcacgcccatgcgcaggttggcgagttttgggagccatgaatcagcagcctccgcgcgcccaattcccatggccgcgcaaagcagccccaggacacctgattttgtgggagcgtcggtagtcctgcgcaaagcaaacttagcctcgttgctgccccaagactgcaaagccccctccaagcgcaagaataaggtgttgggtggcgcactcatgtcagccgccaacataagccttgcttttctgaacttcttcccacttgaagccgccaatataatccaacacagcgcctacaagctcattgaggttgccaatgtttctggaagccagtttggaatgctcattgccaagggaatagcgattgtttggagaaaaccagaagctgataactggggattgctcatcataatagccaagcctgatgtcgttcacgtagttggaaagctggccgatgctttgttccaccaggtccgattccttgaccacggaaactggcctgacgaatgcgttggcgtagctaataggggaattcttgaactcaacaaggatgccatcgggatagttatgagcggcgaagctgttctgtttgccactggggttggttttggcagcggcgaggagaaaggcacccacggtgtgggctgccagattcgtgtcccctttcaggttcttgaccaactgttcccaatcaatggagaagtatttgtagaaacaggctgaggcaaacatggattcgccaatatgacccgctccggcgtcttcaccgggaacatcatcggccgccacaaaatagtctatctcaggtctggcaatgtgggtggagatcgcatgtgcaacctgtagggcgccttcaacgccagtgtttttaagctctttggtctccaacatcctgccgcaaagtgctatatccggagaatggacgcagtttgtgagcaaatctttgaactgcagcagtttttcgctttcacttagtttggagtcggaaagcagctctgccatttggcgcagggcatcataagtggtaaaaaccagcatgtcagatgtatcagccgcctgctgctcatcctgatcttcatcggcttccgcgggtatcttttcggacttttttgcagctttcttggaagatttggttttgattccgcaggcttcaagaaacttggcaaccagcttcttatctttgttttccagcatttcttcaagtttctctgccagacgccttgttcggatacctcctctaaggtccgcgaattccggggcaaaacggatgctgcgcttgatgcattggctggagatgcgagaacgtaatactccaccgaaataacaggtcttgggggcgcccaagtcgtcccggttaagatttgccgggctgtgattctgaatcatatgaatttcaatcaacatctgaatcctccttgttgatcttgtatgctttaataaatgaatccgaccattctcttttgacaggttcctgctcccaaaatgacagaacatcagtaagccctacccagtccaggcagacctgctggtgcttgcgcaagatacccataatgaccgacagcggctcttccatctgcataatgtcaagcgatgcgagttgatcaaagcgtgccaatacacggggtaattcctttttgggttccaacttccggcagatgcctcccataagaatgggcaatgtggctccctcgcgctgttcaaagcggaattcagcaaaaagtttggcgatcaaccaagccacttcacgcttgggagcgcgttgattcttttgccgcaaaggccaccatagggcggaaaacaggtcaaatccgggaagcttttcatcaagccgggctcccctgagttttctaagaatgcccaaatcgccttctttgaggttctccaggcttgcaatgaagtcaacggttcctctattcattctggtcctcctctgcgggttttgttttggattctggtataactggccagggcttgcgggaaatgaatttacctctcttgagcctggcgtccactgtttgagccggctccaaagagcatgcaaccttggtgagcagttctccgtattcagtatcggcatcctgccaggaatagcccctgttctcagtcattttacccgcattgatggcaattctgctttcggcgtgggggataatgtcagcaatctggggagtgcccactgactttttgaaatcacctctgagaggcttcttgcgcatggcattaagggcagtagccctgtttgccaattgagccagtagctcatcatttgtatcagttccctcaagctcgatgatcttgtcccagatgtctatgctttttgctttatcgctggcaaatccaaccaaccatagttttccttgtctggagtttccttccgcgtgcaaatagctgaacaacgggctataccaatcccggtccgcgaaagtgtatctatcattggacatcagtttgattttggactggagactttttccctgatcggtgtaaacaccatgagggtctttccatttaaggccttccggcactggttcaggttttatgctgcaggaatagacgagagctttggagggtaagccgcaggaacaacatgctgcctgacctgagacaggatcatgcagatgcaccttgcgcggcagccaggtcattccggcaagtaagcccactttcctgctttctttttgaaaagaacccaaccatgccggaatccccatattatcccagggttgccaattttgaaccagcatgccagcgaggtcatttgcatgccagagcaggtaaaatggaggagtgttgttgattcccgcgcctatccctctgccaccgacagtggtaaagacaggtaatctcagcagtcccttgatgcagcaagcttcgcagagcccatcgatatagtcggtgacatgattgaaatggcataggttgtgagctgttggtatctcatgaataaggtcggtaatggctctgatcctggaactgggatcggcttggaaaaatctctgtccatccccaaaaagctcgaaataccccttgttttcttccagccaggatatccaggaggtcggaagcggcttatcaggttcaggctccccgttggtgttggcgaaacaccagtagccaagagcaagcaggaatctgaaaacagcgaaccggtccataggattgctgtatgccagttgcagacagtgtgcgtcttcaagagtttgaactaaagatattctatctggtttgcccgaaagatagaccacgtttacccaattatcacaaagaagattgtacataacatgctccttttgttcgataggaaccttatatttaagccaaagatcattgtcaagaaatttgctttgcggattttgggttaggaaagatcaatttggggcggtatcttgttactttcaaggtgttccatgcggcggcttccactcccattttacggagccccaccagcggctttttcagcgcagttttcccgctgctgatacttggcttgttggaaagaaccgccgtgtgtaatgcgcggcggttcaagttaattatcggacttggaagggcggctgtccgtcacttcagcaatatcattttgcggctggcgctcgtctttccggtgctgaggcggtagatatagactccgcttgccagttgggcgccgttggagtcggtgccgtcccagttcaggctgtgttttccggctcccatctctttgtccagtagggtgctttacatgaaaactcccgggaaaaaagcgtaaaaaaacccctactggtgaaatgatgaccactagtgtaatatggaaagagcagagaacaacctgtgctgtctacaatgcgttatataagaatatagctttacattcgggcatatgcctaatggcaagtcccagctggtagtccatatacggactgtttaccaagttcaaaacgtccatatttcagaacagaagtccgtcggtaatatgttttgtatgcacagcacgctatgttcttattgatcgtgtgaattacactcttagtgtcagatatcccaagctgcgtttgttgtccagttttcattcctggtagcgaaaaatgttttcagcgaagttcaaacattccaaaagactggatcccgggttccacggttcacgcagataaacgcggataaagggcgcagattgacacggattggtgtaatataagggttgccgaagtccgttcggcagaggcaacggagttgcctgtttggaagagacctccggtctctgtggcaaacggactttgccacacctgggcactggatcacggctcgcaggctgtgatgacacggtttttagtctggagggttttgttccggagtcgggtgtgttgactctttaatgttcttttaattcgtgttaatttgtgtaatttgtggatgtttcttttaaaaagactggatcacgggtaagccaccccagagggggccccgacttcccgtgatgacacaaaatataacttggtggacttgtttcgggggcacctttccacctttccacaaaaataccacaaccttccgcataatccttcataccgccctcctttgctgctactggatttgatgccatcatccttaggtcaaccttataaattataaggatgacctaaggaagactcacgccaaaacgctggatgcaaatgagagccacccgcgcgcgaggggaaagggagggcagccagcccatggccgcgcaattacgggcaagtatatatatacttgccctgggatccgcttcccgcctggcatgaaggggtcgtagcacctatatatatggggggagaatttgtggaaaggtgttttgaggtggaaaggtgcctgcttttttaaaaccttacgcgtttgtttctaaaagactggatcccgggtcaagccaccccaccaaaccgcttcgcgctttggcggggaccccgacagcccgggatgacacggtttttagtctgttgtgctttgtttcggggcttgctggttgtttttaaaagactggatcccgggtcaagccaccccaccaaaccgcttcgcgctttggcggtgaccccgacagcccgggatgacacggctttagggcttggtggcggtttgtttcagggtctggttgttgtttttaggctggacacttgtccttattctgttcttttaatccgtgttaatttgtgtaatttgtggatatatcaaaaacacaggcccctgtctgccagaattctctttgcttgacagattcgcgcttttcacatatattatttttacatgggctggtatccagtccgacaaggaaagaaacatgaaagaactgataataaaagctattagcggccgcaagccgcaagactttttgggagaagatagatgagcacaccccgcggagaacgcgtaaacatcaccctgctgggtaaccgcaacgctggaaaatcgtccttgatcaacgccctggcaggacaggagatagccatcgtttccagcaccccgggcaccaccacagacccggtggacaaacgctatgaacttctgcccctgggcccggtgaccttctttgacaccgctggactggacgacagcggcgaactgggcgaaaaacgggtactcgccacctataagatactttaccgcacggacatagccgtgtttgtgaacgatggccgccccttcgcggagagcgagctgtcctccctgaaacgcatccgcgagatgaagataccgctgttaatggtctttaaccacagggatttgcgcgagcctgcccccgccaatatcgcctggtgcgaggaacggggactgccctgggtctccgtctccgccctcaagggggaaaacatcgatgccgccaaggaactgctgatcaagctggcgcccgcccatctgctggaggagcgccccctggcgggtgacttggtgaaggccggggacagggtgctgctggtgactcccatcgacctcgccgcgcccaagggacgcctgatcctgccgcaggtgcaggtgattcgcgaactgctggatcacgacgcggtggtgacggtggtgaaagagcgggaactggcctatgccttgcaaaccctgaaggagccgcctgatctggtgatcacggattcgcaggtggtgctgaaggtggtgaatgacctgccccccgaggtgaagatgaccaccttttccatcctctttgcccgctacaaaggcgatctggacgtcctggcggaaggggtgaggcagatcgacaagctgcgcgacggcgacaagatcctgatcgccgaagcctgttcccaccacgtgcaggcggatgacatcgggcgggtgaagattccgcgctggctgagccagttcacgggcaaggaactggagtatgaagtttacgcgggacacgactttccgcccaatctggaggaattcgcgctggtgatccactgcggagcctgcatgctcaaccagatggagatgagccgccgcatcgtggaagcccagcggcgcggagtgccgatcaccaattacgggctggccatttccaaggttcagggagtgtttgagcgggcggtcgcgcctctgtatccgcaaggataggagcggtcttcgagccgagtccacttttttccattctgtattggaggcgggcagcgattccggcttgacaaatccgccgccatctggtagagtataaaaacaaagcttagttcagggaggttaccatgtttcaacaacaaacgcccaaacctgtcgtgatcaagtttcccaagttcaggatcaaagccctgcctgccatagtgctgtccgtcctgctgctgggttttatgctttactttgtgcttccggtgctgcatatccgctttttggactggatcgtccccctgatgatctgcctggctccgctgctggcaatccggcgcctgcgcaagatcctctatgtggtctatccccttctggcgctgtggctgatcttggcgcccttcttctcttccggcatcttcaattccggcagctaccgccgcatgatcggcgaggtggaaaagaccgagttttccgacctggtggcgccggtcaatctggatcaggtgccgatcctggattccgctttcgccaaggatttggcagccaagaaactgggcgaggacttcgccctcggcagccgggtggtgctcggcaacccgaccatccagatggtggatggcaagcttttctgggtctgtcccctgctgcacagcggcttctggaagtggatcaccaacacaagcaaaggcaccccgggctacatcaaggtctcggccaccaatccgcaggatatcacctttgtgcgcgagctgaaaggcaaacccatccaaatccgctatcagcgcaacgcctactttggacaagacctctaccgccatctctggtggaacggcttcgcgggcatcggcctggcaggcgatacctttgaactggacgacaatggcgaaccctactggaccatcaccacctacacccacaagatcggagtgagtgccccggaagccaccggactcgccatcgtgcatgccggcacgggtgagatcaaatactttcccctcaaaaaaagcggcggcatctatgacgacagcaagattcccgcctgggttgaccgcatccagccctcctactttgtgcttccccagctttcctggtggggcaaatatgtgcacggcttttggaacagcgtgttcggcaaacgcgacctgctgcgggtgacgcccggttacaacgtgatctatggccgcgatcagcgcagctatttctactccggcctcaccagcgtgggttcggacgagggaacggtgggctttgcgctcacggacacccgcaccaaaagcagccacctctacctggtctccggtgccaccgagactgccgccatgcgctccgccgaaggcaaggtgcaaaacttcaaatactatgccaccttccccatcctggtgaacatgaacggcaagccgacctattttatgaccctcaaggacagcgccgggctaatcaagatgttcagcttcgtttcagtgcgcgacttttccctggtgggagtgggtgaaagcgtgcgcagcgcgcgcgacaactatcagatggccctggccggaagccggatggggatatccccggaggcagcggacaagcaggccaccctcacaggctccatcgcccgctttggctcggacaccacggatggacgcacctactactaccttaccctgaccgaagcgccggatataatctttatcgcctccagcaacctgagcagccgtctgcccatcacccgcgcgggcgaccgggcacgcgtcagctatctggaaagcgcggacgcggagatcaccctcaccgccttcgccaatctgagcctgggggataagtaggcagaaaggagattatagttaagccaggcaaggcaggtagccagatatgaaccgcgtggtgcccagctacatcctgcagcagtatgagcaaaacatcctgcaggggcagatcaccggctatatcctgcgcttttgcaccgttgccacttacaatatcaaaggagtaaggctcaagcagcggcagcaggtgattgacaggatggaagcaactttcaccgaagcctatgaaaggatgctgagcctgatcaggaacgcaggcggactgctcttccagtatgagggaaactgcatccacgccctgttgccggaaagcactccggtgctgatcgcggcgctgctggcacgcatcaatcacactatcggtgcgatcaacagctacgccagcccccatcatggaatgccgaatgtaatccgcctggccgtgggttttggcaccctgtcctggcgcatctttgagaaccccctccagtttgaatatgtgttctggtctccccaactggatgtcctgcgtgaaaaccccggccagcccaaccaaccttattactctccccaggcattgaacagactgggctgggagttggatgccaggcctggcaaacttgccgagcatccgccctttccccagttgcctgatattccggaaaggaagcgcttgggcaagcaacacggccaccacttcattcattcccgctttcacagactcaatcccgcggctgacgtccggcacagcgtttgctgctgcctcagcctggacgagcctccggacggccccctggagccaaccatccaggcgctggaactgctggcggtgatctacgacgcctttttggcagccatctatgtgcggcacaagcggctgcatgccatcctgctcttcgatttcccccacaacaaggtcaacaaaatgcagcgcgcctgccgcctggctttggaagctgccacgcgccacaaagcccgcgccgcctgctgcaccggctacatcttttccatggctgccggcaaagacctgtggaaggcaaccttcttcccgggcgaagccatcacccgcgcccagaagctcctggagcttgcccgccccggcgaagccctcgccgaccacaagctgcgcaaccagcagcacaactccttcatcttcacccccctcaaaagggaaaaagccgcctcaaaagccgcgccccgcgcctaccgtctgggcatgctgccggggcaactgatcaccggacaaccgctttgcatgattggcagggagaaggagaccgctctgctgcatagcaggatacgcgatggtttggcggcctcctcgccccaggcgatggtggtgcatggaacggcgggagtgggcaaaagcaggttggcacgcgaagctttgcgcgccttcgagactccccggcggcaggtgtatctgctggcttgcaggcaggattcccccctccctctggatatcgtatcccagttgctgcgtgccagtttggggcttttggaggatgaggctcccgcgcaggcggtgcagcatttccgcgaagcgtggcaaaagcgcacccgcggttcctcgctgggacaggattgcgaagccgccctcgcctcgctgctgaatctctcctgggatggctcgccctggcgcgggatcgcccccgaagccaggctgccccgtcagcagcaggcctggctggattacctgcgctggctgtgcgccaaatcccctgtgcttatctttattgacgatgtccaatggctcgatcccctgagccgtcaattcctggaactgctgtggcaacacggcgtgcgcccgctctttctgctggctaccgcccggacggaaaagggcaggctgcccgcggagcttgccgtcaaaaaagatggcttggagagcctcgccctgggctccctcaactccagcgccagccgcaagctctacctcaatctgctgggccttccccgcctgccccgcgaggccttttccgctttccacgcctgcgcgggcggcaatcctttcaatgccgaacagcttgccgcttatctgctggaaaacaagctgctcagtccccacggcgaaatagcgcaagagggcttggaagcggcggcgggaggcatcgacgaggtgatttcccggcgcattgcccggctctccaaaaaggttcaggaaagcgtccgcggcgccagtgtgctgggcttccgcttcaatgttgtcctcctctcccacatgctcgaaggcaaccccatccagcaactgggcaaagcggggggacggaaaatctggcaggatgccgatgaactcttttacatcttttcccacagcctgttacagaaggcggtctatgccagcatccgcgaaaaggagcttaaaaaactgcacctggcggccgccgaagccatggaaaccgtctttgaacaggcactcaaggagcattccgcggagatcgcccgccacttcaaagccgccggggaactcaaaaaagccgcccattactatgagatggcggccgattacttctgggaccgcatgctgctggccaagattgaggaatgtatgctgctggcagccgagttgtcctgccaggcctggggcggggacagcccggaacacatcgaacggctcttccatctggccctgctctatcactatatgcaccgcatggacgatgccgagccgctctatctgaaggtggtggaggccagaacccgccagctcgggccacgcagcccccgcctctccccctatctgaacaacctgggacgcttttacaaagataccagccgctacgagcaggctgaaaaactgctgcgccgctcgctgaatatcgaaaaacgccccgggcccagttccaacgtggcagaccgcatgaacaacctcgcctcgctctacagtctgatggacaggccggacaaagcggaggagatgctccgcgccgcgctggaaatgatggaaagccttttcccacaggggcactggtttacggcggtctgcgccggaaatctgggcagtgtgctgctgcgccagggacgcctggaagaagcggaaccactgctcaagcaggcgatagacggccataccctccactatggcgaaaaccattcccagacagcccattacctcttctctctgggcaggctgcgcgccagacaaggcgacacaaacaccgcccgggaactactgaccagggtgctgagcatctgggaaaacacctttggcaaagactatccccgctgcaaaaacgtccgcgaagaactggacaagctttcctgacacgactgctgtctgcacgctgaacaggcgggaaacgggggtggctcctctggggtgactggatcccgggtcaagcggttcacgcagatatacgcggataaaggcgcagatgagcgcggattagtattatggggggaggtttcggaccagggctgccgaagtctgttcggcagaggcaacggagttgcctttttgggagagacctccggtctctgtggcaaacggactttgccaccccactcatgatgacacagtatatagcatggtggacttgtttcgggggaaactttcctccattccaccttttcacctttccactctcaaagatccagtcgatcctgtcatccgcgttctatctcttttccgacagcaccacgttaccacgacaccacgtcaccacgaagtcctcctttccacctatcgtagcacctatatattatagagggatgggcctcatttgcattcccctctccggcgtgggtcatccggcagtcatccttaacccggtgagggatgacctaaggatgatgactccaaagccagtagcagcaagggacggcgctatgaagcatattgcggaatgtgttggatatttaatgcgattgtcaaataattgatgccggttgtttttggtctgggtgcttgtttgggacttgaaaagacagaatcaaggttcaagtggttcacgcggttcacgcagatatacgcagataacttaagggctgccgaagtctgttcggcagaggcaacggagttgcctttttgggagagacctccggtctctgtggcaaacggactttgccaccccactcgtgatgacacagtatatagcctggtggacttgtttcgggggaacctttccaccattccaccttttcacctttccaccttcaaagatccagtcgatcctgtcatccacgttcttttcaggagagtagaaaaagccccggaacctttcggtcccggggcttggttataggttatatcccgatgaattacttcatcatgatcatctttttggtgctgctgtatttgccagcgctcatcttgtagaagtagacgccactggagacagctttaccagcattgtcacggccgttccacacaatggtgtgcttgccggcgttcatgttgtcgttcacgagggtcttcaccagttggcctttcacgttgtagatattgacctttacgtggcctttatccttaacgctgaagctgatggtggtttccgggttgaaggggttcgggtagtttccgtgcaactcggtggcgaccacagggacgataggatcgtcgctgtcagttctgccggtgatatggaagtcatccagcatgaagatccagtggtcatgggacacgcactggatgcccacgtaggtgtcaccatcgtagttgctgagattatacacatactctgtccaatcaaggggagcttcgaggggagtgctgccgctgatgatggtgaagtcggaggggttggttccagtggtggagacaccgatcttgaacttttccagtcctccgtactgcgccgtcagggagcgtgcccagaagcgaagttccagcggattgtggagtacgggagtaatcaaccagtcgttgttgggaggggtagttgcggcgatacaggctgccattttatctcctccgtgaggtacgatggtagtggcgggaggagtggtggcactgggattgaagatgatgtaggcctgtggtgtttgggtgttaggccaggtggtattggtcatgccataggtcgcgctgccgtcaacgtcaaccgtggtccagggcgcgaattcgataacgaagttttcgtaggactcaaatccgtccgagagcagcacattgctgatcggcagctggaagttcaccgtggtggtctggttggtaacgacaatcactccgtcctgggtgacaggtgtgtagttcgggtggctggcggttacgctccaggtgcccgcgggaacctgcatgctgtaggctccgctggcgttggtggtggcagtcacgtcgccgcaagatacggttgctcccatgatgggggcgttggccatatcgcggacgataccggcaatggttccgatctgggtaagtttctgcacagcattggagaaggctggcagggattgcgcttcgccggtgtagatggctttcacagcccatttgtaccagccgtcaggcacgccgccccatccgttgtccggccaggcagtcgcggtgatgggtccggtggtgagctgagtccaggctgaatcgttgttttcctggccttgcagcaagcgccagactctgtagccgacgaggacacggtcgttgtctttgcaggcactgatgtctttgctggctttgatgttgtcggacgggatgtgtttgaggatgctgggatcgatcgcgcacacatcgttgggagctgaatatcccacgtagccgcggatgttccagttgtagttgaggctcggagccaggtcggtcagagttgcccattcaccggagttgtagatcatgttgccgaagccgttggtggcggggccgccgtcacagcctgcgggataggcgcccgcagcatggctgacgttgtagccaaaccagagttcctcgttgcctgaaataagcacggggttatccaaaaccacggtttggaacgtgtctacggcttgcacggtgaagggttggtcaacaacctgggtttcgggagcgctggcggtgccaccggtccagacacgcagggagtaggtgcccacatcgcctgggaagagggatatggcgtggaggctcatgccggcatagtcggtaagagcggagggcgggaaacgaatggcgacactgaattcaccaccggagacgaggccgatgctgtcatcgttttcgccggtgtcgtagtagatccattcgccgccgccagtgccaggctccatccaggtcaagttgaccaagctgttgctcactgccacggcttccaccgcgcaaggaggcagggtgatctctgtgagtacgaagtcctgggtggtggtttgcagtccggtaacgctcacaccggtctgggaagcggcctgatagccgactttcgagcaggtgacggtgtaaactccctgatagacgctgaaggaataatgtccgttgttgtcggaggtgccgctgtaatcgccggcggtgatggtagctccttcgatcgggacgttggtgccgaattcggtcacggtaccggtcagggtgcccatcatgcctttgtgtatctcaccggagaagacggcgggggacaggacgttgttggtgtaaacagctttgactgcatatttgtaaacgccggaaggcagcggggcccaggcgttgtcggtataggtggtggtagtgctgggaatgacagatggggtcagggtcgtccagagtgactcgttgtcctggttgtcagcaagcaggcgatagaccttgtatccaccaagtacgcggtccgaattggaaggagtgaacatctggaagtctggtacctgaatacgggggttattggcatggctggttcccacgttgcgggatgccgaagccgcgtttccaatgcttctggtaacaattgaactggtggagaagctctgggtgttggtattacgggagctgaaggaggaagcggaggcaaagtgttccttggctgtaggaacggggcccacgctcacatcgtccaccacgaagtagaaggcgtcgtcggaaacgcactggatggcgaagcggatgttctggccagcgtaagcgctgaggtcatagctgtacagtgtccattcaatgggcgcctggatgtagctggggccgctgatgatggtgaagtccgcgggggcagtgccgccggtggaaatacccactttgaagcgttccaggccgtaagcatcgctgtaggacctcgcgtagaagttcaggaactgacttgcggtcgcgatcatcggcggagagatcagccaatcgtcgttgacagcatcagtgctggcgaagcaggcagccattttgtttccgctgtgggcggtaatagtggtaaccggcggagtggcagcgctggggttgaagatcatgtaagccatgggggaatagacgttcggccaagtgtagccggtcataccataagtgccgctttgatcaacgtccaccagaacccagggatcgaaggtgagggagaagtcttcgtattcctcaaagtcttcggagataccctgagcattgggatccggagccatccaggtgacggttacgtgcgaatagtccgctgcttctgtggcaaccacttggcagggagggaaggccagttcgttcacggtgatgtcgcccatgttcaggtcggtggtgccaaccacggcttggccgatggcagcttggtaaccgatggcttgagcggtgtattcgtaagtctggctggcatagacgccagtgatggtgaattggccgctggcgttggttgtagcctggtaaggctcgtaacctgtgaggctgatggtggcgtcagccaggccaactgtgggttggtcgctgcccacgatgcggccggtcacggtgacctgaggcagttgggtgagcacgaagtcctgggtgacagtttcatcttcgatgatggttacgttgtgggtaacgacgttgtagccgtgtttggtggccacgacgctctggggtcccatcgccacgtaggggaagttgtaaacgccgttggcgtcggtgagggtggtgaggggggttccagtgatggaaaccgtagcgccgggcatggcaacgttgttcgcgtcacgcacggtaccggtaagcgcgcccatgtcgtccacgaccaggaagaaagtggtcttggggaacatagcggagggacttgtaccggtaggaggagcggcaggatcgtagtcctgggagtccgactggaccttcagagaacgggccgcaaggtccccagtctgggtgaggaagttatcgttgtaattgtgccattcggtatccatcgggcgttccaccagcaataccaggttaccgcccgcgtaggtgtaaggggtggtgaaggcaatgttgatgttgttcggaccgctgggataatcgacgttaccggcgaacaccgcggtgagctgggttgaagggatccagccagccgacagatcggtctgggtggtctcgcctaaccaaatattagtgggcatgttgggcaggttgctgacgaagtcgttgtagaactggatgccggttatcaggccaccaatgttgagctcggagcccaggtaaatggcctcgaacagggagttcttccagtacatgtccatgggcatgcggccgacagcgctgccgtcaccgagggtaatggccacgattcccgctgcctgcacggccacgtttagaggcaaggtttgattgttggc

SEQ ID NO: 557 - DNA, 21748 bp, Artificial Sequence
  Synthetic Oligonucleotide
agtcttttggaaacaagcactcagccacaaaacaaaccatgccagacaatatactgcgtcatcacgggcttgacccgtgatccagtctttttgaaaaggcagtggaaaggtgaaatggtggaaaggaagcaaaaaatccaacagactaccctccgcgtcatcccgggcaaacgggggcccctctggggtgtctgacccgggatccagtcttttggaaacaagcactcagccacaaaacaaaccataccagacaatatactgcgtcatcacgggcttgacccgtgatccagtcttttaaagcccaatcaagcacccaatacaaaaaatacagatatcaattccttgctaaccgcataaagtatcaatacattccgcaataccattcataccgccctcctttgctgcgactggattttgtgccatcatccttaggtcatccttataaattataaggttgacctaaggaatacccactccagagtgccggatgcaaatgaggcccccatattatataggtgctacgagctcgtaaagacttattttggtttgcattatcacaatcgcctgtcttcttccgcatgaagtccaagagagccaaagcgtctggtggagatttgaagcctgtcaaggctccttgaactccatgctggctgagtttggagtttaagccggcaaggaaggttgtatggatttcgccaaaccagaggctggcttagacttcaaacggtcttcaaaagactggatcacgggtcaagcccgtgatgacgcagctttagggctttgtggtagtttgtttcggggtcgggtgattgtttccaaaagactggatcccggatcaagtcaccccaccaaaccgctacgcgctttggcggggaccccgacaggccgggatgacgcggcatgtagcttggatggcgttgtttcaggactgtgtgttatgatatggctttaaaagactggatcacgggtcgcaggccgggatggcgcggcatgtagcttggatggcgttgtttcaggactgtgtgcttgtttgagccttgaaaagactggatcacgtgtcaagaggttcacgcagattgacacgggattgggctgccgaagtctgttcggcagaggcaacggagttgcctgtttggaagagacctccggtctctgtggcaaacggactttgccaccccccccatggaaggcaatcccagacggcgctatggcaagcgccgctactttgtactggcggtcgctgaaccgccatttccacctttccacgggtgtttctaaaagactggatcccgggtcaagcgtgcgcttgcccgggatgacacagaatataacttggtggacttgttttttggggaacctttccaccattccaccattccacctttccacctttccacctttccacctttccacctttccacgaccatttatagaccactccgtgtaaatccaacccaaaggagccacccttgtttcctgcctgttcagcgggcagacagcagtcgtgtcatgaaagcttgtccagttcctcgcggacgttttggcagcggggatagtctttgccgaaggtgttttcccagatgctcagcacccgggtcagcagttcccgggcggtttttgcgtcgccctgcctggcgcgcagcctgcccagcgaaaagaggtaattggctgtctgggaatggttatcgccaaagtggaaggtatggccgtctattgcctgtttgagcaggggttccgcttcttccaggcgtccctggcgcagcagcacgctgcccagatttccggcgcagaccgccgtgaaccagtgtccctccgggaagaggctttccatcatttccagcgcggcacggagcatctcctcagccttgtccggcctgtccatcagactgtaaagcgaagccaggttgttcatgcggtctgccacattggaattgggtccggggcgtttttcgatattcagcgagcggcgcagcagtttttcagcctgcgggtagcggccggtgtctttgtaaaaacgtcccaggttattcagatagggggagaggcgggggctgcgtggcccgagctgccgggttctggcgtccaccaccttcagatagagcggctcggcatcgtccatgcggtgcatatagtgatagagcagggccagatggaagagtcgttcgatgtgttccgggctgtccccgccccatgcctggcaggacaactccgccgccagcagcatacattcctcaatctttaccatcagcatacggtcccagaagtaatcggacgccatttcatagtaattggcggcttttttgagttcccctgcagccttgtagtggcgggcgatctccgcggaatgctctttgagagcctgttcaaagacggtttccattgcttcggcggccgccaggtgcagctttttaagctccttttcgcggatgctggcatagaccgccttctgtaacaggctgtgggaaaagatgtaaaagagttcgtcggcatcctgccagattttccgtccccccgccttgcccagttgctggatggggttgccttcgagcatgtgggagaggaggacaacattgaagcggaagcccagcacactggcgccgcggacgctttcctgaacctttttggagagccgtgcaatgcgccgggaaatcacctcgtcgatgcctcccgccgccgcttccaagccttcttgcgctatttcgccgtgggggctgagcagcttgttttccagcagataggcggcgagttgttcggcattgaaaggattgccgcccgcgcaggcgtggaaggcggaaaaagcctcgcggggcaggcggggaaggcacagcagattgaggtagagcttgcggctggcgctggagttgagggaacccagggggaggctttccagtccctcttttccgaggctaagctccgcgggcagaatgttgttttcagtccgcgcggtagccagcagaaagaacgggcgcacgccgtgctgccaaagcagttccaggaattggtggctcagggtatcgagccattggatatcgtcgataaagataagcagcggggatttggagcacagccagcgcagatagtccagccacgcctgctgctgacggggcagcctggcttcgggggcgatcccgcgccagggcgagccatcccaggaaaggttcagcagcgaggcaagggcggcttcgcattcctgccccagcctggagcctctggtgcgcttgttccacgcttcgcggaaacgctgcaccgcctgagcgggagcctcgtcctccaaaagccccagactggcacgcagcaactgggttacgatgtccagagggaggggggaatcctgcctgcaagccagcagatacacctgctgccgcggggtttcaaaggcgcgcaaagcttcgcgtgccaatctgctcttgcccactcccgccgctccatgcaccaccattgcctgaggcgaggaggctgccaaaccttcgcgtatcttcctatgcagcagagcggtctccttctccctgccgatcatgcaaagcggttggcaggtaatcaattgtcccggcagcatgccaaggcggtaggctcggggagtagctcttgaggcggcttgctcccttttgagaggggtgaagatgaaggagttgtgctgttggttgcgcaggttgtggtcggcgagggcttcgccgggacgggcgagctccaggagcttctgggcgcgggtgatggcttcgcccgggaagaaggttgccttccacaggtctttgccagctaccatggagaagatatagccggtgcagcaggcggcgcgggctttgtggcgcgtgacggcttccaaagccaggcggcaggcgcgctgcattttattgaccttgttgtggggaaaatcgaagagcaggatggcatacaggcgtttattccgcacatagatggctgctaaaaaggcgtcgtagatcaccgccagcagttccaatgcctggatggttggctccagggggccgtccggaggctcgtccaggctgaggcagcagcaaacgctgtgccggacatcaggtgcgggattgagtctgtgaaagcgggaatgaatgaagtggtggccgtgttgcttgcccaggcgcttcctttccggcgtatccggcaactggggaaagggcggatgcactgcgtgctttccaggccggacatcagacccccagcccagtctgctcagggcttggggagagtaatagggttggttgggccggccggggttttcacgcaggacatccagttggggagaccagaacacatattcaaattgcagtgggttctcaaagattcgccaggacagtgtgccgaaacccacagccaggcggattacatccggcattccatgatgggggctggcgtagctgttgatcgcgctgatggtgtgattgatgcgtgccagcagcgccgcgatctgcaccggagtgctttccggcaacagggcgtggatgcagtttccctcatactggaagagcagtccgcctgagtgcctgatcatgctcagcatcctttcataggcttcggtggcggtggcttccatactgtcaatcacctgccgccgctgcttgagccttattcctttgatattgtaagtggcaatggtgcaaaagcgcagaatatagccggtgatctgcccttgcaggatgttttgctcatactgctgcaggatgtagctgggcaccatgcggttcatatctggctacctgcttttcctggcttgactaagctcctttctgcttacttatcccccaggctcagattggcgaaggcggtgagggtgatctccgcgtccgcgctttccagatagctgacgcgcgcctggtcgcccgcgcgggtgatgggcagacggctgctcaggttgctggaggcaataaagattttatccggcgcttccgccagggtgagatagtagtaggtgcgcccgtccgtggtatcagagccaaagcgggcgatggagcctgtgagggtggcctgcttgtccgctgcctccggcgatatccccgtccggctgccggccagggccatctgatagctgtcgcgcgcgctgcgcacgctttcacccactcccaccagggagaagtcacgcactgaaacgaagctgaacatcttgatcagtccggcgctgtccttgagggtcataaaataggtcggcttgccgttcatgttcaccaggatggggaaggtggcatagtatttaaagttttgcaccttgccttcggcggaacgcatggcggcagtctcggtggcgccggagaccagatagaggtggctgcttttgttgcgggtgtccgtgagcgcaaagcccaccgtcccctcgtccgagcccacgctggtgaggccggagtagaaatagctgcgctgatcgcggccatagatcacgttgtagccgggcgtcacccgcagcaggtcgcgcttgccgaacacgctgttccagaagccgtggacatatttgccccaccaggaaagctggggaagcacaaagtaggaaggctggatgcggtcaacccaggcgggaatcttgctgtcgtcatagatgccgccgctttttttgaggggaaagtatttgatctcacccgtgccggcatgcacgatggcgagtccggtggcttccggggcgttcacgccgatcttgtgggtgtaggtggttatcgtccagtagggttcgccattgtcgtccagttcaaaggtatcgcctgccaggccgatgcccgcgaagccgttccaccagagatggcggtagaggtcttgcccgaagaaggcattgctctgatagcggatttggatgggtttgcctttcagctcgcgcacaaaggtgatatcctgcggattggtggccgagaccttgatgtagcccggggtgcctttgcttgtgttggtgatccacttccagaagccgctgtgcagcagggggcagacccagaagagcttgccatccaccatctggatggtggggttgccgagcaccacccggctgccgagggcaaagtcctcgcccagcttcttggcggccaaatccttggcgaaagcggaatccaggatcggcacctgatccagattgaccggcgccacaaggtcggaaaactcggtcttttccacctcgccgatcatgcggcggtagctgccggaattgaagatgccggaagagaagaagggcgccaggatcagccacagcgccagaaggggatagaccacatagagtatcttgcgcaggcgccggattgccagcagcggagccaggcagatcatcagggggacgatccagtccaaaaaacggatatgcaacaccggaagcacaaagtaaagcataaaacccagcagcagaatggccagcactatggcaggcagggctttgatcctgagcttgggaaactgaatcacgacaggtttgggcgtttgttgttgaaacatggtaacctccctgaactaagctttgttttgatactatgccagatggcggcggatttgtcaagccggaatcgtggccgcctccactggcagaatggaaaaaagtggactcggctcgaacggcaccctatccttgcggatacagaggcgcgaccgcccgctcaaacactccctgaaccttggaaatagccagcccgtaattggtgatcggcactccgcgccgctgggcttccacgatgcggcggctcatctccatctggttgagcatgcaagccccgcagtggatcaccagcgcgaagtcctccagattgggcgggaagtcgtgtcccgcgtacacttcatactccagttccttgcccgtgaactggctcagccagcgcggaatcttcacccgcccgatgtcgtccgcctgcacgtggtgggaacaggcttcggcgatcaggatcttgtcgccgtcgcgcagcttgtcgatctgcctcaccccttccgccaggacgtccagatcgcccttgtagcgggcaaagaggatggaaaaggtggtcatcttcacctcggggggcaggtcattcaccaccttcagcaccacctgcgaatccgtgatcaccagatcaggcggttccttcagggtttgcagggcataggccagttcccgctctttcaccaccgtcaccaccgcgtcgtgatccagcagttcgcgaatcacctgcacctgcggcaggatcaggcgtcccttgggcgcggcgaggtcgatgggagtcaccagcagcaccctgtccccggccttcaccaggtcacccgccagggggcgttcctccagcagatgggcgggcgccagcttgatcagcagttccttggcggcgtcgatgttttcccccttgagggcggagacggagacccagggcaggccccgttcctcgcaccaggcgatattggcgggggcaggctcgcgcagatccctgtggttaaagaccattaaaagcggtatcttcatctcgcggatgcgcttcagggaggacagctcgctctccgcgaaggggcggccatcgttcacaaacacggctatgtccgtgcggtaaagtatcttataggtggcgagcacccgtttttcgcccagttcgccgctgtcgtccagtccggcggtgtcaaagaaggtcaccgggcccaggggcagcagttcatagcgtttgtccaccgggtctgtggtggtgcccggggtgctggaaacgatggcgatctcctgtcctgccagggcgttgatcaaggacgattttccggcgttgcggttacccaacagggtgatgttgacgcgttcaccgcggggtgtgctcatctatcttctcccaaaaagtcttgcggctcgcggccgctaatagcttttattatcagttctttcatgtttctttccttgtcgggctggataccagcccatgtaaaataatatatgtgaaaagcgtaaatctgtcaagcaaagagaattctggcagacggtagccagtgcccaggggtggcaaagtccgtttgccacagagaccggaggtctcttccaaacaggcaactccgttgcctctgccgaacagacttcggcagcccagaaacaaagcacaactgaccaaaaaacgtgtcatcacggcctgcgagccgtgatccagtcttttaaaatatccacaaattacacaaattaacacgaattatcagaagtggaaaggtggaatggtgaaaaggttcccccgtaacaagtcccaccaagctatacaccgtgtcatcacgggaagtcggggccccctctggggtggcttacccgtgatccagtcttttagaaacaaccacccaaccccgaaacagaccatcgcagacaaaaaaaccgtgtcatcccgggcagcgacccgggatccagtcttttcggaacaaccacccaaccccgaaacaaaacataccagaccaacaagcgtgtcatcacgggcttgacccgtgatccagtcttttcggaacaaccaccaaaccccaaaacagaccacgacagacccaaaaaccgtgtcatcacgggcttgacccgtgatccagtcttttaaggaacatccgcgtaaggttataaaaaaacagccaccatttcacctttccacctttccacctcaaaacacctttccaccaacaatccccccatatatataggtgctacgaccccttaatgccaggcgggaagcggaacccagggcaagtatataaatatacttgcccataattgcgcggccatgagctggctgtcctccatttcccctcgcgcgcgggtggctctcatttgcatccgtcgttttggcgtgagtcttccttaggtcatccttataatttataaggatgacctaaggaagatggcttaacctcctgtggcagtgaaggatggcgctatgaaggatattgcggaaggtacaggtttatttatgcggttgtcaaggaattgatgccggttgtttccagactggctggttattttaaaagactggatcacgggtcaagcatgcgcttgcccgtgatgacacggttttggggtttggtggggcttgttttgggctgcgtccacaatcaacacggcaccacgagagtctatctggggctcctttccaccatttcacctttacacggatttcacaagagaatgtcagatcacaaatagcataaaacagcttgatgaaagcgaattggtatgagccgtgatccagccttttagaagcaaccacccagccccgcaacaaaccactatcagaccaaaaagcgtgtcatcacgggctgtcggggtccccgccaaagcgcgcagcggtttggtggggtgacttgacccgtgatccagtctttcagaaacaacggattacaatgatatagataaatgaacgggcagccgcccttccaagtccgataactaaagaaccgccgcgcattacacacggcggttctttcccgcaaatgggttcaaaaggcgtttccgcctcagttcagagcgcttacccgatagaacctgaacgagttgcccgcctggatttcacaactgaccaggccgtcgccggcggtggggtcgtggacggcggatgtcagcacggtaaagggcccggtgggagccggagccgaataaacgcggtaaaatacggcgttgggcacttctgtccacgtcaggttcagggctgaaactccctttgtgaaggaaactattaccggcgaggtcaaagccgaaccctcgccaaagatgatctgcctgccccagacaccgtccagatatggccgccagatgccgatttggtatgggttgacagtttggttggtcaccagattggcgttggcgaggctgccattgaaataccattgcgccgggcccagttcggagaccagttggcagccctgttcggtgttgatggttcccgcgttgcgcacatattgatcggttgtgccgttcaccagtagccggcgaacgccgatcgtcccgtaattatagaggtcgccgcggatctgggtttcaagatatcctccgtgggtatggctccggatcgtgccatagttttccaacttctgggtaacgctgaaggtcgggtaatagttcatataattgaacagggtggcgttattgatgagtgttcccaccgtgacggtccctatcagtgcgaactcgccgtaagtgattatatggtcggcactgacgttttccaggtagacactgttcagattcagggcgccgcttgctccgcccgagatggccgcgttccggatgcttccgccggactggttgagcgtgaaacattcatccgcggcattgtagagattgatctggttgccgctgaaatcgatggtggtgccgctgaacctgaggttggaaatcaatcgggcgggccctgtggaactggaagtaaagttggtgcaggtgatcgccggagcgtccgtgctctgccagaggtggtggatttgcgatcctgccaggtgggtcaggtggttgttgagcgtcccgtaattgtagatgccgccgtaaagggtaagttctaaacgtgctccatgggtatggttccggatcgtgccatggttgtccagccgctccatgacgctcaggtatcctatttggtctattttattatagacctcgccgttgttgatcaggtgtccgacattcaggttgcctgcgatttccaccataccctgcaatacgatctcgtccgccgctgaattcttcaggaagaaaccgtcgtggcaagtgatgctggctccgttgccgcccacgatctgggcgtcctgcagaaacgtcatgccaccatatccatagcagattatatggtggacggaactgccgttcagcacaagggaggcgttgttcatcctgatgctggcgcctgacgagaccaccagatccgtatccaataccaaggggctgccggaataaagatcctctaagaaggtcgggcagaaagtccctgaattgctcagatgctgtgcgttcatcccgctcaggttcagatgccagggtgtcagggagccagaattggtaatggcgttcgccaccgtgaccgtaagggttcccggatagtagccccaacgatagctggtggttgtgccgtgatttgtcaggctgccattgactatgacctcggtttgggagttaccccccgggttcaacaaccatccggtaccactgaccgtcaggttggcgcactgatggggagaacccgtggtgtccgcgtaaacggtgctgttgataactacatcatccccggagttgggcacccttccgccagcccaggccgcggggtcgctccaatagccgccggcatctgaagaatagacggtcagggccatgatctggcccagtaaagaaagtaaaaacaatactgctaaagcgtttttcataataaactcctttggttggctttcatagacaggctgtttaattacgtcaagagaattgttgagcccgtcacgattgactcagggtcttgtcgagacaacaatgcttccaggtcattttgtcaggcataatgccgtccatgctgaatgattcattgttaatgtccgggcaaatcgacagagtgacggggtttgaggttttcggtggcgggtttatatagggagacctccctaatttgattattcccgccctaataatcactcaaagcaaatatcttgacaatgatctttattcataatagaaggtttccattgagcaaatggagcatattatgtacaatcttctttgtgataattgggtaaatgtgatctatctttcgggcaaaccagatagaatatctttagtgcagactcttaaagatgcacacaatctgcaactggcatacagcaaccccatggacaggtttgctgtcttcagattcctgcttgctcttggctactggtgtttcgctaacaccaacgaggcccctgaacctgataagccgcttccggtctcctggataccctggctggaggaaaacaaggagtatttcgagctctttggggatggcccccggttttaccaagacaatccaagttccaggatcagagccattaccgaccttattcatgagataccaacagctcataatctatgccatttcaatcatgtcaccgactatatcgatgggctctgcgaagcttgctgcatcaagggactgctgagattacctgtctttaccactgtcggtggcagagggataggtgcgggaatcaacaacactcctccattttacctgctctggcatgcaaatgacctcgctggcatgctggctcataattggcaaccctgggataatatggggattccggcatggttgggttcttttcaaaaagaaagcaaggaagtgggcttacttgccggaatgacctggctgccgcgcaaggtgcatctgcatgatcccgtcccaggtcaggcagcatgtagttcctgcggcttaccctccgaagctctcgtctattcctgcagcatagaagtggagccagtaccggaaggccttgagtggaaagaccctcatggtgtttacaccgatctgaaaaaaagcctccagtccaaaatcaaactgatgtccaatgatagatacactttcgcggaccgggattggtatagtccgctgttcagctatttgcgcgcggaaggaaactccagaaaaggaaaactctggttggttggatttgccagtgataaagcaaaaagcatagacatctgggacaagatcatcgagtttgagggaactgatacaaatgatgagttgctggctcaattggcaaacagggctactgcccttaatatcatgcgcaagatatctctcagaggtgatttcaaaaagtcagtgggcacaccccagattgctgacattatcccccacgccgaaagcagaattgccatcaatgcgggtaaaatgactgagaacaggggctattcctggcaggatgccgatgctgaatacagagaactgctcacaaaggttgcgtgctctttggagccggctcaaacagtggacgccaggctcaagagaggtaaattcatttcccgcaagccctggccaattataccagaatccaaaacaaaacccgcagagggggaccaaaatgaatagaggaacagttgacttcattacaagcctggagaacctcaaagaaggcgatttgggcattcttagaaaactcaggggagcccggcttgatgaagagcttcccggatttgacctttttacagccctctggtggcctttgcggcaaaagaatcaacgcgcccccaagcgtgaagtggcttggttgatcgccaaactttttgctgaattccgctttgaacagcgcgaggaagccactttgcccatacttatgggaagcatttgccggaaacttggaccaaaaaaggaattaccccgtgtactggcacgttttgatcaacttgcatcgcttgacattatgcatatggaagaaccgctgttggtcatcatgggtattttgcgaaagcaccagcaggtctactttgactgggtagatctgacagatgttctgtcattttgggagcaggagactgtcaaaagagaatggtcggattcatttactaaagcatacaagatcaacaaggaggattcagatgttgattgaaattcatatgattcagaatcacagcccggcaaatcttaaccgggacgacttgggcgcccccaagacctgttatttcggtggagtattacgttcgcgcatctccagccagtgcatcaagcgcagcatccgttttgccccggagttcgcagaccttagaggaggtatccgaacaaggcgtctggcagagaaacttgaggaaatgctggaaaacaaagataagaagctggttgcaaagttcctggaagcctgtggagttaaaaccaaatcttccaagaaagctggaaaaaagtccgaacagatacccgcggaaaccgatgaagctcaggaagagcagcaggcggctgatacgtcggatatgctgatttttaccacctatgatgccctacgccaaatggccgtcctgctttccaactccaatctcggtgaaagtgaaaaactgcttgggtttaaggaactacttacaaactgcgtccattctcctgatatagcactttgcggcaggatgttggagaccaaagagcttaaaaacactggcgtggaatgcgctttgcaggttgcacatgcgctttccacccacattgccaggccggagatcgactactttgtagcggccgatgatgttcctggtgaagacgccggagcgggtcatattggcgaatccatgtttgcctcagcctgtttctacaaatacttctccattgattgggagcaattggtcaagaacctgaaaggagacactcatctggcagcccacaccgtgggtgcctttctcctcgccgctgccaaaaccaaccccagtggcaaacagaacagcttcgccgctcataacttgccagatggcatacttgtcgagttcaaaaattcccctattagctacgccaacgcattcgtcaggccagtttccctggtcaaggattcggacctggtggagcaaagcatcggccagctttccaactacgtgaacgacatcaggcttggctattatgatgagcaatccccagttatcagcttctggttttctccaaacaatcgctattcccttggcaaagagcatcccaaactggcctccaggagcattggcaacctcaatgagcttgtaagcgccgtgttggattatattggcagcttcgagtgggaagaagttcggaaaagcaaggcttatgttggcgggtgacatgagtgctccacccaataccttattcttgcgcttggagggggctttgcagtcctggggcagcaacgaggctaagtttgctttgcgcaggactgccgacgctccgacaaaatctggtgtcctgggactgctctgcgcggcaatgggaattgggcgcgcggaggctgctgattcatggctcccaaaacttgccaacctgcgcatgggcgtgcggatagaccgccccggcatacgctggtgggatttccacactgtgggcgcgggacaaagaatgcgcatggcagagctgaaggcacccaagaaaccttccatggttggagcggccctggctgagaccttgacaccaaacaaaatacaaaccagggcagagactttgctctcacgccgcgaatatcttgccgacgccagttttctggtcgccttgcaaggtgagccggaacttgtggaaaagctctccaccgctctggccaagccggtctgggctatttatctggggcgcaaatcctgtcccccttcacgtcccgtaggcgagcatcctccgggcttttacaacactttggaggaggcgctgtccgcggttcccctgcaaaagcgctggcacaatgaacccctgccgcaaacactgccttgcgtcatggactggattcccagccgtgacggagaacatgcacctgatgacgcagagattcattacgatctgccggtttcttttcagccgcccagacatttgccgcgcttcgtgatcaggcgtgagctgtttgtgggagaggatgtgcaagtgagcagggaaaccggaaccaacgtttggaggcccaaaggaacccgggcggattatagcaattccgagtataagaaggtcagggcggagcggcttgtgatggatcatgccgcgtgcatggtgtgcaaagctcctgccacgacagttcaacacgtggattaccgcagggcgggaggcaaggaagtaccggaagatctgcgggcgctgtgccgcctctgccacgacgcctgcaccatgctggaatacggttccggcatgaccaccgatcgcatcgacccctgcgaccccatctggcgggagcgtattttgtcaaagcgcaaagaaatagtcgagttccgttcgcgcgggcagcgtttccgcaaaatgaaaccagaggaggaagacggatgatctacttgtccaggctattgatcgatactggaggcaatccagaccgcccccgccccggcagaaagtggctggacaatgtctataacgtccaccgccgcctctccatggcgtttccttcaggtttacgccgggagcaggatccgcatttcctgaagcccttttcgccaaacgacttccaaaaaactcccttccttttccgggtcgataacaacatcgacggaaacgataaaagggcgattattatcgtccagtccgttcttgagccggattgggattattgcttccaaaacgcgcttgatttcctggccgcgccgccggaaacaaaggagtataatccagagtttaaagcgggacaactgctgcggttcaggctgcgggtaaacgccagcgtacgccgtcatattcctgaaatggtgcaacaggacggtcaaaccatagaaactggcaaaatcctgcacaaaagggtttctcttacctgggatgcttcttccaccccggatcaggcccttgccgactggctggctgccaaaagcccaaagctgggcttcacccttcagcgctgtgagcttcttcaactgggttgggtttatggctccaagccagaaccaaaaaatgtcaaagtaaaggaacaggggcagggctactggcgtgaacacacatacaatcctctgcgcttccgtgcggctctcctggagggagttctcgaggtggatgacccgaaactgttcctggaaacgcttagcagcggcattggaaaagcgaaaagtttcggctttggcctgctgtcagttctgccaatcaggaatgatggataaagacctgcactctattccccggatcagagaccggcttagctatctctatgtggagcatgccaaaattgaccagaacgggcaagccatcgccattcacgacgctctgggtgaaaccccggttccttgtgccggcttggctatgctgatgctgggaccgggcataaccatcacacatgcggcaatactttcactggctgcctgtggctgtctcgtagcctgggtgggagaacatggcgtcaggttctatgccgcaggcacaggtacaacccgcagcgctgtcaatcttatgaaacaggcaaagtactgggcagacccggttttgcatctacgggttgtacgcgccatgtaccagttaaggtttcaggatgagctttctccagatttaactttgaaccagatcaggggcaaggaaggtgcccgggtgcgcgatacatatttccaactctcccaaaagtatggtgtgcccatgcagggcagaaactatcaaagagacaactggaataaagcagaccccataaaccgggctttatctgtggcaaactcatgcctctacggcatatcgcacgctgccatcgttgctgcaggattctctcccggattgggctttgtccacactggcaagcaactgtcatttgtctatgatatcgcggatctatacaaaatggagatggctgctcccgccgcattccgggcgaccgctgaagggatcggcgaactcgaccgcagagtcaggcttgcctgccgtgatgaattccacaggcagaatctactcaaacgcattgtcgctgacattagttctctcttcggtgatattatgccagaggatagcccggatgactgttttgccgaagaaccagccttgcctggaggactctggtctccagatggagaagtttccccaggcggcatatcttacgggcaggatgatctgccaaaggaagattgatggtggttttggttttggaaaacgtgccaaactccttgcggggtcagatcacacgttggctgctggaagtaaaggcgggggtgtttgtgggtaaagtctcagcaatggttagggacaaactgtgggataaggttagaagcaattgcagcggtgggacttgcctgatgatctggagtagccaggccgaacagggttttgatatcgaattctggggtgccgcatcaagagtcgttacggaatgggagggtatcaaactaatgaccaaacatccttgaactaaggcttgaaggagctcaatgacctgttagctctctattgatcaagtgtattccccacgcatgtgggggtgaaccgaagctccgcgcctccatcatgagccacgttacgtattccccacgcatgtgggggtgaaccgagatctcgctcatccacggctgggtggaagatgtattccccacgcatgtgggggtgaaccgccgctgcagaacatctttggcgggcaactggagtattccccacgcatgtgggggtgaaccgaaccgggtgacgtggctgatgccgatcaaccagtattccccacgcatgtgggggtgaaccggaacagctcaagacgcgcaactacaaggtcgggtattccccacgcatgtgggggtgaaccgaaccgggtgacgtggctgatgccgatcaaccagtattccccacgcatgtgggggtgaaccgcaataaaaagaagcactctacgaatgagatgagtattccccacgcatgtgggggtgaaccgacgcctataccggcccccgcgcccgcgccctcgtattccccacgcatgtgggggtgaaccggtggattaaaaacaattgattctttatcagatgtattccccacgcatgtgggggtgaaccgaaaacgatggttactactgtgttgatagctatgtattccccacgcatgtgggggtgaaccgaatctggctcttgtcggaacctccgcctttccacctaaaaaacacctttccacgaactattaattcgtggataactctaaaagtccaacctgcttcagccccaatatttgcggtcgaggctgcggtattggatggcttcggagatgtggtcggatttgatggcggccaggccttccaggtcggcgatggtgcgcgccaccttgaggatgcggtcgaagacccgggcggaatagcccagtttgtcgatcgcgtgctgcatctggctttggctgggggcatccagcgcgcagtgtttgcgcagcagtttggagttcatctgggcgttgcagaagatgccatctttggcatagcgttcccgctggatggcgcgggcgcggttgaccctggcgcggatgtcggcggagctgtcgccggaaggcaaagacgccagatcggaataggtgaccgagggcacttccacgtggatgtcgatgcggtcaagcagcgggccggagatacggctgcggtagcgttggatggcgccatattcgcaggtgcaggggtgattggggatgctggagccgaaatagccgcagggacaggggttcatggaggcgatgagcatgaattccgcgggaaaggtgaggctttgggaggcgcgggagatagtgacgatgccatcctccaggggctggcgcagcacttccagcacgccacgcttgaactctggcagttcatccagaaacagcactccgcgatgcgccagggatacctcgccggggcgggggaaggctcctcccccgatcagggcgatatcgctgacggtatgatgcgggctgcgataggggcgggtggtgaggatgccgttgtgaaaatctttggagtggcctgccacggagtggatcttggtagcttccagggcttcatccagcgagagttccggcaggatggtgggcacgcgccgggcgagcatggtcttgcccgaaccgggagggccaagcatcagcaggttgtggcctccggcggcggagacctccagggcacgcttgacctgaaactgacccttcacgtcgtgcatatccacgggaaaggcattcagggtggcaaagatctgctcgcggtcgacttctgcgggcggaatcttcgcctcgccgcgcagaaagagggccgcttccttcagcgaggtgaccgggatcacctgcaagccgtcgatgatggcggcttccccggcgttttcccagggcaggacgagggtgtcgatgccatcccgtttggcggccaaagcgatgggcagcactcccttgacggggcgcaggttgccatccagcgaaagctcgccgatgagggcggtcttggtcaggtattccaccggaatctgtttgatggactgcagcacggcgatggcgatggggaggtcgagggcggcgctgtccttgcggatgtccgccggggcgaggttgatggtgaagcggcgcacggcggcgtcccaaccggaattgcgcagggcggcgaagatgcggtcctggctttccttgaccgcgctggatgccatgcccacgatggtgaccccgaaaacctgagaggtggcgtcacactccactgtgagctgttgcccgtctattcctatcgtggtgtaagtgcgcactattccaaccatttgatcctacccttgtttggtattttgcattgtttgtcagtaaaatagcggtcggcgcaacggtcaagggaaaagtgcgggagggggtgttgattgtccacgaattacacgaattattagacgtggaaaggtggaaaagtgttttgaggtggaaaggtggaaaggtgaaatggtgaaatgaggtgtcctgaaacaagtcctcaaccaagctatatactgtgtcatcacaggcaagctcgcttaccacaggatccagtctttttgaataatcatccacaaattacacaaattaacacgaattaaaggaacagaataaggacaagcgtccagcctaaaaacaagcacagaccccaaaacaaacaccccctgactaaaagccgtgtcatcccgggcagccggtgcccctctagggtggctgacccgggatccagtcttttagaaacgtccacaaattacacaaattaacacgaattaaaagacagaataaggacaagcgtccagcctaaaaacaagcacagaccccgaaacaaaccacaccagactacatactgtttcatcccgggcttgacccgggatccagtcttttagaaacgtccacaaattacacaaattaacacgaattaaaagacagaataaggacaagcgtccagcctaaaaacaagcacagaccccgaaacaaaccatacaagactacatactgtgtcatcccgggcttgacccgggatccagtcttttagaaacaaccagccagcccgtaaacaaacaaccccagactaaaagagtgtcatcacggcctgcgagccgtgatccagtcttttagaaacaaccagccagcccggaaacaaagcacccccagactacacaccgcgtcatcacggcctgcgagccgtgatccagtgtccaggggtggcaaagtccgtttgccacagagaccggaggtctcttccaaacaggcaactccgttgcctctgccgaacagacttcggcagccctttaatcacacaacttccacctttccaccaattatccccccacatatataggtgctacgacccctttatcccaggcaggaagcggttttcagggcaagtatataaatatacttgcccgtaattgcgcggcaatgtatcggcctcttccctttccctgcgggtgggtggccctcatttgcatcaccctctccggcgtgggtcttccttaggtcaaccttataatttataaggatgacctaaggatgattagctaagctgttgatggtgcgaatgatagcaacatgggagggacagaaaagtgtatcttggagtttgcccgttgctttccgggctggctggtcgtttggagttcaagccggcaaggaaagctgtatagattcccccaatccaaaagccggctcggacttcaaacgaccttgaaaagactggatcacggctcaagtcaccccaccaaaccgctacgcgtttcggcggggaccccgacaggccgtgatgacacggtgtggagtctggggtggtctgtttttgggctggctgaaaagccttc

SEQ ID NO: 558 - DNA, 21331 bp, Artificial Sequence
  Synthetic Oligonucleotide
tcgtgagcgcgtagttgcccacgagcgatgcgtcgtccgcaatcttccccggctggcggtcggtcggccagtaaccagtcgtccagttaggcttatagaaatacgagccgcgcgccgccttgctcgcttgcttcttcatcgtttccttctgctccggcgtcagcgcgccccaatggatcacctttggttggccgggctttaccgtgggcgacgaaccccagtatatcttcactgtgaaatcgggcatcgcgtcggggttgaaggccccaccctcaaccttctcggcctgcggccggtagaggctgaggtcgagccggttgccctgcttgagcccggccgcaggcgcgatgtaggcgaatgcgtcgggcggcgcaatacccggcgaccacagccgcacatccagtagccgctgcggagcaccgggcatcgcgggcacgttccgcatccctggaatcttcgacaggtctacgcctggcggtagcgtcggcattgccggcatcgcaggcattcccgccatccgcatgaccttggtctctgcgaagatgccgaggtacgcttggtcgccgacagccaacgcgctggtggcggccagcaacaagagcgctaaagttacagccttcctcatcggtgggcctccttatcccgaatcgctatgcctgcggcgcaaccccgctgtagcaacacggtgcagcgcccgcgtgcgggtccacagccgtcttctgcctggtcttgacgcaacctcttgctcagaaaacacagccacacacagcggctaggcgccggtgatagcgttgcccctgccgtccgcccccgaactctacctcgattcattccccgattcgtcccacgaacgctgaagcttaacaggatgaaggcgggcggaggcgcctgagcggcgaagattctgccgggaagatgaacgtcgcaattcggcgccgccggcttgcgcgctttccgccgaaagcaggcttccgtcgtggtttcgctggaagaccaggttacgtacgcaaagctacttgacggctatgagaggccaatggctcggctgtacagagcatatgcagcgtttgtcggtcctcagcaaacgtggggcacgccagggggtgaatcaagtcgcagttccggcgtccctgctctcgattcttgatccctccgcgcgagcttgcgatggtgctcacgcctggcctatccaagcaggccgcgggtttcgatccgccgcctgatgtcttcgacattgcgagttcgtcggattgccgcaacgaagtccggcacggtttccagatctacgcccgtacgctcgacgatctcgtcagcccaatcctcggggaggtttacgcggatgcacatgccgccatcccacatcggccagcccatctgctgcgccaccgccttagccttggcctgctctggctcgaggatgcagtttggcacggtcattccctttcccccgaagacgtcgtgacgtgcgagccgcaaccgacttcgctcccaaatacgctgacatccgcgatccgatacatgcgattcccgagccgaatgatgacgtccgagaggtaaaagcctggcaggccagagcgatcatcgggaatgacagagtcggggcgcttgctgcaaacagaggcgtgaacgggtggacaccgcgtggcgcaagcccgcccgcgcttgccgagcttgcgctgcaagcatgaggtcttcggcgtaaggcatccgtggaggggccggaaccacgtcattagccgtctgccccacggacgggactccggacaaccataggccgtcttcgacgaactgggcaccattgtctccgcacgctcacagtgcgaactgccgatcaggattggtgcttcgggatgggctgcagcggccgcgcttggcagccgccactgcgggctcttcttcgcggcctggcggcagactccttctggcgaatcagtcggcccccactggtgtcgccgacggctactcctcacgggcgcatatcgaagtcccgcggggcggacctgccgtagaactggaggtcggcgaaatcgaggagcgcctgccagtccggtagggtgtgcgcgtgcgcgccgtctcggtaccagatgccgatccgatcccccacccccaggaaacggtaaacctcgcgcgcggcctcgtgagtcagtcgggtgccccgggggctggcccagatgtcgccgcgtgcctccgtgctgagcagcgagcgcggcgccaccgcagccttgagggcgtgctggtcgaagggcaactcggactcccgtccgacatactctttcaggcgggggcagaaccaattcgggaaagaccgaatgatgtcggcaagtcgttcccctccctcatccgggaaccgggagcacccggcgccgcagcagccggagttgttcggcgccgtcagcgcaacccgttcatcggttgcccccgccaggagggcggccttcccgctgcgtgaatgtccggtgacggcgatgcgcgcatggtcaatggtaggcaagtgctgcaagaagtccacgacccgatggtagccccaggcccaggccgccagtgcgccgaagtcgcccccggggaaaactgagcacaggccgcggtcaccggcatcgccgggattgtccggcgccagcccgtcgcggctgaagatcgcgagcgcgtaacctctccgcgccgctacgagtaagaccccatcggcgagatgccgcgagtgtccgtcgcccacgacaaccgggaacggcccggcgccagccggcgtgcagaccgtgagcggcaagctcaactcgccggttcctgctgtcagacggtagtgcgtggcgatgaggccctgctcgcgcgagtatgtggcggaatccaaccggcgggcggccacggccaggggtggcggcaggtgaccatactggatcgcctggagcgcctcgagtaactcggcccgccgcgccggccagtcctcgggcgatgatactcggcggccatcagcgaagagcagcagctccggtaggtcggcggcacagggggtgttagccatgtcgttcaactgatgatctccacctcgggcgatctcgcggaaaccccgcgggtgagttgagttgccgcacgtgcgggcttgcagagcagtcttcgctagcggcggcgaccctccctgcgcgctgagcgtagccagaagctatccccgagaagcgttgagtcggtggtacggccgcgctgtaccgcctgacgtacgtaaggccgcatcggcaggagcctgcgcttggtctgccgtaatgagtgccggcgcgggccgtgtgcacacacgaagcagctgcaacttgacaggctgcgatcccggctttcacgctcagggacgtggagcgaccgtgacgacgttgccgtcagtcgccctggggcgctatgaacagcgacaacctgatccaggtggtctggggtaagacgcaagcggggacaggcgaccgtcacccgctcgtctgtcacatgctcgacgtcggccaagttgcccgggcactggtggcatcccccgcctggaaacatgtcgcgacccgcctgggatcacgccttgggatcgacccccttctagcgccgtcactttgcggcttcctcgcatcgctccacgacctcggcaaggccgcgcccgcgttccaggccaagtggtcgtcaggctggcagagcgtcctcgacgccgggctcttgcccgatcctaacccgccgcgtgacttccaccacggagccgagacctacgcctcgctgcccgcgttgctggaggactcgggcgtgcttcgagttgaagacggcaacttgcaccgactgtgcgaccggctcgcgcaggccgtcgccgcccaccatgggacgttcttgtcaggaagagtgtacgccgaggttcgaccccagggccgggatgccgatggcttcgagacgggctggcgccgggtacgcagagccctgatcgaacgactcgccagtatcttcatcggtgacttcgtgcccgtcacctgccgacccgccaatctctcggctgccggcgtgctgctctgcggaatcgtgatccttgccgactggatcgcatccaatgcagaccgcttcccgcctgcgggcgagtgcgacctcgacgagtatgtgtctgtatcctccgagcacgctcgccgcgcgattgacagcctggggattgtcgcgtccccatccattggatcggcgccgcgcttctcggacctattcccagcgatcaaacccactcggcccgaaaccgcacaccgattccgattgaggcccaccactggttccacgcgaaccccgtcgaagcggcgcgaggacagacgcgggtgtccctcccatcgcaggatcattgagcttgcgacagccctcgcgcctgatcaccaccgcgaacctctcgttctctgccgggccagaaccgcctccttgggccgaactcgcgtgggtacgcgggcgctgagttgcggcgcatctgtaatcacagaaggagtgcgcgaccacaagggcgaacctgggtttgcctgcgtcggccgtgacgcccttggccgcagcgaggccaaggcgccaggaggttcgcccatgagggattcgcctctgctggatatgaacctcgcaccgtgcttcgcccccgtactaccttactggctatctcacctcaccccatcacctgacattggctatcgaggagcaagaccggcatgagctacaacctccttgaggaaaagtggattccggttctgcggagcgatggcaccgcggagcgcgtgggcatcaggacggcgctggtggaggcgggcggcatccggcagatcgcggcgagcaatcccatggaccgcgtggcagttctgcgtttcctccttgcgttgctgtattggtgtaaagggaacccgccagacgaagggagcgccgtctccggcaactcgttccctgcagtttggttctctaagctcgatgacaattgggactgcttcaaccttctgggctatggaaagcggttctatcaggatcgcgacgccaaacgaagccgggcggctacggatctgatccaggagattcctacaggcaacaacttctggcatttccggcactcgatagaccaggaggacggactctgccccgcatgctgcgccatggggctactgcggttgccgctgttttccgtgagcggcctgcctgatctgaagtccggcatcaacggcaccccaccggtgtatgtcgtaccctggggcgtgtcattgctggcgacgcttcaggcaaactgggtgacatacacagaccttggcgaacccgcatgggttcaacccggcattcgcccaactcctggccagggcgtacccctgcttaccggtttgacactgctgtccaggcgggtttggctgcatgagcccggacagtctggcacatgcgttggttgcggagcagaaaatgcggcgctcattcaaacatgcatgtttcagtcggctggcgagcaaaagaacgaccgatggaatgatcctcatgtggtctattcggacgcgacgccacgaaaagcctggaaagcgccagatctgacggcagccggtaagttccggatggaccgcccgtggccccgtctgcttgccagtgtcatcgaaacgggcaagttcggatttagggacaagccaatatcgcttctggtcgtcgggtttgccactgatcaggcaaagaacattgacgtgtgggaacgaaccattgctgcgccatcaacagaatcaactcaaggaacggcggcatcgttgatgcagcaatggcagaaggaggctgaacggctcgggaaaagggtagcgaggtctgaggtcgagggcgcggccaccatcgccgccattcgcccccacgtcgagggcagagtctccgcgagggcgggtgagctcattgccggcacggacgaagcttgggatcgggctgcggcggaatatcgtccgatgatggacgccatcgccaggtctctttccccgggcttcaccgtcgcggcggtcgagcgccggagggagattgccaggacactgccggatatgcggcccagaacaaagtcagctgggaaacctcgccgaaagaaaggaggaaacgagtgaccgcgacggagcagtacgtcgaagccctggcgcacctgaagcctggcgaactggggctgctgcggacccacgcgggacaagatctcgacgaaaccgtggacgggttcgacctgttcgcgggcctatggtggccgttgcggcagacgagcccgcgggcgccgcggcgcgaggtagcgtggcttatcgcaaagctctacgcgtcccgcccaatccctcaatcgcgcggggacacgctcgcgcgccaactgcgaggatgccaaccggctagggatccggcgagacaccgttttcaggatgcgttcgaccggatgctcgtgctcccgctgggcaagattgagcctgcgctgcggcgggcgcttgacgtggttgcatctggagcgaacaagctggattgggtccaactcacggacgatctgtctttgtgggagcgcgaagccacgcgcctgaagtgggcctatcagttcatcggacacaacgaaaggggagaatcatgctgatcgaaatccatgcgattcagaaccacagcccggcgaacctgaaccgggacgacctgggcgcgcccaagacttgcttcttcggcggggtcctgcgctcgcgcgtttccagccagtgcctcaagcgaagcatccgcacgagcgagcagttccagaggttgctcggcggtgttcggactcggcagttggcgcgattgattgccgagcaagtcaagggcaagtccgacatgacgaagcgtgcggaaaagatcctcggaatctgtggatttgctgccaaggatgaggatgctcctgaaggttccgagaagagcaagatgcttgtctacacgacgcgcgaggcgatcggggagatggcaagactcctgcaagatgggaaggcgaagaccgatgcagcgctggcacttgacttcgcgaagctgatccgcgagcgcgtggctgtgccggatatggcactgtcagggagaatgctggagcctgacaagtcagccaaggaggtgtggaagggactcgacacgaccgtagacgcggcgctgcaggttgctcacgcgatctcgacgcatgaggcccgtccggaagtggattactacgttgccgctgatgatatcccgggcgaggacgcaggagcgggctatgtggacgaggcaatgttcgcctccgcctgtttctacaagtacttctcgatccattgggaaacgctggttgacaacctcaagggctacggcgagaagcacgagaagctggcggcccacacggtcggcgcgttcatccgcggagcggcgctggccaatccgacgggcaagcaaaacagttgcgccgcgcacaatccccccgatggaatgctgattgagatcaagagcactccaatcagctacgccaatgccttcgccgacccagtgccgacgaagggcgaacgggacctgatctcgcaaagcatcgcccaaatggcacagtatgtccacgacttggacactgggtacggcaggccacagaaacgcttctggttctcgcccaatctgcgctatcccctgagcatcgcaggcgacggccgtaagcaagtgaaccttgccgagcacaacgtgaagtccctagaggagttggtccccgctgtggtcggcgccatcgggcacgactgggaaaaggttcagaaggtgatcgtcaacccagaggtgcaggcatgagcgagaataccctgttcctacgcctcgaaggtccgttccaggcgtggggcgatcaggagtccaagttcgtcatccgacggacggccgaggcgccgacgaaatcaggggtggtcggcatgctctgcgcagctttgggcgtttcgcggtccgacgccgccaaggagtggctgccgaagctgaccgccctgcgcatgggcgtccgggttgacgtgccgggtgtccgctggtgggactatcacacggtcggcgctggcatgcagatgcgcattgcggaagggcagggaaagaccaagccgggcgccatgctcagcaggcgcgagtatctgtgcgatgcttcctttctggtagtgcttcagggcgaagcggcgctgattggcgaactcgccgcggcggttcggaatccgaaatggacgctctatctcgggcggaagtcgtgccccccctcccggccgctgctggaacatccgtgctgcacgtctctggatctactctcggcggtagcatccgtcccctggcggcggcggctgtccagagatgacgcgccgcaggccgtgggttgcctgctcgattggcaaccgacccgtgaccagcccgaagcgcccgacggtgcgctcgtctggtatgacgtcccgctgacattcgaaccgccgtcgcacggcccccgattcgtcatccgcaaggacttgcgcgtgggtacggacggggaggtgcagatcgcggacaagccagcgcagttgcctaccccggctccggcgcgcccgcgcgcggattacggcaacactcggtataaggcggcgcgcagtgcccgcgttgcggcagactacgagctctgcgtgttctgcaaggcgcccgccgccacggtgcagcatatcacctaccgccgggccggaggcgacgagtcgcaagatgacctgcgctcgctctgccgcctctgtcatgacgccgtgaccatgatcgagtacggcctgggcatgggcctggaccgcatcaacccggaggaaccgcgctggcgagagaagatcatcgagaaacgcgggaagattagcaagttccgttcgctggaaacccgccgtcggcgcctcagcgccgaggaggtggaatagacatgtacctgtcctgcctcttgatcgacgtgggtgatgaccccgaccggccccggcccggcaggttgtggctgcgcaacctctaccacgttcaccaacggttgtgcatggcgtttccatcggcgtccaggatatccgatgatgcggattttctccaacccttcaagccggaagacttcggccgagagccagttcatgtcgctcgaggatcgtgcgccgggtttctgtttcgcatcgacccgcagccgggcggccgggtcgtgattcttatgcagtctgcggtgaagcccgactgggactacgcctttcgcaacgctcgttatctgctggcggctcccccacaggtaaaggcattcgctccccgcttcgcgcacggacagcgtcttcggttccgtctggcggcgaatccgacgcgcaagatcgacacgaagagcggaccggacgggcgtcggcgcaacggacagcgcgtctctgtgccgcccgaccaattccatgaatggctcgctcgccgggctgagccggcggggttcgccatcgacaaggattccaccaccgtccagccgggctacatctatgtgaacaaggcacagaacggcaatgggcaacgcctgcgctcggtccgatacgacggggtactcaaggtcaccgacccaactcgcttccaggagacccttgtgcgaggcatcggccccgctaaggccttcggcttcggccttctatccgtcgccccgctgtagagtgaacgacataaccaaggcatggtaatgagtaacaagcgcatggacgatcttcaccgtctgccgaagttccgcgactgcttgtcgtacctctatctggagcatggtcgcgttgaccagcacgagaagtctatagcttttcacgacgcccagggcatggtgcccattccggctgcctcgctggctctgctcatgcttggcccgggcacctccatcacccatgccgcaatacgcgccttggccgacaacaactgcctgctcgtctggtgcggcgaagagaacgtccgcttctatgcctcgggcatgggcggcacccgcagcgctgcggctctgctccatcaggcccgtctcgccagcgatgagaaactgcgcctccaggtgatcgcccgcatgtaccgcatgcgtttccaggaggagcttccgcccgagaccaccgtcgagcaactgcgaggactcgaagggtcgcgcgttcgcgccgcctatgcccgcctcagccgcgagaccggcgtaccctgggctcgccgcaactatgaccgcaccgactggacggcgggcgatcccatcaaccgcgccctctcggccgccaatgcctgtctttacgggctatgccacgcggccattctctccgtcggtctcagtccggccctcggcttcattcacaccggcaagcaactctcatttgtctatgacatcgccgatctgtacaaagttgacctgaccacgccgatcgcctttcgcaccacctccgaaagcgaggccgatatcgagcgccgcgtccgcctcgcctgccgcgacgctttccgtcagggtcgcttgcttcagcgcatcatccccgatattcgcgaggtccttggcgcgactgatgaaggtgacgtcttggctgacatctgggccagcgatccctctatgcccgcgcaactttgggaaccgtctcacggcaccgtcatcgtcacgccgcccgacacggacactccaccggaggtgacgacatggtcgtcctgatcgtcgaaaacgcgcccgccagcctgcggggcgagctcagtcgctggatgattgagccgcgcgccggtgttttcgtcggcaccatgtccgccatggtcagagataagctgtgggagcgtgtcgctcgcgctggcatagatggcggggctactatgcttcactcatccaataccgagcaagggtttgcagtgcgaaccttcggcagcacctcacgccagatcgttgagatcgagggcctggttcttgtccagcgcagcgacccgtccgcaaacagccgttccgacccgtgaagcaaacgggggtttctgtgttccccacgcacgtgggggtggaccggccgtatcgcgtatgatctgcatggtaaccttgtgttccccacgcacgtgggggtggaccgtcatattgtgattcgcgtggcggctcgtttgtgtgttccccacgcacgtgggggtggaccgcagcacatggctgacaccgcgcgacggtacaagtgttccccacgcacgtgggggtggaccgaaacacgaggatggatttaatcaacaaatcggtgtgttccccacgcacgtgggggtggaccgcagcacatggctgacaccgcgcgacggtacaagtgttccccacgcacgtgggggtggaccggggtgccgacacagataaagatgatgtcgggcgtgttccccacgcacgtgggggtggaccgcagtggtcaagccctcgccgagcgcgaccttcgtgttccccacgcacgtgggggtggaccggtgtggtagccctgacaactaaccatggggaagtgttccccacgcacgtgggggtggaccgaccgttaggcaaatcctggcagacaacctgacgtgttccccacgcacgtgggggtggaccggcgaacctgacggcagggagcagccggagattgtgttccccacgcacgtgggggtggaccgcatgtccgagcatttcacgcgcaatatccagagtgttccccacgcacgtgggggtggaccgacggcgacctgttgaggctcgattcgggcgaggtgttccccacgcacgtgggggtggaccgcgggtaggacgcgtagccattgtcataggcccgtgttccccacgcacgtgggggtggaccggcgaacccaagatcgcagatgccgaccctctggtgttccccacgcacgtgggggtggaccgcaaaacgcgcaccgattcgggcacccgcgcgagtgttccccacgcacgtgggggtggaccgccgtaagccacgcgctgcgcgcagcgcatcaagtgttccccacgcacgtgggggtggaccgcaacgccttcgggtcggggacgtgctcaaagagtgttccccacgcacgtgggggtggaccgtcgttgtatccgcagatgggcggttccggcccgtgttccccacgcacgtgggggtggaccgggggcgaacccatgacatctgccatgacgaaggtgttccccacgcacgtgggggtggaccgtttgcgagcattgggcggcgcgacaaactcgggtgttccccacgcacgtgggggtggaccgcagatcagcggcttcgatggcgggtatgaggagtgttccccacgcacgtgggggtggaccgatgcgcgccgcgacgcaaggcggcctgcgccggtgttccccacgcacgtgggggtggaccgcgaactcggtgagtatcgggaggacaacggaggtgttccccacgcacgtgggggtggaccgtaacgcaacgatcgttcatccccggcatgggcgtgttccccacgcacgtgggggtggaccggacgattcgtcggcgacggcgagcgcgctgacgtgttccccacgcacgtgggggtggaccgataaacgtacgcatcgaggaaaaactggccccgtgttccccacgcacgtgggggtggaccgtttgcgagcattgggcggcgcgacaaactcgggtgttccccacgcacgtgggggtggaccgcggaccggaaaacgcagggcggaaacagcgaagtgttccccacgcacgtgggggtggaccgtgggttcattgcacggaagatcgctatgtttcgtgttccccacgcacgtgggggtggaccgcagttgctgctctcagggatgcgtgagggctagtgttccccacgcacgtgggggtggaccggcgacgcagaaatgatctcagtcatcaccccggtgttccccacgcacgtgggggtggaccgctcgcgcgccttaccgtcgttagtgtaacagggtgttccccacgcacgtgggggtggaccgccggcgaatgtcggccaagcggtggaagcggtgtgttccccacgcacgtgggggtggaccgggaatcgcgcgtagtgcgccggggggccgggggtgttccccacgcacgtgggcgtggaccgtggcggcgcttctgctggcagtcgcagagttcgtgttccccacgcacgtgggggtggaccgcaggccacgccctggctaagcggcggtcgcacgtgttccccacgcacgtgggggtggaccgcaatcgctgggtcgcatccgcagcgacttcgagtgttccccacgcacgtgggggtggaccgacaatgccccctcgacgccaagcgcaaacgacgtgttccccacgcacgtgggggtggaccgtgcccaagtttcgagccgtgattgagaagccggtgttccccacgcacgtgggggtggaccggcgagtggcgcgacccaaccccagaggaggctgtgttccccacgcacgtgggggtggaccggaggggggcgcgactgaatcattgccggcagcgtgttccccacgcacgtgggggtggaccgcattacctacgtctacgccatccttggctcgtgtgttccccacgcacgtgggggtggaccgcatccgaatggcatcctctcgccgcaaccaacgtgttccccacgcacgtgggggtggaccgcgattgatcgaggagggaatcgagttggacgggtgttccccacgcacgtgggggtggaccgatagccaggaccgctgggaaccgcgtcgccgggtgttccccacgcacgtgggggtggaccggcgtacagtcttatggacacggcatggttgacgtgttccccacgcacgtgggggtggaccgttcctcgcgcggttgcctgccaatcagcaggcgtgttccccacgcacgtgggggtggaccgaatgcctcgtccggcagccgcacgtgcccctcgtgttccccacgcacgtgggggtggaccgcgatgaaccacgagttgctctcgctctttgaggtgttccccacgcacgtgggggtggaccggttggcccggatgctcaactctgtttcgactagtgttccccacgcacgtgggggtggaccgcgattggagcacgcccttctcgtccgcgtcgcgtgttccccacgcacgtgggggtggaccgcgcattgaggcgctggaggcggacaatgccaagtgttccccacgcacgtgggggtggaccggtttacctgcgggcggaggatcgcaaactgacgtgttccccacgcacgtgggggtggaccgagccgccgcgcgatgtcactcgcggtaatcgcgtgttccccacgcacgtgggggtggaccgaacgggaccaccgtgtcctcgctcaactcgccgtgttccccacgcacgtgggggtggaccgcaaacgcggaggagaacgagatgtcctatgacgtgttccccacgcacgtgggggtggaccgcaggggcagggaggtgggtgataccatgagttgtgttccccacgcacgtgggggtggaccgttcgacctcgcctaccagcgcgccgccaaggagtgttccccacgcacgtgggggtggacatgcaggatatcgcggcgcgcacccggccgcgaacggggcgccctgggcgcctgtgtggcgcgctcagcacgcgtctacgcctaccgtcgccaactgctcgttccgccgccgtgggcgcccccatgcgcgttgtgtcggcactatcggctgctcttggccttgacttccgcggcgcgaacctcctccctatgttcttatgcgatgttcagcacgcgcgtgaggagggcaacatgaccaagggaggatcagggaaggtagggaggggtaaggttcgggcgagccagcagactcggtcgctgctagccgagttcctggatgcgctcgcgcttgaggggcgctcgccgcattcggtgaagtcgtatcgccgcgacctcgaaccgctgctggcggcgctgccggcccggctcgacctggtgcatcccgccgacctgcgggactacttccgcgaccagttgcaggctggccgcgcgccctccagcatcaaccacgctatcgccgccacccgttccttcttcagcttcctggtggacaatcgcctgctggattccagccccgccatgaccttgcgctccatccgcgtcgggccaagcttggcccccaagcacctgacggtggaggaggtggatcggctgctggccgagccgcaagttgagaacggcgctggtgtacgcgatctggctctgctcgcctttctctacaacaccggcctgcgggtgggggagctgtgctcgctcgaccgcgccgatgtccagttgccgccggacggctgggggcaggtgcaactggtgggcaagggccggcggctgcgctgggtgcccatcaactcccgcgcccgccggacgctcgaggattacctggcccaacgtcaggacgacaatcccgcgctgtttctcaaccgcagcgggcagcgtttctcggtgcggggagtggccttgctggtgaaccggtatctgcggcgcatcgggattaccgaccgctccgggccgcatctgctgcgccacacctttgccactcacgccctgcgagcgcggcacaatctgcgcgcggtgcaggagctactggggcattccagcgtcaccaccacccagcgctacacgcacatggacgccgatgacctgcgccaacaggtggcggagttgccggccaaccggttgcggctgtgacacaccccgccagccgtagcgctagggccggccccatccatagcccgacgcgccagccggccaaggtcttcgcaggcggcgagctcatggcaggcgtcccgcagccatctggcgcccggggtatgtcaggacgacagcggtctcaatcagggctgacaaccacacactgtctccccgcggcgacagcttccgagcattaactgcgatgctcacctggttcgataaaggtgaacgcttggtcgctggcgaaccaagccgaaacaagagggaaatgcttcaccggaggtaatcagctatgcccaaaacagtgtatgtgggaccacacagcctcgtctaccacctcagctccaagtgtcgccaccttatgggggaagccaagcggactacggacgtcgccgcccagaagaagggaatcacgaaggcgtgcagcacctgtcaggcactcgtcgcggcgaaaccgaacaaagggaaagaccctgaagcgacgctgacccctacgaggtggtgatcgagtcgaaggcccggccatatcataggccgggccaggattcccatcccggaaagcattgaacccgcggggacctgaaggcctcgacggtcagcatgagcgagtgtcagcgcggccttcccggtttctccttgggggtcttctgggatcggcccacaacttcgtaacctcccgccgcaggaactatatcgtcgccaactgcgccggtctgatttccaagctctcggccgacctgctcttcggggagcagtcggatttcgtcgtcgcctcggaagacgaaacctgggaggatgcgggctcgccgcggccgagctgaggaagggggactgagcccataagaccagtcttgcctatccggctgattcaccaggacacaacatcctgtaggtcatatgtgcgccataggagcccacctacaagatgctgtaccgtggtgagcggacaggataggcagaagaccagttatggggccagtagacacgaccggcgcggcccaacctgcgcgccgtccaggagctgctcggccactccagcgtcaccaccacccagcgctatacccacatggacgccgacgacctgcgccggcaggtggcggaaatgccagccaaccactgccggcagtgacaagcagagggctgaagctcatttactaccgccgcgccagccggggcgccggccactgcgccagagccgcctacggtgccttccagagaaccttaccgtccctgtcgaacaagaccagccctgggctcccgtcggggagcacgcccaggccggcgcgcgcctcaacggctggagctacgcataatcgggttctcagggtgtaggcgcccgggcgcgcacagcactctcacgtcgcggcaaatggtcgaacggtgcaacccccgtccccctttcatacttgacccgctgccggagctagagagttatcctcgtgccgtctcgcagcctcaccacgactggccgccactccgtccgctggcgccatgccttcgctgtaccaacatgttccctagctacaaacacgcgcacctcgaagggccccttggggtcgtactggggtggtttggccaaccacaaactcgacgccaaagcctccatttccgggcccctcatcggtccgtagaacgcgcccatcttcagatgaacctccacaaggcgcccagactttacggcgatgcgctttatcccctcgcgcagcttctctctgtccgcccagtcaagcatccaccgaggcgcggatgaactgtgggacagcacatctgcgatcttcttatgcccgtaatcgtcagctgcgcgcgacggcgtcgcgccgaaccggttcctcgcgttcgcgttagctcttccggcgcgaagcaactggacaacctccgcgtaccccgccgcggccgctatatgcaagggcgtattgccgttctcgttcttcgcgttaacgctcgcacctttggcaatcaacagccgcaccacttcgacctgaccctccgaggctgccacgtacagcggcgtatcaccccatttgctcttcgcgttaacgctagcgcctgcggacagcaatacctgcgcgacctcagtttggcccgttgcggccgcataatgaagcggcgtctcctgagagtcgtctttcgcgtttaccctggccgcttttgagagcagtactcttgccaaatcggtatgccctgcccaagccgccatgtggagcggcgtcgtggagtctatggcccgggcattaacgttggcccccgaggagagcaacagccgtgccgtgtcgacgcgcccttcgatagcagccacgtacaagggcgtttcgctgacccctgccccggcgttcacattagcgcccttggacaacagaagtcgcaccacttccgaagcaccggctccagcggcctcgtgcagcggtgtgtggccccatgcgtccttggcatccaaggcagcgcctctagagatcaagagatccgccacatccccgtgtccgtcgcgggctgcgcaagctaagggggtttcccgtccccacacgcgaacggctctctcctgggcaccgcgaagctctccggccgccgtcaaagcctctgccattcggtcaggcggtaagttaccaccgctataaagaaggggttcggtgttctccttgtccttggcgttgacgcttgctcccttggttagcaggaattgcacgactgccgtctggcccgccgccgccgcgacatgcaaaggtgtcctcccgcggccgtcaggctgctccaggaaggccgggtttctttctaggagactgcgaacaagcgccacgtctccgcttgacgccgcagcgtggatgtcgccccgccgcccggcgcaccccgccgcgacgatccccgccagcaccacacacacagccaccagcaccgcccacttgaccttgctcatgctcctgccctccttgtcagcttatcaccacgcccccgccagccgcagcgctctaagccgccatggccaccgcggggcttcaacggcggtcgtaggcttattggcagaccgctgccgacggtcagtgcgctacggagcgttccagagaacccggccgtactggtcgcataacgccaacaccggacttccgtcggctcggagggagaaggttgcacgcatcttgccgtttgcgtcgtttaggtctagccaggggctcccgtccgcgagcaccccgagaactgcggccgccttactctgtccgtgcgacaaaacgagcgataggctgccgtcgtctaggaccccaaagagcgcttgtggtttgccgtccgggccgttcaacgcgggcaccgggctgccgtcagtatccacggaaagggcaatgcgcgtcttgtcatccgtgtcgagcaagtgtagatgcggggtgtcgcccaccacccccaagaccacccgtaacttaccgtttcggtcattaaactggagccccggactcccgtaggacgatggacccagcacagcgcgggcaacgccctcgggactcaccatctcaaatcgctcagctcgcaccaccttcgctgccggctccgtcgccgccaggcatacgaaaccggcgactaccgctgccaacgccaacaccccagtcttgagccgccggttcgcttgctccagccgctcgactcgttgctccagcgctgctacgtccacgggattctccttttcgtgggttcccggccttcgcgttctcatactactgtcggctgctccaacgcccattcgtcctaccgttcaacgaccgcgtcccgcgcgcagcgaaagccgtagcaatcccatctctcggtgggacggtcactgcgcctggacgcgcaacgcgcgaaggccgggtctatcatccgccaactgccgccgcgaatgactcgcatggttccactggcaggcggggtcagatcgccccgagcgtagcgcagataagccgccttgtcgtaccaatcggcgcaccactccgacgcgttacctgccatgtcgaagcacccgtatacgccagcatcggtcgggtaggaacccactaccgccagaccgtcctccggcacgtggtgcgtgcgtagccatgggcctatcgccgcatcccaaacctgcagtgttgcccagctgcggccggttacgacttcggaactccggcacagccctttgtcccacttgttgccccacgggaagaaacgtccgtcggtgccgcgcgccgccttctcccattccaactcggtcggcagccgcagcccagcccattcacagtacgcgcgcgcatcatgccaatccacggtcaccgcaggacggctctccaggcccttcggcagatccttaacccaccagtcccatttggcaatatccgtaccgccgcgacggccagtcgcctcgacgaaacgctgatactgcgctccggtcacttccatgcgtcccatccagtagccggccagccggacgcagcacggtggctgttcgccggagaatgcctgcgccgtcgaggtgagcgaccacggattgccttggcgccacacttcgacgtccgcatccgaggtgcccagagtaaactcgccgggtggaacgtacaccaacgccatgccgtccctgggattcacccagacatccccctcctcagggttcgagggcggacttggcgtgcgccaaatgaccgcatggggattgcactggggaggtggtaataccggttcggtcgagcggtttgctgccgctgcggtgaggcggatggggactaggcagagaacagcgagcacgagaatgctagggtaactgtgcttcttcctggccatcgcaccctccttcgacggctcgcactgaaggatgcttccgcgtggaaaccggcgtccctgctcggaaatgtgccggcggtggtctgccgtcgctgccgcttgtcatcaaccgtgacctgagtgcttacgccgcagcactgcaggagccacacactctccgatcgggcatcctgctcaaggtcgcgttccgcacgctgcaaccagaggagcaagatgcgaaggtaaggatctgcgcgagcaagtgccagataagccggcgaaccgccctcctcggtagggaaagcggttcgcctgtgcgtgcggcggactggttggtggaacgcgattacttcgcctgctcctcgaacacctccatcatccgcaccagcagcttggagagggtcatctcctgtgccgccgccagcgctcgcagccgctgggccggctctcctcgcagcgcgacggtcgccatcggccccgcagcgcgccccgtttgcgcgacgttgcgctcagggcgcttggtttgcccatcggcggcctgtgccggcggctgctcgccttgcgccgccgcttcggcatcgagcatcttccgcgtctccgccaccagcgtggcctcgtgcttcttcagcgcggtctgtttggcggtcacctcggctagctgctcctcgcgcttgtgccgtcgcgtctccgcgcccttcttcgccgcttcgttgcgcgcggccagtcgctgctgagtccgcttctccaccgctcggttctgctctgccttggtcatcctgtcttcctccggtgagtcatattgtgccggcaatcaagccgaccgacataccccctcactcggacccaccggattatgctgcgcgagtgattatgtagcggtcggccacgtgccaccttgtattcacgctcgattcgacgagaaagtcgaggcctttacacaacataatcctgcgctccatgatggactggggc

SEQ ID NO: 559 - DNA, 20944 bp, Artificial Sequence
  Synthetic Oligonucleotide
cacctgttccccgatgccgaactacacaattcgtctgaaacacaccacccagaccaccctgaccaccacgttcgaggatggggactaccagaccgtgtacacgcaggcagagttcatgcccgtggttggctggaacacccacaccttctcgactcccttcgtctgggacggcacttcgaacattcttgtcgatatctacaccactctcgttactgggaactacacccgtaatgcttctgtttattactcctccaccactttcaatagtgccctgcgctaccaaagcgatagcagcgatgccggttccgccaccactggaaccaccggcaccaaccgttcaaacgtcaggttcaacatggaatccgttgtggtgaccgatccgcccaaccctgcgcagatcgtctcgccgcttgacggcgctgtgaacgtgatgacctccgccaccctcaactgggcttccggaggcggcgtgccctcaggctacaaagtgcatttcggtacaaccaacccaccccccttcatccaaaacaccactgaaaccgactatgcgcccaccaacatggaactcaccaccacctactactggcagataattcccttcaacgtcatgggtgacgcgacaaactgccccgtatggagcttcaccacgggtggaccggtagtactcatgtccaacggcactcagaatgtgccggatggaatgacctattctttctatgattccggcggtcccgacggcaactatcaaagctctgagaactacaccttcaccttcacggctaccaatccctcctcgatcatccacgtgttgttcacggaattccatacggaaagcggctgggatttcctgaaggtctataacggaccggatacctccgccccgcagatcggacccgctgccggctacacaggcaccactctgcctgaagagatcatcggctccaacgctgtgactttcgtattcacttccgacagctcttacacgtatagcggatggtcagccgcggtcagcgcggtggacctccaacacgatcttggcgcgcagagcatttccggtaacaccactccctcggtgaacagtcccagcacctatacggtggcggtgaaaaacaacggcgccaacaccgaaaacacctacactgtgaagctgatgggcaccggagatgtggaactagcatccattcccggcaccaccatcgctccccagcagaccatcgactttggccttacctggactcccacagcccccggcgcgatgcagatttggggtaaagtggtgcttgccgacgatggcatagccaccaacaaccaaaccctgcctctaaacgtgaccgtgcagcaggaagggattgtggctgttactatcggtgacggtagcgagactgctcgcattccggttgactttttctggaaaaacagcctgtgtgagacgatatatcccgcaaccgacatgaacatcggcggcttgatcaccggcgtgcagtattacaacaccttcacttatgcaaacaacttgatggcaaaacccaccaagatctggatgggcgagatcgccgacgctgacctcagcggaggatgggttccctccaccagcctcacatcagtatttgacggcaatgtggactatcctaccggacagaacgacatcaacatcacactgcagaccccatatgtttatagcggcggtaatctcgtggtgttggtgcagcgtcccatggacaccgattggttcagcggggtcaacttcctcgcccagaccatcggcaacgcccgctgcctgaatgtctattcagatagcaccccctacgatccggcctctcctccctccaacaccactccctccggaaagttccctaagaccactttcttcctggtcgtggacgacatgggcgcgctcaccggtacggtgcgtgacgcgaacaacgttgccatgcccggcgctacggtttctatcactggaacacccctcaccaccctcaccgacgccaacggcgtttacaacttcccctacgtggcgatgggaccccagagcgtcgtggccaccaaacacggctacaacgtcgttacccacaacgtaaccatcatcgaagatgaaactgtcacccaggacttcgtgctcacccaactgcctcaggtcaccgtgaccggccgcatcgtgggcagcgaccaacccacagttggcctggctgacgccaccatcagcctcacaggttacgagccttaccaggctacaaccaacgccagcggccaattcaccatcactggcgtctatgccagccagacttacgaatacaccgctcaagccatcggttaccaagctgccatcggccaagccgtggttggcaccaccgacctgaacatgggcgacatcaccgtgaacgaactggccttccctccctgccaagtggttgccacagaagcagcggactattcgcacgtaaccgtcacctggatggctccggatcccaatgctcagggtatctccgaagactttgaggaatacgaagacttctccctcaccttcgatccctgggttctggtggacgttgatcaaagcggcacttatggtatgaccggctacacttggccgaacgtctattcccccatggcttacatgatcttcaaccccagcgctgccactccgccggttaccactattaccgcccacagcggaaacaaaatggctgcctgcttcgccagcactgatgctgtcaacgacgattggctgatctctccgccgatgatcgcgaccgcaagtcagttcctgaacttctacgcgaggtcctacagcgatgcttacggcctggaacgcttcaaagtgggtatttccaccggcggcactgcccccgcggacttcaccatcatcagcggccccagctacatccaggcgcccattgaatggacactgtacagctatgacctcagcgcttacgctggccagaacatccgcttcgccatccagtgcgtttccgacgacgccttctacttcgtggtggacgatgtgagcgtgggccccgttcctacagccaaggaacactttgcctccgcttcctccttcagctcccgtaataccaacacccagagcttctccaccagttcaattgttaccagaagcattggaaacgcggcttcggcatcccgcaacgtgggaaccagccatgccaataacccccgtattcaggtaccagacttccagatgttcactccttccaattcggaccgcgtacttggtggatacaaggtctatcgcctgcttgctgacaaccaggacaacgagtcactctggacgaccctgaccccatctgtcattcccagcactaccaccacctataccgacaacgcctgggccccgctgccttccggcgtttacaaatatgcagtcaaagctgtttacaccaacaacgtcctgtcccccgccgtcttctccggtgagatacacaaaggcatgatgggcaccctgaccggtaccgtgaccgaattcggcaccaacgtcccgatcgaaggagctaccatcaccgccggcgattacagcggcacctccgacaacaacggacattattccttcagcgtctatcagggagtttacaccgtcacctgctcgaaagtcggctatcaggccgcttcccagaccggtgtgagcgttaccggactgcaaaccaccacccaggacttcgtactcacagagatcaccctgcctccttgcgcggtggaagccgtggcagtgagcaacagcttggtcaacttgacctggatggagcctggcactggcggcggcgaatggatctactacgacaccggcgaaaacgatgacagcatcggcctcgtctccggtggtgaattcagtgtcgccattcgtttcccgccctccgctcttaccgactatgccggcatgagcctccacgccatatccctcttcccaggcgatgtgggcacctactccctgcgtgtctggaccggtggcaccgccagcgctcccgaaacccaggttgttgaccaacccttcaccgtgcaagccgtagacacgttccaaaccgtggttttggataaccccgtgcttatttcaggcaacgaggaactctggtttggctacaacgtcagccatgctgcgggcgcctatcccgcaggctgtgacggcggccccgccaccaacggcttcggcaacatgatctacaactccggtgaatgggcaactctgaccgacctggctccgagcctcaactacaactggaacatccgcggctacgtgggatattcagctcccaacgatgtgtgcgcgatcgatcccagcatcctcaaacacatcccgtccgacaacatcaaagccagcaaagacatcagtgcctgcaaagacaacgaccgtgtcctcgtcggctacagagtctggcgcttgctgcaaggccaggaaaacaacgattcagcctggactcagctcaccaccggacccatcaccgcgactgcctggccggacaacggatggggcggcgtgcctgacggctggtacaaatgggctgtgaaagccatctacaccggcgaagcgcaatccctgccagccttctccaatgctgtgcagaaacttacccagatcggaaccattgccggtatcgtccgcgatatggccaacgcccccatcatgggagcaaccgtatcttgcggcgacgtgactgccaccaccaacgccagcggagcctacagcatgcaggttcccgcgggcacctggagcgtaaccgccagccacccgaactacacacctgtcacccaggacggagtgattgtcgttaccaaccagaccaccacggtgaacttccagctgccgatcagcaatgtgctgctctcggacggatttgagtcctacgaaaacttcgttatcgaattcgcgccctggaccacggttgacgttgacggcagcgcgacctatggcatgaccaataccacctggcctaacacccaaacaccacaggcctacatcatcttcaatcccagtgccaccactcctcccgccactaccatcgtacctcacggaggagataaaatggcagcctgtatcgccgcaactacccctcccaacaacgactggttgattactcccgtactccacaatccgctggaacttcgcttctgggcacgctccctgacggcgcagtacggaggactggaaaagttcaagatcggtgtctccaccactggaaccaacccctccgacttcaccatcatcagcggcagcactcccctcgaagctccccttgattggacagagtatgtgtataatctcagcaactacgatggtgacacctacgtgggcatccagtgcgtgtcccatgaccactggatcttcatgctggatgacttccatatcaccggcagaactgacagcgacgatcctatcgtccctgtggtcgccaccgagttgcacggaaactacccgaaccccttcaacccggaaaccaccatcagcttcagcgttaaggataaaggccacgtaaaggtcaatatctacaacgtgaaaggccaactggtgaagaccctcgtgaacgacaacatgaacgccggcaagcacaccattgtgtggaacggccgtgacaatgctggtaaagctgtctccagtggcgtctacttctacaagatgagcgctggcaaatacagcagcaccaaaaagatgatcatgatgaagtaattcatcgggatataacctataaccaagccccgggaccgaaaggttccggggctttttctactctcctgaaaagaacgtggatgacaggatcgactggatctttgaaggtggaaaggtgaaaaggtggaatggtggaaaggttcccccgaaacaagtccaccaggctatatactgtgtcatcacgagtggggtggcaaagtccgtttgccacagagaccggaggtctctcccaaaaaggcaactccgttgcctctgccgaacagacttcggcagcccttaagttatctgcgtatatctgcgtgaaccgcgtgaaccacttgaaccttgattctgtcttttcaagtcccaaacaagcacccagaccaaaaacaaccggcatcaattatttgacaatcgcattaaatatccaacacattccgcaatatgcttcatagcgccgtcccttgctgctactggctttggagtcatcatccttaggtcatccctcaccgggttaaggatgactgccggatgacccacgccggagaggggaatgcaaatgaggcccatccctctataatatataggtgctacgataggtggaaaggaggacttcgtggtgacgtggtgtcgtggtaacgtggtgctgtcggaaaagagatagaacgcggatgacaggatcgactggatctttgagagtggaaaggtgaaaaggtggaatggaggaaagtttcccccgaaacaagtccaccatgctatatactgtgtcatcatgagtggggtggcaaagtccgtttgccacagagaccggaggtctctcccaaaaaggcaactccgttgcctctgccgaacagacttcggcagccctggtccgaaacctccccccataatactaatccgcgctcatctgcgcctttatccgcgtatatctgcgtgaaccgcttgacccgggatccagtcaccccagaggagccacccccgtttcccgcctgttcagcgtgcagacagcagtcgtgtcaggaaagcttgtccagttcttcgcggacgtttttgcagcggggatagtctttgccaaaggtgttttcccagatgctcagcaccctggtcagtagttcccgggcggtgtttgtgtcgccttgtctggcgcgcagcctgcccagagagaagaggtaatgggctgtctgggaatggttttcgccatagtggagggtatggccgtctatcgcctgcttgagcagtggttccgcttcttccaggcgtccctggcgcagcagcacactgcccagatttccggcgcagaccgccgtaaaccagtgcccctgtgggaaaaggctttccatcatttccagcgcggcgcggagcatctcctccgctttgtccggcctgtccatcagactgtagagcgaggcgaggttgttcatgcggtctgccacgttggaactgggcccggggcgtttttcgatattcagcgagcggcgcagcagtttttcagcctgctcgtagcggctggtatctttgtaaaagcgtcccaggttgttcagatagggggagaggcgggggctgcgtggcccgagctggcgggttctggcctccaccaccttcagatagagcggctcggcatcgtccatgcggtgcatatagtgatagagcagggccagatggaagagccgttcgatgtgttccgggctgtccccgccccaggcctggcaggacaactcggctgccagcagcatacattcctcaatcttggccagcagcatgcggtcccagaagtaatcggccgccatctcatagtaatgggcggcttttttgagttccccggcggctttgaagtggcgggcgatctccgcggaatgctccttgagtgcctgttcaaagacggtttccatggcttcggcggccgccaggtgcagttttttaagctccttttcgcggatgctggcatagaccgccttctgtaacaggctgtgggaaaagatgtaaaagagttcatcggcatcctgccagattttccgtccccccgctttgcccagttgctggatggggttgccttcgagcatgtgggagaggaggacaacattgaagcggaagcccagcacactggcgccgcggacgctttcctgaacctttttggagagccgggcaatgcgccgggaaatcacctcgtcgatgcctcccgccgccgcttccaagccctcttgcgctatttcgccgtggggactgagcagcttgttttccagcagataagcggcaagctgttcggcattgaaaggattgccgcccgcgcaggcgtggaaagcggaaaaggcctcgcggggcaggcggggaaggcccagcagattgaggtagagcttgcggctggcgctggagttgagggagcccagggcgaggctctccaagccatcttttttgacggcaagctccgcgggcagcctgcccttttccgtccgggcggtagccagcagaaagagcgggcgcacgccgtgttgccacagcagttccaggaattgacggctcaggggatcgagccattggacatcgtcaataaagataagcacaggggatttggcgcacagccagcgcaggtaatccagccaggcctgctgctgacggggcagcctggcttcgggggcgatcccgcgccagggcgagccatcccaggagagattcagcagcgaggcgagggcggcttcgcaatcctgtcccagcgaggaaccgcgggtgcgcttttgccacgcttcgcggaaatgctgcaccgcctgcgcgggagcctcatcctccaaaagccccaaactggcacgcagcaactgggatacgatatccagagggaggggggaatcctgcctgcaagccagcagatacacctgccgccggggagtctcgaaggcgcgcaaagcttcgcgtgccaacctgcttttgcccactcccgccgttccatgcaccaccatcgcctggggcgaggaggccgccaaaccatcgcgtatcctgctatgcagcagagcggtctccttctccctgccaatcatgcaaagcggttgtccggtgatcagttgccccggcagcatgcccagacggtaggcgcggggcgcggcttttgaggcggctttttcccttttgaggggggtgaagatgaaggagttgtgctgctggttgcgcagcttgtggtcggcgagggcttcgccggggcgggcaagctccaggagcttctgggcgcgggtgatggcttcgcccgggaagaaggttgccttccacaggtctttgccggcagccatggaaaagatgtagccggtgcagcaggcggcgcgggctttgtggcgcgtggcagcttccaaagccaggcggcaggcgcgctgcattttgttgaccttgttgtgggggaaatcgaagagcaggatggcatgcagccgcttgtgccgcacatagatggctgccaaaaaggcgtcgtagatcaccgccagcagttccagcgcctggatggttggctccagggggccgtccggaggctcgtccaggctgaggcagcagcaaacgctgtgccggacgtcagccgcgggattgagtctgtgaaagcgggaatgaatgaagtggtggccgtgttgcttgcccaagcgcttcctttccggaatatcaggcaactggggaaagggcggatgctcggcaagtttgccaggcctggcatccaactcccagcccagtctgttcaatgcctggggagagtaataaggttggttgggctggccggggttttcacgcaggacatccagttggggagaccagaacacatattcaaactggagggggttctcaaagatgcgccaggacagggtgccaaaacccacggccaggcggattacattcggcattccatgatgggggctggcgtagctgttgatcgcaccgatagtgtgattgatgcgtgccagcagcgccgcgatcagcaccggagtgctttccggcaacagggcgtggatgcagtttccctcatactggaagagcagtccgcctgcgttcctgatcaggctcagcatcctttcataggcttcggtgaaagttgcttccatcctgtcaatcacctgctgccgctgcttgagccttactcctttgatattgtaagtggcaacggtgcaaaagcgcaggatatagccggtgatctgcccctgcaggatgttttgctcatactgctgcaggatgtagctgggcaccacgcggttcatatctggctacctgccttgcctggcttaactataatctcctttctgcctacttatcccccaggctcagattggcgaaggcggtgagggtgatctccgcgtccgcgctttccagatagctgacgcgtgcccggtcgcccgcgcgggtgatgggcagacggctgctcaggttgctggaggcgataaagattatatccggcgcttcggtcagggtaaggtagtagtaggtgcgtccatccgtggtgtccgagccaaagcgggcgatggagcctgtgagggtggcctgcttgtccgctgcctccggggatatccccatccggcttccggccagggccatctgatagttgtcgcgcgcgctgcgcacgctttcacccactcccaccagggaaaagtcgcgcactgaaacgaagctgaacatcttgattagcccggcgctgtccttgagggtcataaaataggtcggcttgccgttcatgttcaccaggatggggaaggtggcatagtatttgaagttttgcaccttgccttcggcggagcgcatggcggcagtctcggtggcaccggagaccaggtagaggtggctgcttttggtgcgggtgtccgtgagcgcaaagcccaccgttccctcgtccgaacccacgctggtgaggccggagtagaaatagctgcgctgatcgcggccatagatcacgttgtaaccgggcgtcacccgcagcaggtcgcgtttgccgaacacgctgttccaaaagccgtgcacatatttgccccaccaggaaagctggggaagcacaaagtaggagggctggatgcggtcaacccaggcgggaatcttgctgtcgtcatagatgccgccgctttttttgaggggaaagtatttgatctcacccgtgccggcatgcacgatggcgagtccggtggcttccggggcactcactccgatcttgtgggtgtaggtggtgatggtccagtagggttcgccattgtcgtccagttcaaaggtatcgcctgccaggccgatgcccgcgaagccgttccaccagagatggcggtagaggtcttgtccaaagtaggcgttgcgctgatagcggatttggatgggtttgcctttcagctcgcgcacaaaggtgatatcctgcggattggtggccgagaccttgatgtagcccggggtgcctttgcttgtgttggtgatccacttccagaagccgctgtgcagcaggggacagacccagaaaagcttgccatccaccatctggatggtcgggttgccgagcaccacccggctgccgagggcgaagtcctcgcccagtttcttggctgccaaatccttggcgaaagcggaatccaggatcggcacctgatccagattgaccggcgccaccaggtcggaaaactcggtcttttccacctcgccgatcatgcggcggtagctgccggaattgaagatgccggaagagaagaagggcgccaagatcagccacagcgccagaaggggatagaccacatagaggatcttgcgcaggcgccggattgccagcagcggagccaggcagatcatcagggggacgatccagtccaaaaagcggatatgcagcaccggaagcacaaagtaaagcataaaacccagcagcaggacggacagcactatggcaggcagggctttgatcctgaacttgggaaacttgatcacgacaggtttgggcgtttgttgttgaaacatggtaacctccctgaactaagctttgtttttatactctaccagatggcggcggatttgtcaagccggaatcgctgcccgcctccaatacagaatggaaaaaagtggactcggctcgaagaccgctcctatccttgcggatacagaggcgcgaccgcccgctcaaacactccctgaaccttggaaatggccagcccgtaattggtgatcggcactccgcgccgctgggcttccacgatgcggcggctcatctccatctggttgagcatgcaggctccgcagtggatcaccagcgcgaattcctccagattgggcggaaagtcgtgtcccgcgtaaacttcatactccagttccttgcccgtgaactggctcagccagcgcggaatcttcacccgcccgatgtcatccgcctgcacgtggtgggaacaggcttcggcgatcaggatcttgtcgccgtcgcgcagcttgtcgatctgcctcaccccttccgccaggacgtccagatcgcctttgtagcgggcaaagaggatggaaaaggtggtcatcttcacctcggggggcaggtcattcaccaccttcagcaccacctgcgaatccgtgatcaccagatcaggcggctccttcagggtttgcaaggcataggccagttcccgctctttcaccaccgtcaccaccgcgtcgtgatccagcagttcgcgaatcacctgcacctgcggcaggatcaggcgtcccttgggcgcggcgaggtcgatgggagtcaccagcagcaccctgtccccggccttcaccaagtcacccgccagggggcgctcctccagcagatgggcgggcgccagcttgatcagcagttccttggcggcatcgatgttttcccccttgagggcggagacggagacccagggcagtccccgttcctcgcaccaggcgatattggcgggggcaggctcgcgcaaatccctgtggttaaagaccattaacagcggtatcttcatctcgcggatgcgtttcagggaggacagctcgctctccgcgaaggggcggccatcgttcacaaacacggctatgtccgtgcggtaaagtatcttataggtggcgagtacccgtttttcgcccagttcgccgctgtcgtccagtccagcggtgtcaaagaaggtcaccgggcccaggggcagaagttcatagcgtttgtccaccgggtctgtggtggtgcccggggtgctggaaacgatggctatctcctgtcctgccagggcgttgatcaaggacgattttccagcgttgcggttacccagcagggtgatgtttacgcgttctccgcggggtgtgctcatctatcttctcccaaaaagtcttgcggcttgcggccgctaatagcttttattatcagttctttcatgtttctttccttgtcggactggataccagcccatgtaaaaataatatatgtgaaaagcgcgaatctgtcaagcaaagagaattctggcagacaggggcctgtgtttttgatatatccacaaattacacaaattaacacggattaaaagaacagaataaggacaagtgtccagcctaaaaacaacaaccagaccctgaaacaaaccgccaccaagccctaaagccgtgtcatcccgggctgtcggggtcaccgccaaagcgcgaagcggtttggtggggtggcttgacccgggatccagtcttttaaaaacaaccagcaagccccgaaacaaagcacaacagactaaaaaccgtgtcatcccgggctgtcggggtccccgccaaagcgcgaagcggtttggtggggtggcttgacccgggatccagtcttttagaaacaaacgcgtaaggttttaaaaaagcaggcacctttccacctcaaaacacctttccacaaattctccccccatatatataggtgctacgaccccttcatgccaggcgggaagcggatcccagggcaagtatatatatacttgcccgtaattgcgcggccatgggctggctgccctccctttcccctcgcgcgcgggtggctctcatttgcatccagcgttttggcgtgagtcttccttaggtcatccttataatttataaggttgacctaaggatgatggcatcaaatccagtagcagcaaaggagggcggtatgaaggattatgcggaaggttgtggtatttttgtggaaaggtggaaaggtgcccccgaaacaagtccaccaagttatattttgtgtcatcacgggaagtcggggccccctctggggtggcttacccgtgatccagtctttttaaaagaaacatccacaaattacacaaattaacacgaattaaaagaacattaaagagtcaacacacccgactccggaacaaaaccctccagactaaaaaccgtgtcatcacagcctgcgagccgtgatccagtgcccaggtgtggcaaagtccgtttgccacagagaccggaggtctcttccaaacaggcaactccgttgcctctgccgaacggacttcggcaacccttatattacaccaatccgtgtcaatctgcgccctttatccgcgtttatctgcgtgaaccgtggaacccgggatccagtcttttggaatgtttgaacttcgctgaaaacatttttcgctaccaggaatgaaaactggacaacaaacgcagcttgggatatctgacactaagagtgtaattcacacgatcaataagaacatagcgtgctgtgcatacaaaacatattaccgacggacttctgttctgaaatatggacgttttgaacttggtaaacagtccgtatatggactaccagctgggacttgccattaggcatatgcccgaatgtaaagctatattcttatataacgcattgtagacagcacaggttgttctctgctctttccatattacactagtggtcatcatttcaccagtaggggtttttttacgcttttttcccgggagttttcatgtaaagcaccctactggacaaagagatgggagccggaaaacacagcctgaactgggacggcaccgactccaacggcgcccaactggcaagcggagtctatatctaccgcctcagcaccggaaagacgagcgccagccgcaaaatgatattgctgaagtgacggacagccgcccttccaagtccgataattaacttgaaccgccgcgcattacacacggcggttctttccaacaagccaagtatcagcagcgggaaaactgcgctgaaaaagccgctggtggggctccgtaaaatgggagtggaagccgccgcatggaacaccttgaaagtaacaagataccgccccaaattgatctttcctaacccaaaatccgcaaagcaaatttcttgacaatgatctttggcttaaatataaggttcctatcgaacaaaaggagcatgttatgtacaatcttctttgtgataattgggtaaacgtggtctatctttcgggcaaaccagatagaatatctttagttcaaactcttgaagacgcacactgtctgcaactggcatacagcaatcctatggaccggttcgctgttttcagattcctgcttgctcttggctactggtgtttcgccaacaccaacggggagcctgaacctgataagccgcttccgacctcctggatatcctggctggaagaaaacaaggggtatttcgagctttttggggatggacagagatttttccaagccgatcccagttccaggatcagagccattaccgaccttattcatgagataccaacagctcacaacctatgccatttcaatcatgtcaccgactatatcgatgggctctgcgaagcttgctgcatcaagggactgctgagattacctgtctttaccactgtcggtggcagagggataggcgcgggaatcaacaacactcctccattttacctgctctggcatgcaaatgacctcgctggcatgctggttcaaaattggcaaccctgggataatatggggattccggcatggttgggttcttttcaaaaagaaagcaggaaagtgggcttacttgccggaatgacctggctgccgcgcaaggtgcatctgcatgatcctgtctcaggtcaggcagcatgttgttcctgcggcttaccctccaaagctctcgtctattcctgcagcataaaacctgaaccagtgccggaaggccttaaatggaaagaccctcatggtgtttacaccgatcagggaaaaagtctccagtccaaaatcaaactgatgtccaatgatagatacactttcgcggaccgggattggtatagcccgttgttcagctatttgcacgcggaaggaaactccagacaaggaaaactatggttggttggatttgccagcgataaagcaaaaagcatagacatctgggacaagatcatcgagcttgagggaactgatacaaatgatgagctactggctcaattggcaaacagggctactgcccttaatgccatgcgcaagaagcctctcagaggtgatttcaaaaagtcagtgggcactccccagattgctgacattatcccccacgccgaaagcagaattgccatcaatgcgggtaaaatgactgagaacaggggctattcctggcaggatgccgatactgaatacggagaactgctcaccaaggttgcatgctctttggagccggctcaaacagtggacgccaggctcaagagaggtaaattcatttcccgcaagccctggccagttataccagaatccaaaacaaaacccgcagaggaggaccagaatgaatagaggaaccgttgacttcattgcaagcctggagaacctcaaagaaggcgatttgggcattcttagaaaactcaggggagcccggcttgatgaaaagcttcccggatttgacctgttttccgccctatggtggcctttgcggcaaaagaatcaacgcgctcccaagcgtgaagtggcttggttgatcgccaaactttttgctgaattccgctttgaacagcgcgagggagccacattgcccattcttatgggaggcatctgccggaagttggaacccaaaaaggaattaccccgtgtattggcacgctttgatcaactcgcatcgcttgacattatgcagatggaagagccgctgtcggtcattatgggtatcttgcgcaagcaccagcaggtctgcctggactgggtagggcttactgatgttctgtcattttgggagcaggaacctgtcaaaagagaatggtcggattcatttattaaagcatacaagatcaacaaggaggattcagatgttgattgaaattcatatgattcagaatcacagcccggcaaatcttaaccgggacgacttgggcgcccccaagacctgttatttcggtggagtattacgttctcgcatctccagccaatgcatcaagcgcagcatccgttttgccccggaattcgcggaccttagaggaggtatccgaacaaggcgtctggcagagaaacttgaagaaatgctggaaaacaaagataagaagctggttgccaagtttcttgaagcctgcggaatcaaaaccaaatcttccaagaaagctgcaaaaaagtccgaaaagatacccgcggaagccgatgaagatcaggatgagcagcaggcggctgatacatctgacatgctggtttttaccacttatgatgccctgcgccaaatggcagagctgctttccgactccaaactaagtgaaagcgaaaaactgctgcagttcaaagatttgctcacaaactgcgtccattctccggatatagcactttgcggcaggatgttggagaccaaagagcttaaaaacactggcgttgaaggcgccctacaggttgcacatgcgatctccacccacattgccagacctgagatagactattttgtggcggccgatgatgttcccggtgaagacgccggagcgggtcatattggcgaatccatgtttgcctcagcctgtttctacaaatacttctccattgattgggaacagttggtcaagaacctgaaaggggacacgaatctggcagcccacaccgtgggtgcctttctcctcgccgctgccaaaaccaaccccagtggcaaacagaacagcttcgccgctcataactatcccgatggcatccttgttgagttcaagaattcccctattagctacgccaacgcattcgtcaggccagtttccgtggtcaaggaatcggacctggtggaacaaagcatcggccagctttccaactacgtgaacgacatcaggcttggctattatgatgagcaatccccagttatcagcttctggttttctccaaacaatcgctattcccttggcaatgagcattccaaactggcttccagaaacattggcaacctcaatgagcttgtaggcgctgtgttggattatattggcggcttcaagtgggaagaagttcagaaaagcaaggcttatgttggcggctgacatgagtgcgccacccaacaccttattcttgcgcttggagggggctttgcagtcttggggcagcaacgaggctaagtttgctttgcgcaggactaccgacgctcccacaaaatcaggtgtcctggggctgctttgcgcggccatgggaattgggcgcgcggaggctgctgattcatggctcccaaaactcgccaacctgcgcatgggcgtgcggatagaccgccccggcatacgctggtgggacttccatactgttggagcgggacaaagaatgcgcatggcagagctgaaggcacccaaaaaaccttccatggttggagctgccctggctgataccctgacaccaagcaaagtaaaaaccagggcagagaccttgctctcacgccgcgaatatcttgccgacgccagttttctggtcgccttgcagggtgagccggaacttgtggaaaagctctccgccgctctggccaagccggtctgggcaatttatctggggcgcaaatcctgtcccccttcacgtcccgtgggcgagcatgctccgggcttttataacactttggaggaggcgctgtccgcggttcccctgcaaaagcgctggcacaatgaacccctgccgcaaatactgccttgcgtcatggactggatccccagccaggacggagaacatgcgcctgatgacgcggagattcattacgatctgccggtttcttttcagccgccccgccatttgccgcgcttcgtgatcaggcgtgagctggttgtgggagaggatgtgcaagtgagcagggaaaccggaaccagcgtttggaggcccaaaggaacccgggcggattataacaattccgagtataagaaggtcagggcggagcggcttgtgatggaccatgccgcgtgcatggtatgcaaagctcccgccacgactgttcaacacgtgaattaccgcagggcgggaggcaaggaaataccggaagacctgcgggcgctgtgccgcctctgccacgacgcctgcaccatgctggaatacggttccggcatgaccaccgaccgcatcgacccctgcgaccccatctggcgggagcgaatactggcaaagcgcaaagatatagtcgagttccgttcgcgcgggcagcgtttccgcaaaatgaagccagaggaggaaaacggatgatctacttgtccaagctattgatcgatactggaggcaatccagaccgtccccgccccggcagaaagtggctggacaatatctataacgtccaccgccgcctttccatggcgttcccttcaggtttgcgccgggagcaggatccgcatttcctgaagcccttttcgccaaacgacttccaaaaaactcccttccttttccgggtcgataacaacatcgacggaaacgataaaagggcgattattatcgtccagtccgttcttgagccggattgggattattgcttccaaaacgcgcttgatttcctggccgcgccgccggaaacaaaggagtataatccagagtttaaagcgggacaactgctgcggttcaggctgcgggtaaacgccagcgtacgccgtcatattcctgaaatggtgcaacaggacggtcaaaccatagaaactggcaaaatcctgcacaaaagggtttctcttacctgggatgcttcttccaccccggatcaggcccttgccgactggctggctgccaaaagcccaaagctgggcttcacccttcagcgctgtgagcttcttcaactgggttgggtttatggctccaagccagaaccaaaaaatgtcaaagtaaaggaacaggggcagggctactggcgtgaacacaaatacaatcctctgcgcttccgtgcggctctcctggagggagttctcgaggtggatgacccgaaactgttcctgaaaacgcttagcagcggcattggaaaagcgaaaagcttcggctttggcctgctgtccgttctgccaatcaggaatgatggataaagacctgcactctattccccggatcagagaccggcttagctatctctatgtggagcatgccaaaattgaccagaacgggcaagccatcgccattcacgacgctctgggtgaaaccccggttccttgtgccggcttggctatgctgatgctgggaccgggcataaccatcacacatgcggcaatactttcactggctgcctgtggctgtctcgtagcctgggtgggagaacatggcgtcaggttctatgccgcaggcacaggtacaacccgcagcgctgtcaatcttatgaagcaggcaaaatactgggcagacccagttttgcatctacgggttgtacgcgccatgtaccagttaaggtttcaggatgagctttctccagatttaactttgaaccagatcaggggcaaggaaggtgcccgggtgcgcgatacatatttccaactctcccaaaagtatggtgtgcccatgcagggcagaaactatcaaagagacaactggaacaaagcagaccccataaaccgggctttatctgtggcaaactcatgcctctacggcatatcacacgctgccatcgtagcggcaggattctctcccggattgggctttgtccacactggcaagcaactgtcgtttgtctatgatatcgcggatctatacaaaatggagatggctgctcccgccgcattccgggcgaccgctgaagggatcggcgaactcgaccgcagagtcaggcttgcctgccgtgatgaattccacaggcagaatctactcaaacgcattgtcgctgacattagttctctcttcggtgatattatgccagaggatagcccggatgactgttttgccgaagaaccagccttgcctggaggactctggtctccagatggagaagtgtccccagggggcatatcttac

SEQ ID NO: 560 - DNA, 20546 bp, Artificial Sequence
  Synthetic Oligonucleotide
gcgaagtgacgtcggcacggtccctctatcagcaccgggcccgggccggcatgcggatcggcgacgacaagaccgtcgacctgttgcggtacaccgcttggctcgcgtgggagcggcaccatcgcgatgcctacgacgctcaccgtgagcgggcccggcaacgccaggcggagcagtcgcggtccggccgggacgtcggcgagctgccggcggtggtgaatcccgagcgccgggcgcggtgcgaacgcaaccttcgcgcgttctacgaggagtacttcccgcagacgttctacctgccctggtcaccggaccacctgaaggtcatcgcgaagctggaggcggcgattctcgagggcggcctgttcgccctggccatgccccgcggcggcgggaagacctcgatgatcgaggcggcgtgcctgtgggcgttgggctacggccatcggcggttcgtgcccatcatcgggccggacgaggggcatgcggtcgatcgcattcgcaacctgcggacggagctcgagacgaacgaccgcctggcggaggattttccggagatctgctacccgatccggtgccttgaagggatcaaccagcgtcggttgctgtaccagggccgaccgatcgtcatggacttcacggccaagcgcatcgtgctgccggacatcccggacagccgggccgcgggggcggtggtcaccacggccgggatcaccggccaggtccgcgggctgaactacaaacgccgcgatggcgtgacggtgcggccggacttcgtgatcctggacgatccacagaccgatgagtcggcccacagccccagtcagtgcgactaccgcgagcgtgtcatcaacggcgccatcctcggcctggccgggcccggcgtgcggatctcggccatcatgccgtgcaccgtcatccggccggacgacctggcggaccggatcctcgaccgcgagcgcaacccgcactggcagggtgaacggacgaaactggtctactcgttcccgaccaacgaggcgctgtggaagaagtacgaggaactccgccgcgaggatctggcgcgggacgaccgaaagctgaccaccgcgacggccctgtatgccgccaatcgcgaggcgatggacgcgggggcggtggtcgcctggcccgagcggcacaacgcggacgagctctcggccgtccagcacgtgatgaacctgcggtacgagcgcggcgaggtcgccttctgggcggagtatcagaacgagcccctgccggagaatccactctccgaggacctgctgacggccgacgagatcgcggcgaaggtgaacgggcaccgaaagggcgaggtgcccctgactgtgacgcacctgaccatgttcatcgacgtgcaggccaaggtgctgttctggctggtcgtggcgtgggaggacgatttcaccgggtacgtcatcgactacggcaccgagccggaccagaaggcggcgtacttcaccctgcgtgacgtccggcacaccctggccgtcgcggcgccccgggcggggctcgaggggtcgatccgggcgggcctggtccggctgtgcgggcggatgctgggccgggagtggaagcgggaggacgggtcggcggcccggatcgagcggtgcctgatcgacgcaaactggggccagtcgacggacgtggtgtacgagttctgccggcagagcgaccacgcgagcgtcctgacccccagccacgggaaatacgtaggcgcgtcaagcattccattcgccgagtacaagcgcaaacggggtgaccgggtcgggctgaactggcggatcccgcacacgagcggccggcgggcgatccgccacgtcgtgtacgacacgaactactggaagtcctttatccaggcgaggttccggacggcccagggcgatccgggttgcctgacgctgtttggccgccagccggagcaccaccggctgctgggcgagcatttgacctcggagtacccggtccggaccgaggggcgcggccggacggtcgacgagtggaagctccgtgccagcgggctggagaaccactggctggactgcctggtcgggtctgcggtcgcggcctcgatgcagggggcggtgctcttcggaacccaagatatgggccgcccgcggccggcgggccggcgaaagctctcggagttgcagcgaggacggcgatgaggaaggaccaggtcaaaccgcccaagccggaggagccgtcgggcctcgtctgctcgaagtgcgggtgtaagcacttctacgtagtctacacccgggcccgctggggtggccggatcgttcgccgccgggaatgccggtactgcgggcggcgggtgaccacgacggagcgggtgacgggatgataggaaggcattctgccgtttcgcgcaactttctgtagattcagctgttagcagagccagcaacctcgcagctttggctgagttgctgcgttttgccggcggtgcgacacaccttgtcggtcccccgggttacaggtaggttgggaagaacaatctctctgtcgcttcgcagtccccggggctgtgcggtattgtagatgccgtaaacacctattctcagaagggacacgcttatgcaattcaaccttctggacgaggcgtggattccggttctgcgaaccaacggcacttgtgaccgtgtcggcatccgcgaggcgctgacagaggccgggagtatccggcagatcgcggcgtccaacccgatggatcgagtggcgatcgtgcggctgctccttgcggccctgtattggtgcaagggatacccgtctccgcaggaggaggaagatcgcctcagtggggacgggcgcttcccgcctgattggttcaaaaaactcgatgactgccggaagtacttcaatctgcttggagatggcccccgtttctttcagaatgagggcctcaagaaccggccaccgaagcacaccacacattacctgatgcacgaagtgccgagcggtacgaatgcgtggcacttccatcacactaccgaccaatcgggtggcttgtgcgcagcttgttgtgccacgggtttggcccggctgccggtcttcgcgacctcgggtggcaagggaaagtcgccagggatcaactcaaagccacccctctacgtcataccggtcggcacgacgcttgcgacgactctgcgattgtcctggagatatggggatgcgtcactgggcatgccagaatgggaaacaccaggatacgaactcccccgacggggtaatgtgcccctgctgccaggaatgacctggcttcctcgcaatgtatggttgggaaaccgggaaaagaacgaaacggcctgtgtctcctgtgggcgggccgagcgcgtccttcggcgatgtgtgttcgacggcaaaggcggctccaggggtgaagaccggaggtggcgtgatccacacgtggtccccgtgccgctgggaagaaacgcgaccggaccacttcagacaagcgacgctctgaaatcgaaggatgccgcggcggggcagtgggtgagggctctggcagccattctcggacaaaggacggttgaccaaggagcgggcatctgggcagtcggcttctccacagtcaagaacgacaagtacctcgaggcaactgaactcctggtcgcgccggaacggtggccgtcgccagcggaagactggatcgcgttggcggagcagtggcaacaagaaggaagagcggtcatgcgacgggcgcgttcgccaagtgcttcctccactcgacacgaagtcgaactggacatcgttctcggtgctgttcgggcacatgtcgagtcacggcttgccagccgcatcgacgggctgctgtcagacgctgaaggtgagtgggtgaaggcaacgagagagtaccagaagatgatggcggcagtggcgatgtcgcttgcgccagggtttacgacgcgcgcgatccgccgacgcaatcagattgcccgatccggtccggacatggcgcccacatcgcggtgcaggaagggagaagcaccaccacggaaaggcggcgaacgatgacgccaacagagaagtttgtccgaacgctggaatcgcttgagcctggcagccttgggcgattgcgcagcctgggtgggcgcagcctggatgagtcagtggagggtttcgaccttttcacggggatttggtggccactgagggaacagaaccagagagcccctcgccgtgaggtggcgtggctggttgccaaagtgtatgcgtaccgcccgatgcgacaatgcaaaggagcaaggcttgccatgcagctggggaatgtgaaaggcgagagcgagccagtgatgcagcgacgacaagccaagttcgacgaactcctcctgctccctctgaccctgatcgagccagcgctgtgttgggcgctggatctgattgcgaaagacagcggtgagttggactgggtgcgcctcaccgatgagttgtccgcatgggagcgtgaagaaacgcggctcaactgggcgacgcaatacctgcacttcgggcagtgacatgctcaaaaggagaatactatgctgatcgaaatccatgggattcagaaccacagcccggccaatctcaaccgtgatgatctgggtgctccaaagacatgcttcttcggcggggtgatgcgctcacgtatctccagccagtgcatcaagaggagcatccggaccagcgagcagttcaagctgctgtgtggtgggatccgcacgcgaagactgccgcaatacctggcgtcccagatcgcagaaaaagacatgctttcgctggccactgcggtggttcaggcgtgcgggcttgcgaaggacgacgcggcaaagaacgggaagaaggatgtcatcgttttcctgtcaaagagcgcgactgcgcacatggtggatatgcttcgtgcggaagaggcggaagtgacagagaagcgagtcgccaaactctcgcgagaattcgcccgcctcgttgcacaggatcgctatgcgccggacatggcattgtcaggacgcatgctggaaccagccaagccccccaagagcaaaaagggtcgcaacgcggacacggacgaacaggaggacgagaaggccgacagcagcgccaaggacaagggggtctggaagggccttgatctagacatcgaggctgcgttgcaggtggcccatgggatatcaacccacgaagctcgtccggaagtggactacttcgtagctgcagatgacataccaggtgaggatgcgggtggtgcgcacattggcgaagccatgttcgcgtcggcctgcttctataaatacttctcgatacactgggaaacattggtggacaacttgaacgggaacagggagctggccgcccacaccgtcggggccttcattcgtggagccgcgctggcgaacccgaccgggaagcagaacagcttcgctgcccacaaccctccggacggcatcctcgtagaggtaaagcaaactcgctccacgccaatcagctacgcgaacgcattcgctgcaccggtgccgagcaagggaacgcgcgatattgtgtcgcaaagcatcgcacagctcggtcagtacgtgcatgacctggacaccgggtacggcaaggagcgcgaggacaagcggttctggttctcccccaatctccggtatccgctcacctatcagcacgagaagcaggagaccccctgtgctgacgaaaacgtaggatccctcgatggcctagtggctcttgtcgtgaaggaaatcgggtttgactggtcgcgcgttcagtccgtgacggtcgagtgaggagatgcgccgatgaatgcgaatacgctcctgctccgcctcgaaggtcctcttcaatcgtggggagaccagcaatcgagattcgtcgtccgaaggacttccgaagctccgaccaaatcggggatcgccgggctgctctgcgctgcaatgggcgtgtcgcgctccgatgctcggcaacggctcatcaagttgaacgctttgatgatgggcgtccgcatcgatcgtccaggcgtgcgctggtgggactaccacacggtgggggcgggaatgcagatgcaaagcgcggagggaatcggaaagaccaaacccggcccgattctgacgcgtagggaatacctctgcgacgcgagcttcgtggttgctttgcgtggcgattcctcactgatcgtttcgttgcacaaagctgttcagcatccggtgtggccggtgtatctcggccggaagtcgtgcgcggcatcgcttccactggtgggctgccatgacgatccggatgtgggcgggtttcctgacctggaatctgcgcttcgatctgttccctggcggagccgccacgcgggagaggccgtgcccgatgtagtcgaatgcgtgatcgaatggcggggtgccgcagcgggtgaggttgctccactagacggggaagtctggtacgatgtcgcagactcgtttgatgtgccagcacactccccaagaatggttgttcgcaagaagatgggcgtcggctccggcacggacatccgagtcggtgcggcacgccagagtcgccttccggcgccgctgcgcccccgcgccgattacgcgaatgctgagtatcgccggaagcgtcagagccgcctggacgcagatgggggcctgtgtgttttctgcaagtctccggcgacgacggttcagcatgtgacgtatcgccgcgccggcggcgatgaggagcaagatgatttacgctcgctctgccggttgtgtcacgacgcggtgacgatgatcgagtacgggatgggcatggggctcgaccggatcaaccccgaagacagacaatggcgcgaccagattatcgccaagcgtgaggagatcattcggtttcgttcgctggagactcgacgtcgacggcttagcgccgaggaggtcgaatgatcatgtatcactcctatctgctcattgatactggtgacaatccggaccgcccgaggcccgggcgtctctggttacgaaatgtctatcgagtacaccagcggctttgcatggctttcccgaatgatgccagaaagcgagaggatccagagtttctcaaaccgtacgatccgaacggctttgtccacgttcacggcagccgcacaaccgaccaggcgtttctcttccggattgacgcgcatgcggggggcagcgtggtcatcgtgacacagtctgccgtaaaaccggattgggcgtatgccttccagaacgcgatgtatcttctgcatgccccgccgtcggagccgcgtgaggcacaactcacgtttccagccggcacgctgttgggattccggctgctggccaacccgacgcgccggttgcgagagagttctcgtgacgccaagggagaacctatcgaaggacgatgggcgggaaaacgggttcccgtgccgacaggcaagctggatgattggctgacacggcgatcggagcgttgtggttttgccgtcgagactttgtgggaagctcggccgggatttgtttacttcagcaagtcggcgagccggggcgagggacagtgccttagatccgttcgatatgaggggaagcttcgcgtcagcaactctgcagcatttcgcgagacgcttatccggggcatcgggccgggcaaggcgttcgggttcgggttgctgtcggtcgcgccggtgcgcgaggggggctgaatggggcatgcgtgaagggtgcggctctttggcaagtgaatagtgtggtggccaatggggaggacaggccatggacgatctgcatcggttgcccaggtttggggacagcctggggtatctgtacgtcgagaacgcccggatcgatcagcacgagatgtcggtggccgtgcatgaccaggagggcttcaccccggtcccggccgcggccctggccgttctcatgctggggccggggacgcggatcacccacgccgcggtcaaggcgctggcggacaacaactgcctgattgcctgggtcggccaggagggcgtccgcatgtatgcccacagcacgggcggaacgcggagcgcacgccttttgctgcgtcaggcggcgttggcgctggacccggaccagcgactggccgtcgtgcgccggatgtacgaaaagcggttcggcgctcgtctcgagccggggctcacgctccagcagattcgcggcaaggaaggcgtgcgcgtccgtgaggcgtacgccaaggcgagcctggcgacaaacgtgccctggcagggccgcttctaccagcgcggcaactggtccgcggccgacccggtgaaccgggcgctgtccgcgggaaatgcgtgtctctacgggctgacgcatgcggcgattctctcggcggggtactcggcgggcatcgggttcattcacacgggcaagcaactctcgttcgtgtatgacgttgcggatttctacaaggtggagttgatcgttccggcggcctttgaggtggcctcgaccgttctgacggacgtggagcggaacatgcgaatcgcctgccgcgaccggttcgcacattcccggttgctgggccgcatgatcgaggacattcaggacgtgctcaacgtggaaggtcggcccgttcggattgatgagaactttgatgaggacggggcggcgcccggggcgctgtgggacccggatgggggaggcgaggaaggggacgggctggcgggaggccggaactatggtgatcctgattcttgagcgtgtgagcccgggcctgcggggagagctgacgcggtggatgatccagcccaggacgggggtgtttgtgggccggttctcggcgttggttcgcgacaagctgtgggatcgagtgcagaagtcgatcaaggccggggcagggatcatggtgtacagcacgaacacgccgcagggctatgccgtgcggacctgcgggcggccggatcgagacctcgtggacttcgagggtctgattctggcaaaaacgcggaaaagggagtagattttcagcgtattccccacgcacgtgggggtgaaccgagcatcggggacgaatgagatggacgaggcaacgtattccccacgcacgtgggggtgaaccgcaagtgccctccgtacatgcgcagtgctacgtagtattccccacgcacgtgggggtgaaccgtttcggcggatcgtcgggccgggaccgtgcccagtattccccacgcacgtgggggtgaaccggattagcctctcacgatgatttggtcgcccacgtattccccacgcacgtgggggtgaaccgatcgccgccgccaggcgcggtcagacgtatcgggtattccccacgcacgtgggggtgaaccagctgagtctatggctggcgtctcatacgtgacgtattccccacgcacgtgggggtgaaccgccatcgcaccgaacctcacgcttcgaggcatggtattccccacgcacgtgggggtgaaccggtgtggccggtggccagcgccacgtcgcccgggtattccccacgcacgtgggggtgaaccgcaactgcttgaacagatcaaagggctgggcacgtattccccacgcacgtgggggtgaaccgccggcggacacgaccgagacgcggaacctgtacgtattccccacgcacgtgggggtgaaccgatggactgaatggaccggatggacggaatggacgtattccccacgcacgtgggggtgaaccgaagatggtgaataagcgcatcaagtcgcgcatcgtattccccacgcacgtgggggtgaaccgcggagcagcacggtctgacgtttgtgcaattcgtattccccacgcacgtgggggtgaaccgcacacctaaggatttgctagacatcacacactcgtattccccacgcacgtgggggtgaaccgcaaaaatcggacacgcctacgggtaggcgaacgtattccccacgcacgtgggggtgaaccggagtttatcatctcaggctttgagagccggctcgcacgtcggcggaaaggtgcgaacacatgattgacgaaccctccgatgcgcagatgcggtttcttgcaagcctgaagtacgacggggagctgccgcgcacaaagactgaggccagtttcctcatcgatggtcgaaaggccggtaaggactcggccaaactcgaaaaggaactggagcgacttcggcagaagacccagcgggaatggttcaaacgcgagcgtgattactgccgaatggaggttcgacaggcacgcgactcggaaggaatgatcgcgggctttcgaatccgtgttggaaggcgctgtgatgccgcgaagcagtatcatggtgcattcgtaccgattcaggttgcgatgaaacatccccaggtgctgcctccctacgagaggatctgtcaacactgggcgtgtgaatgcgaaatcgaggaagtgctggaatctgatcgccttgcaaccgacactccgatggtcatcaagccaggtcgaataacgacggttcgaaagtggcgtcggaaccgtcatccgtttttgacgttgctcgttctcgccgtgcttgcctattgcgtttaccaactgttgaagacgtgagctgaccgagaagcttaagtcactgcgttcatgcgcttcttgcatgtctaccggtgtaacaatctcgccgagaatccctgaacccgcttgaggcgcacccgcgcgaaggataagcagccgatagacaaccccaccgggccatcccggaggcgagcgggcggcggctgatcaccgtcaaaccgtcgagccagcaagtgatacgccgtgcagggctgcacacctgcacggcgttttttgttgcgccttcgccttccggatggctcggtgcggagagcatcgaagcccgaaacaccgttgaaatcggaggaacccatgtcgttcggacccgtaaccatcgccacgctcgacacggtggacatgcaggcgcccggggcgccggggctgtccgcccagcagatcctcaaccagctgggcgagttcgttctcacgccgccgaccacggacgccgacggctcgccgctgaccggtctgacctttgcccaggcggtggtcattcaggcggacgcggacgtggcggagttgttccgcaacgacttcgagggcgctatgcagttcaacggggccaaggtgttcgagatcgagttggccgagggcatgccggtgacccagccgttcgcgatcggcgagccgggcaagccgtactcggtcctggcccgggtggcggaccaccttcgtggggagtagcccggcgagcgtggtcacgctccacacgcggcggcggccggcgtggatgtggtggctgatcgggtgggcccgccggctgcacggactgaccggacgactggtcgcgtacctggaacggtgaagcgatggcagaggacctgaaagagacgattcgcgagactgcccagggccccaagcgggtgaccggcgactccggctccgtcgagcagcaggatctcggccagctcatcgaggcggaccggtatctcgcgtcgaaggacgcaggcaagaagggcctgaaggcaatccgtcgcacgaaggtcatccccccaggagcgagttgacgtgcggaagtggtggagacaacgcggacgcaaggcgacccccaagcacggctccgtgctcggccgggtcgtacggttcgtccgcggctggtacgacgcggcccggaccaccgacgagaaccgccggcactgggccgccgccgacaatctctccgcccgggcggccaacagcctggaggtccgccggaccctgcgggcccgggcccgatacgaggtcgccaacaacagctatgccaaggggatcgtgaagaccctggccaacttcgcggtagggaccggcccgcggctccagctgctgaccgacgacgagagggccaaccggctgatcgagcgggagttcatccgctgggcgaaggcggtcagcctggcccacaagcttcgcaccatgcggatggcccagtgcgagaccggcgaggtcttcgcgatccaggtcaccaatccgaacgtcgacgcaccggtcaagctcgatctcaaggtcatcgaggccgactacgtgaccacgccgtggtcggtgaagacgcggctcgatgacgagcggatggtcgacgggatcgagttcgacgcgtacggcaacccgtcgaagtattacgtgcttcggtaccacccgggcgacgggccgtcctggagcggctcgaagccggaccacgacgagctcgaggccaaggacgtgatccacctgttccgggtcgatcggccgggccaggtgcggggcatccccgagatcacgagctcggtttcgctcttcgcgatcatgcgtcggtacacgttggccgtgctcggcgcggcggagcaggcggcgctgcctggcggtgtcgtgcacacggactccacggccgacccggacgagaacgtcgagccgatggaccagatcgaactcgaccgcgggacgtggctgacgatgccgctgggctggcggatcagccaggtcaaggcggagcagccgaccacgacgtacggcgacttcaagcacgaggtgatcaacgaggcggcccgctgtatcgacatgccgtacaacatcgccgccggcaacagctcgggctacaactacgcttcgggccggttggatcaccagtcgtttttcaaggccatccggatcgaccagaaccacctcgacgacgtcgtgctcgatcgggtgttcgcctggtggctcaacgaggccgtcctgatcgaggggtacctgccgcaatgggtacgtcagcgtggggtgtacctgccgcggcagtggttctgggacgggtacgagcacgtcgacccggccaaggaggccaacgcccaggacacccacctgaacaaccatacgaccacgctcgccgccgagtacgcgaagaagggactggactgggaggaggagcttcggcagcgggcccgcgagctgaagctcatgcgagaactgggactgacgccggccgacgtgcgggcgccatcaggagcggacgacgatgccgcagacgaagacgaggaagaggacgaagagtccgagtccgccgcacgcactgcagttgcagtgtagcgcgacgatcgagtgcctggcggccgaggcgggccagccgcccaggaggccgcggttcacgatccacgcgtaccacggcggcgccatgcgcgtggccgggttctaccggccgatcgtcatcgacctggcgggcctgaagtcgaacaagcgggtgccgattctcctggaccacgacccgacgcagatcgtgggccaggcggacgacgtgtcgatcgagccccgggagatcacgctcgccggggtagtgaccggcgacgacgacgccgcgggcaaggtggtcacccacgcgaagaacgggttcgtgtggggcgcgtcggtcggtgtgagtatccacaagcttgaggccgtggacgagaagacgagcgtcaccgtcaacggccagacgttcaagggcccgatctacgtggtccgggccggatcgcttcgagaagtgtcgtttctggcaattggcgcggacgagaaggcgtccggcaagatcgcagcgggacatgccgcggaggtaattgacatggaattcaacgagtggctcaaggccaaggggtttgatccggacgcgctgaccgacgaccagcgggcgagtctccaggcgatgttcgacgccgagcaggcgaaggacagcgacgcgccgcccgagaatccgccgaagccggcaccgaagccgaaggtcgaggccgcgggttcggacgacgatgaaacgtccgttgccgacgatatccgggccgaggtggtcgcggagaagaaacggattcaggagatccaggccgcctgcaagggtcatcccgacatcgaggtgaaggcgatcgaggaggggtggacgcgcgacaaggcggagctcgaggtcctgcgagccggccggcccaaggctccggcgatccacgccgcggagaacgtgaccaacgggcacgtcctcgaggcggcctgcctgctgaccgccaagcacgccgagaccgagaagcagttcgacgagaagacgctggacaccgcgtcccggcggttccgcggcgggatcggcttgcaggagctgctgctcgaggcggcctgggcgaacggcttcaccggccggaacttccgggaccaccgggcggtcttgcgggcggcgtgtggtcgagacctgcaggctgggttctcgaccatcgatatcagcgacattctgtcgaacgtcacgaacaagttcttgctcgagggattttttagcgtggagcggacgtggcgaaacatctgcgccgtccgcaacgtcagcgatttcaagaccgtcacgagctaccggctcatcggcaaggaccagtacgagacggtcgctccgggcggcgagctcaagcacgggacgctgggcaatgagaaatacaccaaccaggccgacacgcacggtctgttgctggccatcgaccgccgggacatcatcaacgacgacctgggggcgatcaccacggtgccccgaaaactcggtcgcggctccggtctgaagatcaacgacgagttctggaagaagttcctggccaacagttcgttcttcaccaccggcaacaagaactacctgacgggtgcggacacggtgctgggcattgacgggttgaccaaggccgaggtcgcgttcatgaacctggtcgactccgacgggaagccgaccgggatcatgccggtgatcgtgctggtgccgccggcgctcagtgcgacgggcaccatgctctacaagtcgctggagatccgggacacgaccgcgagcacgaagtacccggtggccaacccgcaccagggcaagttccggacggaggtcagccggtacctctcgaacagccactacaccggccacggcgagaaggcgtggtacctgctggccgacccgaacgacgtggccgtcatcgaggtcgcgttcctgaacgggcaggagtcccccaccatcgagacggccgaggcggacttcaacgtgctgggcatccagatgcgcgggtaccacgacttcggcgtggagctgcaggagacccgggccggcgtgaagagcaagggtgaagcgtagtcgacgagcatcaggggacacgacgctcggggatgacaagacgcaatccgtaacacggagaaaccatcatgcaggcgacgtttattcaggaaggccacgcgatcgaccacacgccgggtgggccggtggcggcgggccaggtcgtggtccagggcagcctgatcggcgtggcgaagacgccgatcgaggcgaaccggctcggggccatcgcggtccgcggcattttcgacgtggtcaaggccaacgagcagatcagtctcggggcggccgtgtactgggacgccgacggcgacccgtacggcggcacccccagcaccggggccctgaccacgtccgcgggcggcaacatttttgtggggttcaccatggccgcggccgaggcgacggacccgacggtccgggtggtgtggtccggccccctggcggtgaccaacaccgtgcacaacgcgttgacggccgcgatcactgatccgggggatgccggtgcgatccccgtgacggacagcggcacgtgcccgctggtgaccactgaggttgggggcgagacccgcaccctggcggcccccacgtatgccgggcagctgctcgcgctggccatgaagacggacggcggcgactgcgtggtcgcctgcgccaccggtctcaatcagaccggcaacaacagggccacgttcaacgacgctggagacgtgctcgttctggtcggcatcgaggtcggctcgaacaagcggtggcgggtggtcagcaacgacggcgtgacgctggcgacggtgtaggacgaaccgtggtcgacctgctcgaacaaggtagccgctggctggaccggcagcgtcgcaagagcatggcccgcgaggtggtctactcccgcgggtcggcgagtgtgacgctgctggccaccatcggtcgcaccgagttcgagcagacggaccagtacggcgtggtccaccgcatcgagtcgcgggactacctggtcaccgcggaggatctggtgctggacggtcagctgacgacgccgaaggccggtgaccagattcgcgaaagcgatggggcggcgacgcgggtgtacgccgtgctggccccgggcgatgagccgccgtggcgctggtcagatccgtaccgggtcaccctgcgaatccacacgaaggccgttggagacgagtgacatgatcgggcagttcgacgcattgctgcagccggtgcttcaggccgggttcgcgggcatgaccgcggtactgctgggcacgctcatctggctggccaagcggtttttagaccagtcagacaaaactcgggaaacgcaagcagcaggtgatgcccgcatggcggagcagatgcagcggacggccgaggtgatctcccagaacacggtggcgatcaccaatttgctggaggcgaccaacgcccagaagatcgagttgcggcgcgtggttgatgaactgttgtcccggccgtgcatgttgaccgtggaaaagtgaaacgatgtcggtcctgagcgaaatcgcacaagcccttgccaatgatctgaacgcccagccgttcagccaggcgttcaccgcttgccggcactaccggccgcagttcggtctggacgaactagcggtgctgcgggtctccgtggtgccgcggtcactcacgttggcgacggcgagccgggccaggagcacgtgggaggtcgccgtcgacgtggccatccagcggcggctgctggacccgggcaacatcgtcgagatcgacacgctggtggccctggtggaagaagtgatcgcattcgtcgacggccgtcgcctggcggcgtatccgcaggcggccttcgtcggcattgagaacgatccggcatacgccctcgatcacatggacgagttgagcgtattcacgagcgtggtcaccgtgcggtaccgcgtgctgcggtaggaggtaacggtcatggaagttttcgggttggatgccaagctctattacaaagagggcggccagggcggcggcggatcgtggaacgagttggacaacgccaaggatgtcaccacgtccgtcgagaaggagatggcggacctcaccacgcggaaggccaagggctggcgtcagcaacgcggcaagctcaagaacgcaacggtcgactgggagatggtgtgggatgatgaggatcctggcttcaccgcgatcaagagtgcgtttttcggtgatgccatcatcggcctgcaggtgctctccggtccgctggccgagggtgggcaggggctccagggcgatttcgagatcacgaagttcacgcgcaacgagcccctggcggaggggctgaccgtcagcgtttcggccgtgccggcttatgccgacccgccgccggcttgggtgccgtagaaacggacgaattgcatcgggtgcaactggagaagtgacatgccgaccagtcgtttgagcattgcgggggacatcggcggggcgtcgatcgccgcgacgatcctgcgggcggcctccgggcagatcaaccacgacgtgcaactgcccgcggcgaaggcgggcaccctgaccacgcgggtcgggcccaatgaggggacgatcacgctctcgtccggccacggcatcgccagcgagcagatcgttgatctctactgggacggcggccggaaacggaacgcggtcgtcggcacggtctcgggcaacgacgtgcccgtcatcggcgatgatggcgacgcgttgcccgaccaggacacggcgatccgcgtggcgccacaactcatcatcgacaccgatttcgtcgggaacctggttgagatgatcggcgcgctgtgttcgcgtcggggtcggttgcagtttgacgaagagagcgcgcaggccctgaatgtcgacctggtggccaacgagccgtggttctgggcctccggtggcacggccacgaatccgcttgccgacaaggtcgtcgttggctgcattgcgtcccaggaccacaccgtggcgaccagcctgaaactcggagtcctgtacaacagcgatcagtgaccatgcgacacttcaccgacaacgagggccggcagtggagttttcggctggatgtgagcgtgatccgccgggtccgcacgatggccagctgcaacctgttggccatcttcgataaggcggacgacgtgctcggccgactgggtatggaccccatcctgctggccgacgtgctctacgccatctgcaagcccgaggcggacgcccgcaacgtcacggacgaggacttcggccgggccctgtacggccaggccatcgcggacgcgacggacgcgctgctggaggccctcgcggattttttcgagccccggcgggcccggctgcttcgggcgatcctgacgaagatgcagaaggtacggaacacggcccaggagatgatcgaggcaaagctggaaagcggcgcgatcgaggccgagattcagcaagcgctgcagagtgcgagcgagccctctggaaagccgccgggatcctcggcgtcgaccccggccccttcagctggggcgagctgatctacatggcggagcaacgggaccgccggagctggcggatgacttcggaggtgatggccctgctggcgaactgccatcgcgacccgaaaaagacacgggcctttcggtcgagtgatttcgacccgtacatgcggaaggcgaaagtcgtgaaagcacccatcactatcctgagagacattttcattaacgggcgagacccagaggagatcgaatcatgaactttcccagtcccatcggatggctgaccgggctgctgagctggttcggcgctgtgtttgtgttcctgtccgcgctgctggccgggggctgcgccccgcaggcgacggagctggagcgcttttcggatcgcgtgtttgtcgaggtcattggaccggccgtccagaaagccatcgccgaaacgagcactcgaacggcaacgctccagggcggcgcccaggtcatcgagccgggctactccatcgacgtggagggcttctggggcacgggtgtgaaggcatcgacggtggttcgtgtgcgcggcgtcagcgggcagttgaccggtcacgcccaggcggaccagggccagccagcgacggtgccgccgccggcgacccgcgaagagtcgaccgaattgccggggccgggcggctgaaatgccactgcgacgcggcgtgcgcccgggtcatgaaacgcggactggcgggctatcgtgggttcgggctgcacgccgcacgcttgagtcgggcggtgggaaattgggagtgaggtcgcagtacagtcatgacgtgccgaatcatcctggtcatggccttggcgatgctcgccggttgcgcttcgcaacgggcgagcgtcgccactgcccgtcagaccgccggcggcgaggccggcatgtcccagcccgccggcgattccgacgccatcgcccagagcggcttgctgaatctcgtttccgatctgcgggccgccctcgatgcctacaccgctctcgtgcagaagaaccagcaggccgggcgcgacatcgtgaccgaaaaccacggcgataagtgggtgaaccgtattctggcgctgtcctggctggtctatccgttcgtgtggcggcccatccgaaaccattttgatccgaaacgaccccggtcgccggagcaggagagttgacatgcgggaacatgagatacccgtcgcgtccggttcgggattcacaccgaccacactggaaggcgcccagaacaacaccatcccggccgacacggtggtcgtggcccggtggggcgccgcaatccagaaactcctgctggatctgcccggatacggaggcgagtgctgggttgccctggaggccgagacggtcagtgccgaggcggtccaggcgatcaaactcgatacggaccgcacgcgactcgtggtcggggccgagcggccgcacatcctgacgaagatcgcaatcaagagctcggtagagctggtgctggccggcgccggcaagaatgccacgctgctggggtggacgtgatgctcacgcgcaagcccaccagccccgtccgcaacaagctggcccccctgggctgggcgcacgccatcggcctgaatgtcgatgagggcagtggcacgactctcgcgaacgtcagcacgatccgcaccggcacggcgagccacttcgactttacggtcaatgcggccggtgcctcgtggggtgtggacgctaacgagggtccgtacgtggacctgccggatggagcagcaggctgggcgaatagcagcggtaccgataagacgtatccgcgtggcaccatcgtactccgggtgcagcttaacgatccaaccgcggctgcttcaccgatcttttcgctcgggcgaaaccccatcgcctcgtaccctgggcggatgcggttgcgataccaggccggaaccaccaacgcattcgacgtgactcacacatttgatcaagcgggcggtttcccagctgtcacccggctctcagtgccgatggcattatctgcgggaca

SEQ ID NO: 561 - DNA, 19897 bp, Artificial Sequence
  Synthetic Oligonucleotide
cgtgcgtggggacaatcaatgctacggatatgctgttcaaaatccgttcggttcacccccacgtgcgtggggacaatcgcagtcgctgagatcaattatgccgttcgattggttcacccccacgtgcgtggggacaatatgctatgcgtatctgttgtagtacatgttctcggttcacccccacgtgcgtggggacaatgcggccgcctcaaatttatcgttttgcatcgtcggttcacccccacgtgcgtggggacaattttgcataccgattatcggcgaatgaccatccgggttcacccccacgtgcgtggggacaatacttaataaactattatactacaacacgcgcaccaaaaaaagcccatcgaagtcctcgatggagcgcgacgtcagaccccaactgcgaatccgaaaaccctgttcgttgtcactcgaataaatcatcacacaaccaccttccttggcctgcccacaggccttctcccaaaggatatcgcgcaccatcgccgatggtcggccgacaaagactccggctttcggttccagcagccagcgggtcaactcgccccgcaatgccggcggcacccgctcaagaatcatcaccaccatcgtccttctccttctcgttctccttctctttctccttctccttctcgttgacctccggcagataggcgcgtccgccggccacatcttttccctcgggatcccacaacgagccgggggcggcgtcatcgtcgaaaggcgggccgtcggcggtcggctctggcgttgacaacatcagcgccgtccggatatcgggaatgattctctccagaagccgggtcgatacgaatttatcgcggcaggtcaggcgaacccgtcgctccaacattccctctccctcggctgcggctcgaaacgccactgggatcgtgatctcagccttatagagatcggcgatgtcatagacgaacgacagcattttcccggtgtggatgaagccgagtgcgggcgagaagcccgcggatacgatggccgcatggcagataccatacaggcacgagttggcggccgacaacgcccgattgaccggatctgctttgttccagttatcgcgttggtaattgcggcctgaccaagttacgccggtttcacgcgcggcattggcgtaggcgttccgcacgcggacgccctccataccccggatttggcgaagtgtcaactgcgggctcagcttctcgggaaacctcaactggtataggcggcggaccacctgcatgtggaggtcaacatgcgcccacagccgcgcctgatgcaggaggttagccgcgctgcgcgtttcgccgatgccgactgcgtagaagcgcaccccttcctcgccgcaccatgctacaaggcatccgtgatccgccagcacggagattgcggcgtgcgaaatcgaaacgccgggtcccagcatcaacatggccagattggcgcaggggaccggcagtttgcccgcttcatcatgaacggcgatggcccgtgcttcctgatctatgcggcaatgctgcacatagagataactccagccgtcgctgaatttgggcaaggcatgcaggtttttgattctcactacgactccccatcatacggcgcgacggagaggaggccgaagccgaaggccttggccgaaccgaggccgctgacaatggttttgcggaatttatcaggatcggtgacttcaaggacgccttcgtaacgggccagacgcaggcgtgatttctgatctttatcggaattatcgtgcttgtcagatccatggtcgtcatcgcaagaaatttgattcgtcggggattttcgcgcttccggaccgggctttttgaaataaacatatccggtttgaatggagttcaatttgaggatatgaaagccggccgaatcggcccggcgggcaagccagtcggggagtttatcggtcggcacggggacgcgttttcggaaggattccctttttgcatccggtgatttttcgctcagacgtctggtcggatttgcggcgaggcgaaagcgaaggcgctgtccgctggtgaatcggggatcgaaaggccgacaatgcggcttggcggccagaagatagcaggcattgtgaaaggcatattcccagtcgggttcgatgacggactgcaccaaaatggcggctctaccgttgggcagcgggtcgatacgaaaaagaaaaccggaattttcggcgcggtttacatgcacatggcctttgccgaactcctccggattgaacggcttgagaaaatgcgcgtcggccgatttacgggagtcggaagggaacgccatgcaaagacgttggtgcacatgatagagattgcgcagccatatccgtcccggccgcggtctgtcgggattatcgcctgtatcgatcaggagcagggaaatatacataattattccacctcctcggaggcgaggcgccgacgacgggtttcaagagagcggaatttgatgatatcgtttcgttttttgatgatcatttcgcgccagcgcggctcttcgggattgatgcggtccatgcccatattgaggccgtattcgatcatcgttacggcatcgtgacagaggcggcaaagcgaacgcaaatcgtctgcggtctcatcgccgccggcccgccggtaggtgatgtgctgcacggttgtcgccggcgccttgcagaagacgcatagatggtggtcgtggtcaagcctttcttctcgtcgctttctgtattcgttgtcgccgtaattggctcgtgggcgcgggggagacttggggagattttgggcagcttccgtcatgacggccaattctccatctttgcctaccttcaatgttttgcggataacgaatcgcggctgatgcgaaggtggctcgaatgtcagtggaacatcataccaaataagggcatcgtcgggcgcctccggttgtgcggccgtaggccgccagtcgagcaggcattccacggtttggggaggctggtcatttttgagccgcggacgccaagggatggatgtaagggcgccaagcaaatcggaaaaatcaccggattgatgttccagcagggggcgggagggaacgcatgattttctgccgagataaagcacccatttcggcgtcttgacggcgttttccaattcggcgatcaggccggggtctccttgtagggcgaccaagaaagaggcatcgcaaagatactcgcgccggctgagcatggcgccgggtttggtttcaccctcacccttggcgatgcgcattttcattctggcaccgacggtgtgataatcccaccagcggatgccgggttggtcgatgcgcacgcccatatcgagtttggcgagtttcggaagccatatttcagcggcctgcggacggggaacgcccaaggcggcgcagagcatcccaataacgcccgatttggtgggcgcctcggccgtccgccggataacgaacttcgattgttggtcgccccatgcctgcatcgggccctcaaggcgaagaaaaagtgtattggcgctcatcaggccgcctccgggtttacgactacttttttgacctcctcccagtcatagccgagggttttgattacggcggggatcagttcatcgagcgatttgaggttgttattggcaagagtattttccttcttgtcatccaaaacggtcagcttgtagcggagattgggcgagaaccagaaccggtgctccggcttgccgtatccggtgtcgatatcacagatgtattgaccgagttgggcgatgctctgggatacgatatcgcgctcatctttattgaccggtttggcgaaggcgttggcgtagctgatgggtgtatttctcagttcgatcagtattccatcgggcgggttatgtgcggcgaagctgttttgcttgcctgttggattggtcagcgcggccccgcggatgaacgccccaacagtgtgggcggcgagtttttcgcaaccatctttgaacccatttagattattcaccagcgtttcccaatcgatggaaaagtatttatagaaacaggcggaggcgtacatggcttcgtccacataaccggcgccggcatcctcgcccgggatgtcgtctgcggcaacgtagtaatcgacttcggggcgggcctcgtgggtagagatagcgtgggctacttgcagggccgcttcgacggttgtattctcgagttcaccggtttcgagcatccttccggagagcgccatatccggcactgcagtattttcagctattagtttagcgaactctttcttcagttcttcatcattttttccatcattattcttcaacaaatcggccatttcggcgatcgcccgtttagtcgtataaacaagcatatcgctgcggtcgacttctttacttttgggcttgatgccgcacttttcaagaatggatacggcgcgttttctaacgtcctttttttccgggaccaactttgcgatctcttcggccagtcgccgagtgcggacgcccccgagcaactgcttgaactgttcgctcatgcggatgcttctcttgatgcactggctggagatacgcgagcgcagaaccccaccgaaataacaggttttgggcgcgccgaggtcgtcccggttcagattggccggggcatgattttgaatcatgtggacttcgatcaacatactctacctcctttgaatgatcttaaaaattcctccgcccatttgaggcgcgtggattcgcgttcccaaatggagagatcgtcggtcagtttaacccagtctatttttaggtcttttgaacccagcaggtcgagcgcccatctgagatcggtttcaagtttgccgagcggcaaagtgagcattctgtcgaatcttttggcgtaatgctcatctcgatccgtgttcggccgacagcacccaagctgataggcgagggtctggccgggcgaatgctctattggacggaaagcgtagagcttggctatcagccaagctacctcacggcggggggcgctcgcgctcatctggcgaagcggccaccagagaccggcgaacaggtcgaacccatcgaccgattcgtcaaggccttgaccggcatgcgtgcgcagaagcccgagttcgccggttttcaaatcgttcaggacgtttacatactgctcagtcggattcacttgttgcctcctttctcttggagcgttctgccggcccacttgtttcttgtctcatgtccggccttatggcggcgatctgcttccgttgcttcaatttttctgaggtgaagccgggggagattgatgcggcgacggcagccatcagcggagcatattcgtcggctgcttgttcccatacttgctcatctgcttcaagtagggcgccagcattggcggagactttggcttccacatgagggcggatggaggaaataacggcagacatttctattcttgattttgctatgttttcgtgtctatccagccctattccctgattccgccatttttctatcaaggaaactgccgtctgcgggaatgaatccagtgatggaatttcaatcatccgttcccacacatcaacgtttttagcctgatttgtcgcaaacccaacgacaaacagcgataccggtcttcctgtttccacaatacgtgcaagcaaaccatgaaacctgtcgatgttttgccgtgacgataaagtttctgccaaatgctcaagcaggctatgccacgggcggtcaagcctgaacctgccggaaacagtcaaatcttcagctcttatagcttttcgcttcgcataaatcacatggggatcattccaattcttattctcttgcttcccggtagtctgaaattcaatagtctttataagggattttgcggaggctccacagccgatgcatagaccaggctgcccgtccggctcgtgtagaaaaaccctacgcggtaatagcgtcaaacctgtaagcaatgggacatccgagctcattgtcggaagctgctgaaaaatccatgatggttcaccaatatttgagcaaaaagaccaattctcacataacgtctccatcaacgacttaccccatggcataacataaatcggcggagcaccatttattccggacatcaggttgggttctttcggtccgctcaaaccagttattgcaaaaagcggcagacgcaataaacccatagcgcagcaagccgggcaaagcccgtcccgttcatctgtcgaatgtctgaaatgccagaagttattgccggagggtatttcttgcatcagctgcgtagccgattgcgggcgcttggcttggctatcctgatagaacctcttcccatcccccagaaggttgaagcagtctctattatcctcgagtttcttgaaccactcttggggaaacgaatcctccggaatccgttccggagggttgcccttacaccaataaagaagcgccagcagaaaacgaagtatcgcaaagcgatccataggattgctggcggcaatttgacgaattttacgggcatcttcaaaagctttgcggatcccgattctgtcaaattcgccgttacggtaaagaacgggtatccatttttcttcgagcaagttgtaattcataatcattccctcttttttttctttatgcctctttatcatccacactgccgacattcaagacttgccgtgtttcataagattcctccgcatataacaatatctgagtgggtctattcgattttgcgtaaggcgtcattttcaacgggttcttggcgtctttctcaagtgttcttctctcgaatgtcctgttcaggcgagcccaaatatggaatccgccaatctttttatggcctttttgcctctcgaaccagttgttcttcaactctacatgaaatcttccaacaaccgaagaatctatccgcatattgacggcacaggatcagcccccgtcgtttgggtctatagaaaagataattattttgaactgctcatgtcaatcaggcaaattgggaaagggtttattcccggcttggagctgacctctcaggtctttgtcgactggcgtcggcgatgaacatcgccatccggcatatccgccgagcaagccgaaccaaaacgctttcattgaacaattcaaccggacctatcccgaggaggcgttcaatagctacttgtttgaggatttggagcaagtgcgggagatcgggtatgaccgactggctgttcgcctacaacgagcggcgccccacgaggccctaggcggcctgccgccaatagtcttccgtgaacgacaaaccgccaaaaactttacttatgaattgtctacttgacgggaagattacggttttgaaagatttaaatttccatcttgattctataaacacaatttttgttttgtgtgtagtgtcgtcttgcttccaagtataatcccccttctaaccgttctcgatctcctgcagtttaccgaataccttcaatttcaaccgtttatcaaagagcaggtcgttcccgatgaggtagaagcggcgtcaaactcgatttcccaattaccctacccaatgcggatgtcgcaagttgagtcgcgagcttgtcgcaagttgtgtcgcaaacattggctatttattgccctgatgcatccagtatccatagttgtctatcgaccaggccacaaaacggtccagaaatgagccgggagcccacgtaagtgctcctcgccactggctggcttggtcccacccgccaagaagttccttcactccttgcattccttggatttgattctggccacaatctaaggcatgtccccaaacgatgtcgctctgtatttcgggatgctctccattcagatgaaatcgttccccgaagacggtcaagtcactagatatgtcgtgccagtcaatacgacatattttcccaagaccgtatctggtatcgcccccgacaaagaggacgtcgatattgtccaactgcctccgaaagccattgtttttcaggaagacataccccaaaagcagcacggcgctcgattcctcctgacagttggaatcacgccaccagggattgatacattctgtctctcggagtgtgccttcagacgccgagtccgattcgggagcgattgcagtgccgggccgggagaccagcagacgacgtctgaagtcacggtccgaaaggctttcctcgccgccatgactacgccaacacagcccttttgttttctcgtatttcggaagccaagccagaaatttgtcgccccgtttctcggccggaaagaggtaggtgaaacggcagtcgcgagcgacttcacatccaagcttgccgtaatccggaaagttttcaccattttttgatcgggaaatctcagcggtcacggctccccatagcacgcgcgccggaacatagggtcgacagcggttcaaggcccctgccggaggcatgccgacgtaaaggggcgcttccagtcgccagacccatcgaagtgccgtccaggtcatgtttgcacctcactcttttgtggcactcgcgcgtgataacgggcgtagacaagtgtttgccggaccaaatcacgagccagtaatagcttgtcaaggtccttggccatctgctgaagcgaggtaaagacgtctgcattgtcagaaagtaaaggggcctgctgcggcgtcgatttcaggaatttataaagctgatcgttgacattttgggctccatcgccgcctcgcgcttttagaaaaagaaagagagcgtaaataccttgctcctccagaacagcgagcgcgtttataatgaggttttcaagctcctttgacggcttctccgccatagttttacccaccttggcacaggcaaggtccagattttctaaggttggagcgtccattacgagaccccctttccagacttatccgaatcgtcaggctccttcgttttcagcacgcgcagccgtcccatgccccggcttcccatgccaccgataccaagatgttccagataagaatgggcttcggtaacaacatttcttaccttttccggtgagtcgaccgcctgcacatcctcttgattgatcttaaagtgctttggattccggcaggttagctcccaaacaagcactgtggatcgaggcagggcctcataggtgaaaagcgccccttcctcggctgcgccggtggccggatcgatggcgaccgaggtccgtacttcgaggttgctgttcacgaggtgggcgaacagcttgtcggagacgacacccaagcggctgatgatgtaatccggtatccccagtgctttgatcccttgagcaacctcgtccagttgcggccaatccgtcttgaccggtaataaaagccagccgagattcaatgatggctgagttgcttgcccatccgctttgcggtaaatgacttgctgctcaggcaagtcacccagttctgagaatttcacgatgctggtttgccgcaatgccatcggacatgtgatccattgcggccccaattgtgatgccacgggaaaaagcagcacatgcatatcactgaatgccgccagtcccgcgaacccgccacttgcgcctatgccttttgcaaacccgaacacggtacataccggacaatcggcctttccgcaatgaccacctgcaccgttgcgctccggctgaccaaggccggcgcagccggggtatttcccctttgccatggccgtgtaggctcgcatgacgcccgcgatgctcgaccccggaaccttcggtatccgcgtgaccggatcgcgcacgatagtgttatccacgcggcccagccgagctccgcccgtaccgacatggatgggatcaagcgccatgccagcaaactgaaatgtcgcaaaactccgattatttgttgtcatcggtcacctccggacacttgcttttttaatatgctcatgtgccattccagactccagtccaggagtctgtctccggcggctgccaccaacgtctcaaggcaagctcctcgaacacccagacgttcatggaacaccgcgcgtgcgaagtcgagccatgccgtctttcccccctcgagccatgtcccctccggcccttgccaggcctcgcgccgctcgataatttccgaccatgcgccatggagcgcggtctgacttggtgcatgccggtctatcagccgccagagatcgcgcatccgcaaccaatccgtcagggatcgaatgtcgaggggttcgaagcgtctggctgcactattcatgaaaactgtagtgacaagcgagggataaacgaaaacacagtccccgcttcgcaagtctttcacatgcctgaaaacccgaccatcgggatgtcggaaatccagaggaatgcgaacatctctatcttccacggccaggtatggatagaacacgtcttctcgtccatcggggagtctgacgggtatggtttgaagaagctcttgccgataatccagcgacttgatgttgagagcggtgacgccgtcacgcgtttcgcatcccgccacccgccaggtttgtgatttattgattctgtccagatcatcttcgatggtccgcgccgcgtctatcacggcctgaaacggcatcattctgggaaaagccacgaccccgacccgaagcggcagacggtcccagacacgggcgaattggccgcgccatgcttcaaccgcccggtccacacaagccgatgcggcttcaagcggcagaaggacacgaaaacggacaggggaaagctcaagggggatcaccggatgataaatgtccagagcgcccgtatcctccgctgtcgaatgaaccacaagttgtttcgtttccacgctgtcatccgccttcaactccagcttgatttcgcaaagactgtccttgccctgctccgctttcataagtcgggctaggttgcagatggtgaggaagtcgtttgtttgttcccgatacaacaggcttacgggagcatccccataacgtccgctgtacgtctgccggccttcccacgaaccggaagagccgttatcgggcttgataaccaatcggcgcacgcgccagcagttctggtctgcactcgctatgtcgcggaattcatcaagcaaggctttgaagaaatcctcggcctgccgccagaagcgatagatacgaccaggcgaggcgagcttgcaaaacaactgatgcgtgagccatgcggcgcgtccgttctcatcgatatcgccccattggtgtgagccagttcgatcctcgacgattttggtgaagaaagattgccaatctatctcgtgctgatacccctcctgcaggctgctcagcacggggtcatccttgtcaaaggactgtagctttcctttgatgtactgtaagaggctgtcgaaacaggtggagggatcaatagggtttggctggtttttcaagacaggattgaacttgcgccattccggaatggcctgtgtcctgagcgcatccaagcgggttccgtcaagccagggcacgatatccaagctcatcgtgacgagggcgacgcggtcgttggcatcggctatctcatcaatccagatcgtgtctgatccaaacttcccctgaagccacatgtctaagcgatgggtccgtcgattcttacacgggtcgcaaggcatttgcttgtcagtacttgagcggctactgcgcacatgacatacgggacaaacatggccatccgacgaatcctgcccgggaatttgccaattgcgaaagagcggcacggccattgtttcccgcgcgtttcggatttcagccgtcattcgcacaagtgatcgcgaaggctcactgataccgcaatacgggggcatctcaaggttggcgtcacgggcatagccgtcaatctgctccgtcagccagctttgccagtctgcgatctttaaatcaccaccctgatacccttgttcgccgtgatcgaatcgttctcccgggaacgaaaagacacaggcctctccgtccgcgtacagtaaaggacctatagccaaatcgacctcaacgagcttgcggactttagtaaaaaactcgtccagcgccagccgtgccccggtccagtcaccgatcttcacggcccgggcctcgtagtggtccgcaccgatcccgatggtcaagagccgccaacgggtctgttgtttgagtccatcgctggaccagggaaacgagttgccttccagaaccgccccggccacagcgctcttgaacagtgcggccgcgacataggactgatcaaaaagcgtgatgtcgttgttcggcaatcgggtttctgctaaggtgctggtaaacgccttgcgcagccaaccttcggggccgaccgcgtcctcgcgccaacgccaccagccataaagatcattcgggaaactgttgttgccgagccgctgcagttcggtgaggagatcctcgatttgtccgagtaggcgtttccagccaacatcggtaagcaattcaggcgggtcggccaacagattgcgaaccggatggccgaaggccgaagacagccacatgtgggcagcatcttgacccagatacttagcggtagccgacggcaggttcttttcgatacccgacgccatagcgtggccggcttggagcaggccaagcagccctttgtctctcttggtatacttcctgataaactccgtgagagtggcgggaaaggcgtttccatctaacgcgaatttgtctttcacccagttaagtcgatcgttccatggaaaaggtgggttctccaattcatcccatttttcgtattcatagtcgcttttttgtccaccatgcctacgcagaaagtcaaccttggccttgccggtcatatgaagccagccgattgcttcgagcgtcagaagcagagggcgatgttgccgcaatgtgtccggaagttgaaatctcgtcatttgtcacctcccttccgggcaattcgacttttcaaatcggatttgaattcctccgcatccttcagagtgaaggagccgggtgagctttgctcacgtaccagagcgtcaaggtcctgaaggatgcgaaaagttttctttgtggatcgcggctcaacctttgcgggttcatcggaagccatcacaagtccactccacgcatcgatcctcgcagtaccccatccggcggtgcgtttggcggagatgccataggtttcgagaagcgcccttatgctgtcgatgaagccgtcgatgaagtcagccggcgttactttgtcgcgttcgatttcccccggcaggggcgcataaagtagctgtagcctccccttcgttccggctgggacaacctcgtagaaaatgggctgagtcccagcccggcggctacgactgtgggggttgatcacctcaaagccgattttattgaaccaagtcggataacagacaagagcgccggagcggaagcgttcatcctctcctttctcattgccgaagagatggacgatccatgaagggtccttccagccatccattttcatatcgtgcttttcaagatgcttggataagcccgcctgcatcctacaggcccagcgaagaagccccttccatgaggccgccgacatgaacggcacaccgaagacccgatccttgcgaactggattgtcgagcacatgaaagggccggtcgtccttcgaataccagggcgatttcagggtgaaggatatatcgatgccaaaccaggtcgaatccggcagggaagcatggtccggctcaaggtgaaggccaggagggagattgagttccagttcagccgcccgtttcatgtagcattgacgcgcattgttcttctccctgtcacgacaggaccagaccacgcatccatccccaaagcctgaagcgagtccgccttcgttcgcctgtttcgggcaggctttcatttcggccagcgaggcgtaataatcgaaactcatgagcggccctccttcccggcgaatagctggtcaatgatctcgtcaccggtgaggaaatcccagccgtactgcccccaagcagaatcaagtctcttcttcatctcttcgaattttttcttggtgtcagcggcggtcccgccaggtttcacgaagccaaaggtcctcgcgggattcttgaagctgaacaccttcttgcactcctgctgagagtcggcaatccatctggctattccatcggtgccggtggccaactgttgttcttggttttttgcctcctgacgtccgggcacctggttgaaagtgctcttgttgttgtcttcacgcgcaagatgctttttatttttattcacgcaccagaagtgctgtagagaagcccaggcgaactcaccgtgattgaacttccgccatttggatagatatgtttccaaatcaccccgacttgttccatcgaattgccgagacgtgaccatctgcaccaagccatagtctttgtggtgcagcttgcccgcccgactggattcgtccgtcggcttgaatactgtcttgccaccgatggccccatattcggcgatcaggcgaagggtggcgtctaggagggcccactcttcatcccggatcggacggaggggtgtgaagcgaaaactgaactcttcgtctttctttatttgaggtgagattttcgtttcggcattgtttctggcctctcggatattgccattcttgtcgaggacttcaaatctgaatttccgcgcccaaccggtgcaaccaaatagttcgcaaacaacacaatggtttcggtcttcacatttcgtatcggttgggtcgcaggcgctgccgcccaaaccacgcaccaacacctcgaaccaccagcggatggagccgagcaggccggtggtgataagacggtccggttcagttttttcctttatgtggccgtttttttcttcaagagtgaccgagccggtccacaagtccgtcagtgcttggagtcgataggttcgttcacctttcgttagagccatgagttacctctctttgctattcctccatgctccgctcaatgtctgcttcgtcgagtggttcgtccacggcgttgcgcagccacgatggatcgaagccggcagccgacgaagcctcgatgcggattcgcaccctggccccgtcggatttgtcagccagattcgcaatagccgggaaagccttgaatacctgttctctagtagcttcaaaggcaaaagcaacccgtttcttccggccggcggcgtccgtgccagtcttcgtggatcctgtacaggtttccactccaactccagccggctcttcatggacactcagtggggaaactccgccagtatcgacagggaatacatcggcaggttgggcgcttggggcttccgggatcgctgccggcatcatgaggaaccccgaatcgaaatcgatctcgtcgtcagcaagggagtggccgataattaccctgtcgcggttcacctggtatttcccgtcagggccgagaacgggcgattcatgaatcgcccctacagaaatataggcaaagacgctttcggcaacgccccgagcgattcccttgcgcagtacagatgcggattctaaccttggcggtgctatatcccggaaaaatgcctcgaggacatcggatgtcttgatgcccatcagcgggggctcgttctctcgcaagatttcaccgagacgcacacgttcggcgatttttcgcggcgtcaccgatccgtgaatgcgcggcgtccccacactggtaagcagctccatgatgcgctcgtggacgccggtcgcctgaagcggccgcccgccacgttccactctttctatttccaactcgccgtcctgaacccgaggcagccagacggccgtgtaaagctcccggaagcaagattcagcggcagcctgctcggtgcgtttcctctcccgaagttgatcaagctggtccttggtgagtcggagttgctgcttcttggcttctacacggtcaattgctaagagataccggaccgcacgccgcaacgcctcgatttgtttcttttccggtatcgcgagtcccagcccgttgcggaagcgccggggacgatctccgtatttggttaggtaatccttggcctcgcgttcctgctccgatttgccctcggcggcaaactcaagaggcaggtaggcgacgaggaatcgcgggtcctcgtcggggatgtcctggctctttgccggccagacgatagccgtgtggtgaccagccagccgggcatccagcatctccttgatttggcttcggaccgggccgtggccgcgtgcctgggaatcctcgcgggcgacggtctgctccgcgtcctcgatcagcttggtgacattcgggtccttcttgaagcaatatcggacgccgtcgtaatgcagatacaggcatgtgttacggagctcggacaagacggcggtggccgtgatgttgtcaaggtcgggaccgacgcaggccgccagtagctcgttctccgtcacgccaggcggtagcgtctcatcgttgcccaagccctcgcgtcgcaacccgccgaacgaatacagcaggatggccgtggcgatacgcgtggccggcctcacgctggcaagtataggggtttctcgggccttccgctcgtcgatgcgttttgctcgggcgttcggaccgtcgatatccgccgtgatgaccgggtcgtagtcgttctgaacccccagctctttgagcatcttcatccggacgtccacgtccttcagcggcacgtctccgggaccaagaagtggcttggctccgccgttcttcttaagagagtgcatgcaggaggcaaggaaccgcagcgcgccgcgcgtcctctgaaaggcgtccaccgccgtccagcgttccctcataatatcgatgagcgcaggatggaacggatacgccgcttgcatccggtctcgcaggaggcggccttcctcatcggcctgctgacgttcggacgacgtctcggcataggcacgccgcatgccggttatggcatcttggtatgccgtgacgacctcggtggtggatgaaatatcgggactgccccccaagagacgacgctgcaagatgggcaggacctcgtcccccgagacaggttccctgagctgatccactcttgaagctagcttgtcgatctcggcaagcaatccgacattgcccaaagcttcccttgcgctccaggtcagggaatagacgagcgccgcattctggctgccagctacctcgacggtcaagttctggaaaaaatccttggcctgtcgctgaagagttgaatcgagaacactgaccgccgccgcccgctccatgtacttgagcacctcgtccaggagaatgagaaccggcctgccgccggcacccttggtgagcaggtcgcggatcacatccccgcccggagccacgcggtccttgtcgtgatcggccaccagcggaaaggccttctcgggatcgatctgccaggcaatccacccccacatggtctgaatctgttgtggcacaggcagcttgcctgtggataacaggctggaagcctgttctaccgtcttgccgttgcgggcatcgaacttctcgccgtcgaaaacggccacggccacattgccgggtcgggcgaattccttagcctccggaatgccgtccagtgcctcgcgcttccgtgcggcatgaaacagcgccgccaatgtgtgcgatttgccgccgccgaacggagtgcgcagcttgagcacccggttgtagccgcttttcccggcaagacaagccaacacctcttctaaaagtcttcgcaagtcggccgtaagatacgtcgcccggaaaaaggcctccgggtcccggttgaccacgggcacgttgggatcattggtggcgatggcccccaaatcgatggcgaacaccgcctcggtcagcgcccctgcctccacgtcaggatggagcttgaccagatcagtccatgggcgaagagagtgggagtgtgatagggtgggagggtatgagtgtgaatagtttttatcgttcatttttacaccacctctcggattgattggtcatggtgaccagttggccgcaaatgcggtcgtattggttgatcagttttttgaaatcggcttgatccagatatccacatttcagggcgaattccaagcagaccaaagtttctcccgcctccgtgtcagcatcgctgagtttgctgatgaacgacgcctcgtatcgtctcttacgccaggcttcagcaacatttgcgcatacggagcgggatgatcgtctgatttgatctgtaaggctgtatctttctccaaccggccaattctttgagagatcaaagatcctcatggctgattgaaaagacatctggtaaacccgtaattctctgaaatcctttattgtcattttgacctatccgtatcaaacagcggcattctggaaagaggactctcgataagcgctttccagtttgccgttagctttttaagtgctgcctgctctcttatggtcgtgtatccactcgttctttcactctccaacactcgcacactccaaccctctaactcagtcccggccaaggcttgagccaccaagcgcaaccgctcccggtccgcccgcgctttgtcgaggaagtcattgagcttgcggggctcgttttccaccagccaaaggatgcggtgcaggatgtcgatcagcggtgcggccttaccatcatcctttggcatccccagcttttcgtcgtcgccgcgttcggcgaaatcgcgcagccggtacttgcctttcttcttctccatcagggcgcggcttccgctggagaggccgtttggtccatcgagctcgacattctggccgtaggtgaagacgatggcctcgcccgcgtccatctcggccgcgccataggtgtagcgccaaagcacgtagaaccggctgggtccgtccaccgcggcaacgccgcttacgggcacaccgaaaatcttttccagaagcgtctccagcacgaccccttccacctcggccaagaacttctcggccgggacctcctcgccgttggcgtattccacacgggagaatttagtgaaggcgcgaagacccgcgcccacggcggcgatgaccaagtccgcgccggtgatccccatcttccagagcgaatcgacccgctcgcggacgatactttcgagttcagaccggacttcctcttcgtaggagccggccaacgtaccttcccgtttccgtgcgacgaggaagatgctggaggcgagggcggcagtgttgagagcaatcagtcgataaccttcggtatccaacggccatgcttcaattacctcaaacccagattgtctgagtgcatccaccaatgtggaccagccgagcgtcgtcttgtgggcatagaccacgatcatctggccgccgggcttcaatacccgatgtgcctcgcgaaatgattgcgccatcatctcttcgtaggcttgccgagactccgatttacacttatgccgccacggcgagacgacggcctcgttcttctttggcgaaacttcggtggcgaagtgctcagggtagagatgccctatggtgcgtttgagccaaacgtagaagaagtcggaaagtgccgcatattggatgttgtcgtaataggggggatcggttatgacggcgtcgaacgaggcatcgggcaacggaagcaacgttgccgagccgcgagcaacaaccgctgcaaatggaatcgcttcagaaccggcgacggctctaaccaccccttcaatcgcctcggtgaaagctcctgacgcatcagcaaaagggttagactccgagaaatcccaaataatgggcagcgcttggcgcccaaaacactgcacagtcagaattttcttgctgtcccaagggcactggctatttgaccgtgtagaaattttgtccaccagcacgcccagataggtccccatcgtctttgccctctccttatcaattggtagcacaggcatcttgcctgtgcatgacaggctggcagcctgccccaccatagtttgataggcctccc

SEQ ID NO: 562 - DNA, 19365 bp, Artificial Sequence
  Synthetic Oligonucleotide
acggttcacccccacatgcatggggaatacacttgatcaatagaggtctaagaggtcattgaactccttcaagccttagtttaaggatgcttggtcataagtttgataccctcccattccgtaacgactcttgatgcggcaccccagaattcgatatcaaacccttgctcggtctgactactccagatcatcaggcaagttccaccgctgcaattgcttctaaccttatcccacagtttatctctaaccattgctgagactttacccacaaacaccccggcttttacttccagcagccaacgtgtgatcttacccctcagggagcttggcacattttccaatactaaaaccaccatcaatcttcctttggcagatcatcctgcccgtaagatatgccgcctggggaaacttctccatctggagaccagagtcctccaggcaaggctggttcttcggcaaaacagtcatccgggctatcctctggcataatatcaccgaagagagaactaatatccgcgacaatgcgtttgagtagattctgcctgtggaattcatcacggcaggcaagcctgactctgcggtcgagttcgccgatcccttcagcggtcgcccggaatgcggcgggagcagccatttccattttgtatagatccgcgatatcatagacaaatgacagttgcttgccagtgtggacaaagcccaatccgggagagaatcctgcagcaacaatggcagcgtgcgatatgccgtagaggcaggagtttgccacagataatgcccggtttatgggatccgctttattccagttgtctctttgatagtttctgccctgcatgggcacaccatacttttgggagagttggaaatatgtatcgcgcacccgggcaccttccttgcccctgatctggttcaaagttaaatcaggagaaagctcatcctggaacctcaactgatacatggagcgcacaacccgtaaatgcaaaaccgggtctgcccagtactttgcctgtttcataagattgacggcgctacgggttgtacctgtgcctgcggcatagaacctgacgccatgttcccccacccaggctaccagacagccacaggcagccagtgaaagtattgccgcatgggtgatggttatgcccggtcccagcatcagcatagccaagccggcacaaggaaccggggtttctcccagggcatcgtgaatggcgatggcttgcccgttctgatcaattttggcatgctccacatagagatagctaagccgatctctgatccgggggatagagtgcaggtctttattcatcattcctgattggcagaacggacagcaggccaaagccgaagcttttcgcttttccaatgccgcttctaagcgtttccaggaacagtttcgggtcatccactttgagaattccctccagtagagccgaacggaagcgcagaggattgtatgtgtgttcacgccagtagccctgtccctgttcctttgctttgacatttttaggttcaggcttggagccataaacccaacccagttgaagaagctcacagcgctgaagggtgaagcccagctttgggcttttggcagccagccagtcggcaagggcctgatccggggtggaagagggatcccaggtgagagaaacccttttgtgcaggatgttgccagtttctatggtttgaccgtcctgttgcaccttctcaggaatatgacggcgtacgctggcgtttacccgcagcctgaaccggagcagttgtcccgcttgaaactctggattatactcctttgtttccggtggcgctgccaggaaatcaagcgcgttttggaagcaataatcccaatccggctcaagaacggactggacgataataatcgcccttttatcgtttccgtcgatgttgttatcgacccggaaaaggaagggagttttttggaagtcgtttggcgaaaagggcttcaggaaatgcggatcctgctcccggcgcaaacctgaagggaacgccatggaaaggcggcggtggacgttatagatattgtccagccactttctgccggggcggggacggtctggattgcctccagtatcgatcaatagcttggacaagtagatcatccgttttcctcctctggcttcattttgcggaaacgctgcccgcgcgaacggaactcgactatatctttgcgctttgccagtattcgctcccgccagatggggtcgcaggggtcgatgcggtcggtggtcatgccggaaccgtattccagcatggtgcaggcgtcgtggcagaggcggcacagcgcccgcaggtcttccggtatttccttgcctcccgccctgcggtaattcacgtgttgaacagtcgtggcgggagctttgcataccatgcacgcggcatggtccatcacaagccgctccgccctgaccttcttatactcggaattgttataatccgcccgggttcctttgggcctccaaacgctggttccggtttccctgctcacttgcacatcctctcccacaaccagctcacgcctgatcacgaagcgcggcaaatggcggggcggctgaaaagaaaccggcagatcgtaatgaatctccgcgtcatcaggcgcatgttctccgtcctggctggggatccagtccatgacgcaaggcagtatttgcggcaggggttcattgtgccagcgcttttgcaggggaaccgcggacagcgcctcctccaaagtgttataaaagcccggagcatgctcgcccacgggacgtgaagggggacaggatttgcgccccagataaattgcccagaccggcttggccagagcggcggagagcttttccacaagttccggctcaccctgcaaggcgaccagaaaactggcgtcggcaagatattcgcggcgtgagagcaaggtctctgccctggtttttactttgcttggtgtcagggtatcagccagggcagctccaaccatggaaggttttttgggtgccttcagctctgccatgcgcattctttgtcccgctccaacagtatggaagtcccaccagcgtatgccggggcggtctatccgcacgcccatgcgcaggttggcgagttttgggagccatgaatcagcagcctccgcgcgcccaattcccatggccgcgcaaagcagccccaggacacctgattttgtgggagcgtcggtagtcctgcgcaaagcaaacttagcctcgttgctgccccaagactgcaaagccccctccaagcgcaagaataaggtgttgggtggcgcactcatgtcagccgccaacataagccttgcttttctgaacttcttcccacttgaagccgccaatataatccaacacagcgcctacaagctcattgaggttgccaatgtttctggaagccagtttggaatgctcattgccaagggaatagcgattgtttggagaaaaccagaagctgataactggggattgctcatcataatagccaagcctgatgtcgttcacgtagttggaaagctggccgatgctttgttccaccaggtccgattccttgaccacggaaactggcctgacgaatgcgttggcgtagctaataggggaattcttgaactcaacaaggatgccatcgggatagttatgagcggcgaagctgttctgtttgccactggggttggttttggcagcggcgaggagaaaggcacccacggtgtgggctgccagattcgtgtcccctttcaggttcttgaccaactgttcccaatcaatggagaagtatttgtagaaacaggctgaggcaaacatggattcgccaatatgacccgctccggcgtcttcaccgggaacatcatcggccgccacaaaatagtctatctcaggtctggcaatgtgggtggagatcgcatgtgcaacctgtagggcgccttcaacgccagtgtttttaagctctttggtctccaacatcctgccgcaaagtgctatatccggagaatggacgcagtttgtgagcaaatctttgaactgcagcagtttttcgctttcacttagtttggagtcggaaagcagctctgccatttggcgcagggcatcataagtggtaaaaaccagcatgtcagatgtatcagccgcctgctgctcatcctgatcttcatcggcttccgcgggtatcttttcggacttttttgcagctttcttggaagatttggttttgattccgcaggcttcaagaaacttggcaaccagcttcttatctttgttttccagcatttcttcaagtttctctgccagacgccttgttcggatacctcctctaaggtccgcgaattccggggcaaaacggatgctgcgcttgatgcattggctggagatgcgagaacgtaatactccaccgaaataacaggtcttgggggcgcccaagtcgtcccggttaagatttgccgggctgtgattctgaatcatatgaatttcaatcaacatctgaatcctccttgttgatcttgtatgctttaataaatgaatccgaccattctcttttgacaggttcctgctcccaaaatgacagaacatcagtaagccctacccagtccaggcagacctgctggtgcttgcgcaagatacccataatgaccgacagcggctcttccatctgcataatgtcaagcgatgcgagttgatcaaagcgtgccaatacacggggtaattcctttttgggttccaacttccggcagatgcctcccataagaatgggcaatgtggctccctcgcgctgttcaaagcggaattcagcaaaaagtttggcgatcaaccaagccacttcacgcttgggagcgcgttgattcttttgccgcaaaggccaccatagggcggaaaacaggtcaaatccgggaagcttttcatcaagccgggctcccctgagttttctaagaatgcccaaatcgccttctttgaggttctccaggcttgcaatgaagtcaacggttcctctattcattctggtcctcctctgcgggttttgttttggattctggtataactggccagggcttgcgggaaatgaatttacctctcttgagcctggcgtccactgtttgagccggctccaaagagcatgcaaccttggtgagcagttctccgtattcagtatcggcatcctgccaggaatagcccctgttctcagtcattttacccgcattgatggcaattctgctttcggcatgggggataatgtcagcaatctggggagtgcccactgactttttgaaatcacctctgagaggcttcttgcgcatggcattaagggcagtagccctgtttgccaattgagccagtagctcatcatttgtatcagttccctcaagctcgatgatcttgtcccagatgtctatgctttttgctttatcgctggcaaatccaaccaaccatagttttccttgtctggagtttccttccgcgtgcaaatagctgaacaacgggctataccaatcccggtccgcgaaagtgtatctatcattggacatcagtttgattttggactggagactttttccctgatcggtgtaaacaccatgagggtctttccatttaaggccttccggcactggttcaggttttatgctgcaggaatagacgagagctttggagggtaagccgcaggaacaacatgctgcctgacctgagacaggatcatgcagatgcaccttgcgcggcagccaggtcattccggcaagtaagcccactttcctgctttctttttgaaaagaacccaaccatgccggaatccccatattatcccagggttgccaattttgaaccagcatgccagcgaggtcatttgcatgccagagcaggtaaaatggaggagtgttgttgattcccgcgcctatccctctgccaccgacagtggtaaagacaggtaatctcagcagtcccttgatgcagcaagcttcgcagagcccatcgatatagtcggtgacatgattgaaatggcataggttgtgagctgttggtatctcatgaataaggtcggtaatggctctgatcctggaactgggatcggcttggaaaaatctctgtccatccccaaaaagctcgaaataccccttgttttcttccagccaggatatccaggaggtcggaagcggcttatcaggttcaggctccccgttggtgttggcgaaacaccagtagccaagagcaagcaggaatctgaaaacagcgaaccggtccataggattgctgtatgccagttgcagacagtgtgcgtcttcaagagtttgaactaaagatattctatctggtttgcccgaaagatagaccacgtttacccaattatcacaaagaagattgtacataacatgctccttttgttcgataggaaccttatatttaagccaaagatcattgtcaagaaatttgctttgcggattttgggttaggaaagatcaatttggggcggtatcttgttactttcaaggtgttccatgcggcggcttccactcccattttacggagccccaccagcggctttttcagcgcagttttcccgctgctgatacttggcttgttggaaagaaccgccgtgtgtaatgcgcggcggttcaagttaattatcggacttggaagggcggctgtccgtcacttcagcaatatcattttgcggctggcgctcgtctttccggtgctgaggcggtagatatagactccgcttgccagttgggcgccgttggagtcggtgccgtcccagttcaggctgtgttttccggctcccatctctttgtccagtagggtgctttacatgaaaactcccgggaaaaaagcgtaaaaaaacccctactggtgaaatgatgaccactagtgtaatatggaaagagcagagaacaacctgtgctgtctacaatgcgttatataagaatatagctttacattcgggcatatgcctaatggcaagtcccagctggtagtccatatacggactgtttaccaagttcaaaacgtccatatttcagaacagaagtccgtcggtaatatgttttgtatgcacagcacgctatgttcttattgatcgtgtgaattacactcttagtgtcagatatcccaagctgcgtttgttgtccagttttcattcctggtagcgaaaaatgttttcagcgaagttcaaacattccaaaagactggatcccgggttccacggttcacgcagataaacgcggataaagggcgcagattgacacggattggtgtaatataagggttgccgaagtccgttcggcagaggcaacggagttgcctgtttggaagagacctccggtctctgtggcaaacggactttgccacacctgggcactggatcacggctcgcaggctgtgatgacacggtttttagtctggagggttttgttccggagtcgggtgtgttgactctttaatgttcttttaattcgtgttaatttgtgtaatttgtggatgtttcttttaaaaagactggatcacgggtaagccaccccagagggggccccgacttcccgtgatgacacaaaatataacttggtggacttgtttcgggggcacctttccacctttccacaaaaataccacaaccttccgcataatccttcataccgccctcctttgctgctactggatttgatgccatcatccttaggtcaaccttataaattataaggatgacctaaggaagactcacgccaaaacgctggatgcaaatgagagccacccgcgcgcgaggggaaagggagggcagccagcccatggccgcgcaattacgggcaagtatatatatacttgccctgggatccgcttcccgcctggcatgaaggggtcgtagcacctatatatatggggggagaatttgtggaaaggtgttttgaggtggaaaggtgcctgcttttttaaaaccttacgcgtttgtttctaaaagactggatcccgggtcaagccaccccaccaaaccgcttcgcgctttggcggggaccccgacagcccgggatgacacggtttttagtctgttgtgctttgtttcggggcttgctggttgtttttaaaagactggatcccgggtcaagccaccccaccaaaccgcttcgcgctttggcggtgaccccgacagcccgggatgacacggctttagggcttggtggcggtttgtttcagggtctggttgttgtttttaggctggacacttgtccttattctgttcttttaatccgtgttaatttgtgtaatttgtggatatatcaaaaacacaggcccctgtctgccagaattctctttgcttgacagattcgcgcttttcacatatattatttttacatgggctggtatccagtccgacaaggaaagaaacatgaaagaactgataataaaagctattagcggccgcaagccgcaagactttttgggagaagatagatgagcacaccccgcggagaacgcgtaaacatcaccctgctgggtaaccgcaacgctggaaaatcgtccttgatcaacgccctggcaggacaggagatagccatcgtttccagcaccccgggcaccaccacagacccggtggacaaacgctatgaacttctgcccctgggcccggtgaccttctttgacaccgctggactggacgacagcggcgaactgggcgaaaaacgggtactcgccacctataagatactttaccgcacggacatagccgtgtttgtgaacgatggccgccccttcgcggagagcgagctgtcctccctgaaacgcatccgcgagatgaagataccgctgttaatggtctttaaccacagggatttgcgcgagcctgcccccgccaatatcgcctggtgcgaggaacggggactgccctgggtctccgtctccgccctcaagggggaaaacatcgatgccgccaaggaactgctgatcaagctggcgcccgcccatctgctggaggagcgccccctggcgggtgacttggtgaaggccggggacagggtgctgctggtgactcccatcgacctcgccgcgcccaagggacgcctgatcctgccgcaggtgcaggtgattcgcgaactgctggatcacgacgcggtggtgacggtggtgaaagagcgggaactggcctatgccttgcaaaccctgaaggagccgcctgatctggtgatcacggattcgcaggtggtgctgaaggtggtgaatgacctgccccccgaggtgaagatgaccaccttttccatcctctttgcccgctacaaaggcgatctggacgtcctggcggaaggggtgaggcagatcgacaagctgcgcgacggcgacaagatcctgatcgccgaagcctgttcccaccacgtgcaggcggatgacatcgggcgggtgaagattccgcgctggctgagccagttcacgggcaaggaactggagtatgaagtttacgcgggacacgactttccgcccaatctggaggaattcgcgctggtgatccactgcggagcctgcatgctcaaccagatggagatgagccgccgcatcgtggaagcccagcggcgcggagtgccgatcaccaattacgggctggccatttccaaggttcagggagtgtttgagcgggcggtcgcgcctctgtatccgcaaggataggagcggtcttcgagccgagtccacttttttccattctgtattggaggcgggcagcgattccggcttgacaaatccgccgccatctggtagagtataaaaacaaagcttagttcagggaggttaccatgtttcaacaacaaacgcccaaacctgtcgtgatcaagtttcccaagttcaggatcaaagccctgcctgccatagtgctgtccgtcctgctgctgggttttatgctttactttgtgcttccggtgctgcatatccgctttttggactggatcgtccccctgatgatctgcctggctccgctgctggcaatccggcgcctgcgcaagatcctctatgtggtctatccccttctggcgctgtggctgatcttggcgcccttcttctcttccggcatcttcaattccggcagctaccgccgcatgatcggcgaggtggaaaagaccgagttttccgacctggtggcgccggtcaatctggatcaggtgccgatcctggattccgctttcgccaaggatttggcagccaagaaactgggcgaggacttcgccctcggcagccgggtggtgctcggcaacccgaccatccagatggtggatggcaagcttttctgggtctgtcccctgctgcacagcggcttctggaagtggatcaccaacacaagcaaaggcaccccgggctacatcaaggtctcggccaccaatccgcaggatatcacctttgtgcgcgagctgaaaggcaaacccatccaaatccgctatcagcgcaacgcctactttggacaagacctctaccgccatctctggtggaacggcttcgcgggcatcggcctggcaggcgatacctttgaactggacgacaatggcgaaccctactggaccatcaccacctacacccacaagatcggagtgagtgccccggaagccaccggactcgccatcgtgcatgccggcacgggtgagatcaaatactttcccctcaaaaaaagcggcggcatctatgacgacagcaagattcccgcctgggttgaccgcatccagccctcctactttgtgcttccccagctttcctggtggggcaaatatgtgcacggcttttggaacagcgtgttcggcaaacgcgacctgctgcgggtgacgcccggttacaacgtgatctatggccgcgatcagcgcagctatttctactccggcctcaccagcgtgggttcggacgagggaacggtgggctttgcgctcacggacacccgcaccaaaagcagccacctctacctggtctccggtgccaccgagactgccgccatgcgctccgccgaaggcaaggtgcaaaacttcaaatactatgccaccttccccatcctggtgaacatgaacggcaagccgacctattttatgaccctcaaggacagcgccgggctaatcaagatgttcagcttcgtttcagtgcgcgacttttccctggtgggagtgggtgaaagcgtgcgcagcgcgcgcgacaactatcagatggccctggccggaagccggatggggatatccccggaggcagcggacaagcaggccaccctcacaggctccatcgcccgctttggctcggacaccacggatggacgcacctactactaccttaccctgaccgaagcgccggatataatctttatcgcctccagcaacctgagcagccgtctgcccatcacccgcgcgggcgaccgggcacgcgtcagctatctggaaagcgcggacgcggagatcaccctcaccgccttcgccaatctgagcctgggggataagtaggcagaaaggagattatagttaagccaggcaaggcaggtagccagatatgaaccgcgtggtgcccagctacatcctgcagcagtatgagcaaaacatcctgcaggggcagatcaccggctatatcctgcgcttttgcaccgttgccacttacaatatcaaaggagtaaggctcaagcagcggcagcaggtgattgacaggatggaagcaactttcaccgaagcctatgaaaggatgctgagcctgatcaggaacgcaggcggactgctcttccagtatgagggaaactgcatccacgccctgttgccggaaagcactccggtgctgatcgcggcgctgctggcacgcatcaatcacactatcggtgcgatcaacagctacgccagcccccatcatggaatgccgaatgtaatccgcctggccgtgggttttggcaccctgtcctggcgcatctttgagaaccccctccagtttgaatatgtgttctggtctccccaactggatgtcctgcgtgaaaaccccggccagcccaaccaaccttattactctccccaggcattgaacagactgggctgggagttggatgccaggcctggcaaacttgccgagcatccgccctttccccagttgcctgatattccggaaaggaagcgcttgggcaagcaacacggccaccacttcattcattcccgctttcacagactcaatcccgcggctgacgtccggcacagcgtttgctgctgcctcagcctggacgagcctccggacggccccctggagccaaccatccaggcgctggaactgctggcggtgatctacgacgcctttttggcagccatctatgtgcggcacaagcggctgcatgccatcctgctcttcgatttcccccacaacaaggtcaacaaaatgcagcgcgcctgccgcctggctttggaagctgccacgcgccacaaagcccgcgccgcctgctgcaccggctacatcttttccatggctgccggcaaagacctgtggaaggcaaccttcttcccgggcgaagccatcacccgcgcccagaagctcctggagcttgcccgccccggcgaagccctcgccgaccacaagctgcgcaaccagcagcacaactccttcatcttcacccccctcaaaagggaaaaagccgcctcaaaagccgcgccccgcgcctaccgtctgggcatgctgccggggcaactgatcaccggacaaccgctttgcatgattggcagggagaaggagaccgctctgctgcatagcaggatacgcgatggtttggcggcctcctcgccccaggcgatggtggtgcatggaacggcgggagtgggcaaaagcaggttggcacgcgaagctttgcgcgccttcgagactccccggcggcaggtgtatctgctggcttgcaggcaggattcccccctccctctggatatcgtatcccagttgctgcgtgccagtttggggcttttggaggatgaggctcccgcgcaggcggtgcagcatttccgcgaagcgtggcaaaagcgcacccgcggttcctcgctgggacaggattgcgaagccgccctcgcctcgctgctgaatctctcctgggatggctcgccctggcgcgggatcgcccccgaagccaggctgccccgtcagcagcaggcctggctggattacctgcgctggctgtgcgccaaatcccctgtgcttatctttattgacgatgtccaatggctcgatcccctgagccgtcaattcctggaactgctgtggcaacacggcgtgcgcccgctctttctgctggctaccgcccggacggaaaagggcaggctgcccgcggagcttgccgtcaaaaaagatggcttggagagcctcgccctgggctccctcaactccagcgccagccgcaagctctacctcaatctgctgggccttccccgcctgccccgcgaggccttttccgctttccacgcctgcgcgggcggcaatcctttcaatgccgaacagcttgccgcttatctgctggaaaacaagctgctcagtccccacggcgaaatagcgcaagagggcttggaagcggcggcgggaggcatcgacgaggtgatttcccggcgcattgcccggctctccaaaaaggttcaggaaagcgtccgcggcgccagtgtgctgggcttccgcttcaatgttgtcctcctctcccacatgctcgaaggcaaccccatccagcaactgggcaaagcggggggacggaaaatctggcaggatgccgatgaactcttttacatcttttcccacagcctgttacagaaggcggtctatgccagcatccgcgaaaaggagcttaaaaaactgcacctggcggccgccgaagccatggaaaccgtctttgaacaggcactcaaggagcattccgcggagatcgcccgccacttcaaagccgccggggaactcaaaaaagccgcccattactatgagatggcggccgattacttctgggaccgcatgctgctggccaagattgaggaatgtatgctgctggcagccgagttgtcctgccaggcctggggcggggacagcccggaacacatcgaacggctcttccatctggccctgctctatcactatatgcaccgcatggacgatgccgagccgctctatctgaaggtggtggaggccagaacccgccagctcgggccacgcagcccccgcctctccccctatctgaacaacctgggacgcttttacaaagataccagccgctacgagcaggctgaaaaactgctgcgccgctcgctgaatatcgaaaaacgccccgggcccagttccaacgtggcagaccgcatgaacaacctcgcctcgctctacagtctgatggacaggccggacaaagcggaggagatgctccgcgccgcgctggaaatgatggaaagccttttcccacaggggcactggtttacggcggtctgcgccggaaatctgggcagtgtgctgctgcgccagggacgcctggaagaagcggaaccactgctcaagcaggcgatagacggccataccctccactatggcgaaaaccattcccagacagcccattacctcttctctctgggcaggctgcgcgccagacaaggcgacacaaacaccgcccgggaactactgaccagggtgctgagcatctgggaaaacacctttggcaaagactatccccgctgcaaaaacgtccgcgaagaactggacaagctttcctgacacgactgctgtctgcacgctgaacaggcgggaaacgggggtggctcctctggggtgactggatcccgggtcaagcggttcacgcagatatacgcggataaaggcgcagatgagcgcggattagtattatggggggaggtttcggaccagggctgccgaagtctgttcggcagaggcaacggagttgcctttttgggagagacctccggtctctgtggcaaacggactttgccaccccactcatgatgacacagtatatagcatggtggacttgtttcgggggaaactttcctccattccaccttttcacctttccactctcaaagatccagtcgatcctgtcatccgcgttctatctcttttccgacagcaccacgttaccacgacaccacgtcaccacgaagtcctcctttccacctatcgtagcacctatatattatagagggatgggcctcatttgcattcccctctccggcgtgggtcatccggcagtcatccttaacccggtgagggatgacctaaggatgatgactccaaagccagtagcagcaagggacggcgctatgaagcatattgcggaatgtgttggatatttaatgcgattgtcaaataattgatgccggttgtttttggtctgggtgcttgtttgggacttgaaaagacagaatcaaggttcaagtggttcacgcggttcacgcagatatacgcagataacttaagggctgccgaagtctgttcggcagaggcaacggagttgcctttttgggagagacctccggtctctgtggcaaacggactttgccaccccactcgtgatgacacagtatatagcctggtggacttgtttcgggggaacctttccaccattccaccttttcacctttccaccttcaaagatccagtcgatcctgtcatccacgttcttttcaggagagtagaaaaagccccggaacctttcggtcccggggcttggttataggttatatcccgatgaattacttcatcatgatcatctttttggtgctgctgtatttgccagcgctcatcttgtagaagtagacgccactggagacagctttaccagcattgtcacggccgttccacacaatggtgtgcttgccggcgttcatgttgtcgttcacgagggtcttcaccagttggcctttcacgttgtagatattgacctttacgtggcctttatccttaacgctgaagctgatggtggtttccgggttgaaggggttcgggtagtttccgtgcaactcggtggcgaccacagggacgataggatcgtcgctgtcagttctgccggtgatatggaagtcatccagcatgaagatccagtggtcatgggacacgcactggatgcccacgtaggtgtcaccatcgtagttgctgagattatacacatactctgtccaatcaaggggagcttcgaggggagtgctgccgctgatgatggtgaagtcggaggggttggttccagtggtggagacaccgatcttgaacttttccagtcctccgtactgcgccgtcagggagcgtgcccagaagcgaagttccagcggattgtggagtacgggagtaatcaaccagtcgttgttgggaggggtagttgcggcgatacaggctgccattttatctcctccgtgaggtacgatggtagtggcgggaggagtggtggcactgggattgaagatgatgtaggcctgtggtgtttgggtgttaggccaggtggtattggtcatgccataggtcgcgctgccgtcaacgtcaaccgtggtccagggcgcgaattcgataacgaagttttcgtaggactcaaatccgtccgagagcagcacattgctgatcggcagctggaagttcaccgtggtggtctggttggtaacgacaatcactccgtcctgggtgacaggtgtgtagttcgggtggctggcggttacgctccaggtgcccgcgggaacctgcatgctgtaggctccgctggcgttggtggtggcagtcacgtcgccgcaagatacggttgctcccatgatgggggcgttggccatatcgcggacgataccggcaatggttccgatctgggtaagtttctgcacagcattggagaaggctggcagggattgcgcttcgccggtgtagatggctttcacagcccatttgtaccagccgtcaggcacgccgccccatccgttgtccggccaggcagtcgcggtgatgggtccggtggtgagctgagtccaggctgaatcgttgttttcctggccttgcagcaagcgccagactctgtagccgacgaggacacggtcgttgtctttgcaggcactgatgtctttgctggctttgatgttgtcggacgggatgtgtttgaggatgctgggatcgatcgcgcacacatcgttgggagctgaatatcccacgtagccgcggatgttccagttgtagttgaggctcggagccaggtcggtcagagttgcccattcaccggagttgtagatcatgttgccgaagccgttggtggcggggccgccgtcacagcctgcgggataggcgcccgcagcatggctgacgttgtagccaaaccagagttcctcgttgcctgaaataagcacggggttatccaaaaccacggtttggaacgtgtctacggcttgcacggtgaagggttggtcaacaacctgggtttcgggagcgctggcggtgccaccggtccagacacgcagggagtaggtgcccacatcgcctgggaagagggatatggcgtggaggctcatgccggcatagtcggtaagagcggagggcgggaaacgaatggcgacactgaattcaccaccggagacgaggccgatgctgtcatcgttttcgccggtgtcgtagtagatccattcgccgccgccagtgccaggctccatccaggtcaagttgaccaagctgttgctcactgccacggcttccaccgcgcaaggaggcagggtgatctctgtgagtacgaagtcctgggtggtggtttgcagtccggtaacgctcacaccggtctgggaagcggcctgatagccgactttcgagcaggtgacggtgtaaactccctgatagacgctgaaggaataatgtccgttgttgtcggaggtgccgctgtaatcgccggcggtgatggtagctccttcgatcgggacgttggtgccgaattcggtcacggtaccggtcagggtgcccatcatgcctttgtgtatctcaccggagaagacggcgggggacaggacgttgttggtgtaaacagctttgactgcatatttgtaaacgccggaaggcagcggggcccaggcgttgtcggtataggtggtggtagtgctgggaatgacagatggggtcagggtcgtccagagtgactcgttgtcctggttgtcagcaagcaggcgatagaccttgtatccaccaagtacgcggtccgaattggaaggagtgaacatctggaagtctggtacctgaatacgggggttattggcatggctggttcccacgttgcgggatgccgaagccgcgtttccaatgcttctggtaacaattgaactggtggagaagctctgggtgttggtattacgggagctgaaggaggaagcggaggcaaagtgttccttggctgtaggaacggggcccacgctcacatcgtccaccacgaagtagaaggcgtcgtcggaaacgcactggatggcgaagcggatgttctggccagcgtaagcgctgaggtcatagctgtacagtgtccattcaatgggcgcctggatgtagctggggccgctgatgatggtgaagtccgcgggggcagtgccgccggtggaaatacccactttgaagcgttccaggccgtaagcatcgctgtaggacctcgcgtagaagttcaggaactgacttgcggtcgcgatcatcggcggagagatcagccaatcgtcgttgacagcatcagtgctggcgaagcaggcagccattttgtttccgctgtgggcggtaatagtggtaaccggcggagtggcagcgctggggttgaagatcatgtaagccatgggggaatagacgttcggccaagtgtagccggtcataccataagtgccgctttgatcaacgtccaccagaacccagggatcgaaggtgagggagaagtcttcgtattcctcaaagtcttcggagataccctgagcattgggatccggagccatccaggtgacggttacgtgcgaatagtccgctgcttctgtggcaaccacttggcagggagggaaggccagttcgttcacggtgatgtcgcccatgttcaggtcggtggtgccaaccacggcttggccgatggcagcttggtaaccgatggcttgagcggtgtattcgtaagtctggctggcatagacgccagtgatggtgaattggccgctggcgttggttgtagcctggtaaggctcgtaacctgtgaggctgatggtggcgtcagccaggccaactgtgggttggtcgctgcccacgatgcggccggtcacggtgacctgaggcagttgggtgagcacgaagtcctgggtgacagtttcatcttcgatgatggttacgttgtgggtaacgacgttgtagccgtgtttggtggccacgacgctctggggtcccatcgccacgtaggggaagttgtaaacgccgttggcgtcggtgagggtggtgaggg

SEQ ID NO: 563 - DNA, 18885 bp, Artificial Sequence
  Synthetic Oligonucleotide
ccctcaccaccctcaccgacgccaacggcgtttacaacttcccctacgtggcgatgggaccccagagcgtcgtggccaccaaacacggctacaacgtcgttacccacaacgtaaccatcatcgaagatgaaactgtcacccaggacttcgtgctcacccaactgcctcaggtcaccgtgaccggccgcatcgtgggcagcgaccaacccacagttggcctggctgacgccaccatcagcctcacaggttacgagccttaccaggctacaaccaacgccagcggccaattcaccatcactggcgtctatgccagccagacttacgaatacaccgctcaagccatcggttaccaagctgccatcggccaagccgtggttggcaccaccgacctgaacatgggcgacatcaccgtgaacgaactggccttccctccctgccaagtggttgccacagaagcagcggactattcgcacgtaaccgtcacctggatggctccggatcccaatgctcagggtatctccgaagactttgaggaatacgaagacttctccctcaccttcgatccctgggttctggtggacgttgatcaaagcggcacttatggtatgaccggctacacttggccgaacgtctattcccccatggcttacatgatcttcaaccccagcgctgccactccgccggttaccactattaccgcccacagcggaaacaaaatggctgcctgcttcgccagcactgatgctgtcaacgacgattggctgatctctccgccgatgatcgcgaccgcaagtcagttcctgaacttctacgcgaggtcctacagcgatgcttacggcctggaacgcttcaaagtgggtatttccaccggcggcactgcccccgcggacttcaccatcatcagcggccccagctacatccaggcgcccattgaatggacactgtacagctatgacctcagcgcttacgctggccagaacatccgcttcgccatccagtgcgtttccgacgacgccttctacttcgtggtggacgatgtgagcgtgggccccgttcctacagccaaggaacactttgcctccgcttcctccttcagctcccgtaataccaacacccagagcttctccaccagttcaattgttaccagaagcattggaaacgcggcttcggcatcccgcaacgtgggaaccagccatgccaataacccccgtattcaggtaccagacttccagatgttcactccttccaattcggaccgcgtacttggtggatacaaggtctatcgcctgcttgctgacaaccaggacaacgagtcactctggacgaccctgaccccatctgtcattcccagcactaccaccacctataccgacaacgcctgggccccgctgccttccggcgtttacaaatatgcagtcaaagctgtttacaccaacaacgtcctgtcccccgccgtcttctccggtgagatacacaaaggcatgatgggcaccctgaccggtaccgtgaccgaattcggcaccaacgtcccgatcgaaggagctaccatcaccgccggcgattacagcggcacctccgacaacaacggacattattccttcagcgtctatcagggagtttacaccgtcacctgctcgaaagtcggctatcaggccgcttcccagaccggtgtgagcgttaccggactgcaaaccaccacccaggacttcgtactcacagagatcaccctgcctccttgcgcggtggaagccgtggcagtgagcaacagcttggtcaacttgacctggatggagcctggcactggcggcggcgaatggatctactacgacaccggcgaaaacgatgacagcatcggcctcgtctccggtggtgaattcagtgtcgccattcgtttcccgccctccgctcttaccgactatgccggcatgagcctccacgccatatccctcttcccaggcgatgtgggcacctactccctgcgtgtctggaccggtggcaccgccagcgctcccgaaacccaggttgttgaccaacccttcaccgtgcaagccgtagacacgttccaaaccgtggttttggataaccccgtgcttatttcaggcaacgaggaactctggtttggctacaacgtcagccatgctgcgggcgcctatcccgcaggctgtgacggcggccccgccaccaacggcttcggcaacatgatctacaactccggtgaatgggcaactctgaccgacctggctccgagcctcaactacaactggaacatccgcggctacgtgggatattcagctcccaacgatgtgtgcgcgatcgatcccagcatcctcaaacacatcccgtccgacaacatcaaagccagcaaagacatcagtgcctgcaaagacaacgaccgtgtcctcgtcggctacagagtctggcgcttgctgcaaggccaggaaaacaacgattcagcctggactcagctcaccaccggacccatcaccgcgactgcctggccggacaacggatggggcggcgtgcctgacggctggtacaaatgggctgtgaaagccatctacaccggcgaagcgcaatccctgccagccttctccaatgctgtgcagaaacttacccagatcggaaccattgccggtatcgtccgcgatatggccaacgcccccatcatgggagcaaccgtatcttgcggcgacgtgactgccaccaccaacgccagcggagcctacagcatgcaggttcccgcgggcacctggagcgtaaccgccagccacccgaactacacacctgtcacccaggacggagtgattgtcgttaccaaccagaccaccacggtgaacttccagctgccgatcagcaatgtgctgctctcggacggatttgagtcctacgaaaacttcgttatcgaattcgcgccctggaccacggttgacgttgacggcagcgcgacctatggcatgaccaataccacctggcctaacacccaaacaccacaggcctacatcatcttcaatcccagtgccaccactcctcccgccactaccatcgtacctcacggaggagataaaatggcagcctgtatcgccgcaactacccctcccaacaacgactggttgattactcccgtactccacaatccgctggaacttcgcttctgggcacgctccctgacggcgcagtacggaggactggaaaagttcaagatcggtgtctccaccactggaaccaacccctccgacttcaccatcatcagcggcagcactcccctcgaagctccccttgattggacagagtatgtgtataatctcagcaactacgatggtgacacctacgtgggcatccagtgcgtgtcccatgaccactggatcttcatgctggatgacttccatatcaccggcagaactgacagcgacgatcctatcgtccctgtggtcgccaccgagttgcacggaaactacccgaaccccttcaacccggaaaccaccatcagcttcagcgttaaggataaaggccacgtaaaggtcaatatctacaacgtgaaaggccaactggtgaagaccctcgtgaacgacaacatgaacgccggcaagcacaccattgtgtggaacggccgtgacaatgctggtaaagctgtctccagtggcgtctacttctacaagatgagcgctggcaaatacagcagcaccaaaaagatgatcatgatgaagtaattcatcgggatataacctataaccaagccccgggaccgaaaggttccggggctttttctactctcctgaaaagaacgtggatgacaggatcgactggatctttgaaggtggaaaggtgaaaaggtggaatggtggaaaggttcccccgaaacaagtccaccaggctatatactgtgtcatcacgagtggggtggcaaagtccgtttgccacagagaccggaggtctctcccaaaaaggcaactccgttgcctctgccgaacagacttcggcagcccttaagttatctgcgtatatctgcgtgaaccgcgtgaaccacttgaaccttgattctgtcttttcaagtcccaaacaagcacccagaccaaaaacaaccggcatcaattatttgacaatcgcattaaatatccaacacattccgcaatatgcttcatagcgccgtcccttgctgctactggctttggagtcatcatccttaggtcatccctcaccgggttaaggatgactgccggatgacccacgccggagaggggaatgcaaatgaggcccatccctctataatatataggtgctacgataggtggaaaggaggacttcgtggtgacgtggtgtcgtggtaacgtggtgctgtcggaaaagagatagaacgcggatgacaggatcgactggatctttgagagtggaaaggtgaaaaggtggaatggaggaaagtttcccccgaaacaagtccaccatgctatatactgtgtcatcatgagtggggtggcaaagtccgtttgccacagagaccggaggtctctcccaaaaaggcaactccgttgcctctgccgaacagacttcggcagccctggtccgaaacctccccccataatactaatccgcgctcatctgcgcctttatccgcgtatatctgcgtgaaccgcttgacccgggatccagtcaccccagaggagccacccccgtttcccgcctgttcagcgtgcagacagcagtcgtgtcaggaaagcttgtccagttcttcgcggacgtttttgcagcggggatagtctttgccaaaggtgttttcccagatgctcagcaccctggtcagtagttcccgggcggtgtttgtgtcgccttgtctggcgcgcagcctgcccagagagaagaggtaatgggctgtctgggaatggttttcgccatagtggagggtatggccgtctatcgcctgcttgagcagtggttccgcttcttccaggcgtccctggcgcagcagcacactgcccagatttccggcgcagaccgccgtaaaccagtgcccctgtgggaaaaggctttccatcatttccagcgcggcgcggagcatctcctccgctttgtccggcctgtccatcagactgtagagcgaggcgaggttgttcatgcggtctgccacgttggaactgggcccggggcgtttttcgatattcagcgagcggcgcagcagtttttcagcctgctcgtagcggctggtatctttgtaaaagcgtcccaggttgttcagatagggggagaggcgggggctgcgtggcccgagctggcgggttctggcctccaccaccttcagatagagcggctcggcatcgtccatgcggtgcatatagtgatagagcagggccagatggaagagccgttcgatgtgttccgggctgtccccgccccaggcctggcaggacaactcggctgccagcagcatacattcctcaatcttggccagcagcatgcggtcccagaagtaatcggccgccatctcatagtaatgggcggcttttttgagttccccggcggctttgaagtggcgggcgatctccgcggaatgctccttgagtgcctgttcaaagacggtttccatggcttcggcggccgccaggtgcagttttttaagctccttttcgcggatgctggcatagaccgccttctgtaacaggctgtgggaaaagatgtaaaagagttcatcggcatcctgccagattttccgtccccccgctttgcccagttgctggatggggttgccttcgagcatgtgggagaggaggacaacattgaagcggaagcccagcacactggcgccgcggacgctttcctgaacctttttggagagccgggcaatgcgccgggaaatcacctcgtcgatgcctcccgccgccgcttccaagccctcttgcgctatttcgccgtggggactgagcagcttgttttccagcagataagcggcaagctgttcggcattgaaaggattgccgcccgcgcaggcgtggaaagcggaaaaggcctcgcggggcaggcggggaaggcccagcagattgaggtagagcttgcggctggcgctggagttgagggagcccagggcgaggctctccaagccatcttttttgacggcaagctccgcgggcagcctgcccttttccgtccgggcggtagccagcagaaagagcgggcgcacgccgtgttgccacagcagttccaggaattgacggctcaggggatcgagccattggacatcgtcaataaagataagcacaggggatttggcgcacagccagcgcaggtaatccagccaggcctgctgctgacggggcagcctggcttcgggggcgatcccgcgccagggcgagccatcccaggagagattcagcagcgaggcgagggcggcttcgcaatcctgtcccagcgaggaaccgcgggtgcgcttttgccacgcttcgcggaaatgctgcaccgcctgcgcgggagcctcatcctccaaaagccccaaactggcacgcagcaactgggatacgatatccagagggaggggggaatcctgcctgcaagccagcagatacacctgccgccggggagtctcgaaggcgcgcaaagcttcgcgtgccaacctgcttttgcccactcccgccgttccatgcaccaccatcgcctggggcgaggaggccgccaaaccatcgcgtatcctgctatgcagcagagcggtctccttctccctgccaatcatgcaaagcggttgtccggtgatcagttgccccggcagcatgcccagacggtaggcgcggggcgcggcttttgaggcggctttttcccttttgaggggggtgaagatgaaggagttgtgctgctggttgcgcagcttgtggtcggcgagggcttcgccggggcgggcaagctccaggagcttctgggcgcgggtgatggcttcgcccgggaagaaggttgccttccacaggtctttgccggcagccatggaaaagatgtagccggtgcagcaggcggcgcgggctttgtggcgcgtggcagcttccaaagccaggcggcaggcgcgctgcattttgttgaccttgttgtgggggaaatcgaagagcaggatggcatgcagccgcttgtgccgcacatagatggctgccaaaaaggcgtcgtagatcaccgccagcagttccagcgcctggatggttggctccagggggccgtccggaggctcgtccaggctgaggcagcagcaaacgctgtgccggacgtcagccgcgggattgagtctgtgaaagcgggaatgaatgaagtggtggccgtgttgcttgcccaagcgcttcctttccggaatatcaggcaactggggaaagggcggatgctcggcaagtttgccaggcctggcatccaactcccagcccagtctgttcaatgcctggggagagtaataaggttggttgggctggccggggttttcacgcaggacatccagttggggagaccagaacacatattcaaactggagggggttctcaaagatgcgccaggacagggtgccaaaacccacggccaggcggattacattcggcattccatgatgggggctggcgtagctgttgatcgcaccgatagtgtgattgatgcgtgccagcagcgccgcgatcagcaccggagtgctttccggcaacagggcgtggatgcagtttccctcatactggaagagcagtccgcctgcgttcctgatcaggctcagcatcctttcataggcttcggtgaaagttgcttccatcctgtcaatcacctgctgccgctgcttgagccttactcctttgatattgtaagtggcaacggtgcaaaagcgcaggatatagccggtgatctgcccctgcaggatgttttgctcatactgctgcaggatgtagctgggcaccacgcggttcatatctggctacctgccttgcctggcttaactataatctcctttctgcctacttatcccccaggctcagattggcgaaggcggtgagggtgatctccgcgtccgcgctttccagatagctgacgcgtgcccggtcgcccgcgcgggtgatgggcagacggctgctcaggttgctggaggcgataaagattatatccggcgcttcggtcagggtaaggtagtagtaggtgcgtccatccgtggtgtccgagccaaagcgggcgatggagcctgtgagggtggcctgcttgtccgctgcctccggggatatccccatccggcttccggccagggccatctgatagttgtcgcgcgcgctgcgcacgctttcacccactcccaccagggaaaagtcgcgcactgaaacgaagctgaacatcttgattagcccggcgctgtccttgagggtcataaaataggtcggcttgccgttcatgttcaccaggatggggaaggtggcatagtatttgaagttttgcaccttgccttcggcggagcgcatggcggcagtctcggtggcaccggagaccaggtagaggtggctgcttttggtgcgggtgtccgtgagcgcaaagcccaccgttccctcgtccgaacccacgctggtgaggccggagtagaaatagctgcgctgatcgcggccatagatcacgttgtaaccgggcgtcacccgcagcaggtcgcgtttgccgaacacgctgttccaaaagccgtgcacatatttgccccaccaggaaagctggggaagcacaaagtaggagggctggatgcggtcaacccaggcgggaatcttgctgtcgtcatagatgccgccgctttttttgaggggaaagtatttgatctcacccgtgccggcatgcacgatggcgagtccggtggcttccggggcactcactccgatcttgtgggtgtaggtggtgatggtccagtagggttcgccattgtcgtccagttcaaaggtatcgcctgccaggccgatgcccgcgaagccgttccaccagagatggcggtagaggtcttgtccaaagtaggcgttgcgctgatagcggatttggatgggtttgcctttcagctcgcgcacaaaggtgatatcctgcggattggtggccgagaccttgatgtagcccggggtgcctttgcttgtgttggtgatccacttccagaagccgctgtgcagcaggggacagacccagaaaagcttgccatccaccatctggatggtcgggttgccgagcaccacccggctgccgagggcgaagtcctcgcccagtttcttggctgccaaatccttggcgaaagcggaatccaggatcggcacctgatccagattgaccggcgccaccaggtcggaaaactcggtcttttccacctcgccgatcatgcggcggtagctgccggaattgaagatgccggaagagaagaagggcgccaagatcagccacagcgccagaaggggatagaccacatagaggatcttgcgcaggcgccggattgccagcagcggagccaggcagatcatcagggggacgatccagtccaaaaagcggatatgcagcaccggaagcacaaagtaaagcataaaacccagcagcaggacggacagcactatggcaggcagggctttgatcctgaacttgggaaacttgatcacgacaggtttgggcgtttgttgttgaaacatggtaacctccctgaactaagctttgtttttatactctaccagatggcggcggatttgtcaagccggaatcgctgcccgcctccaatacagaatggaaaaaagtggactcggctcgaagaccgctcctatccttgcggatacagaggcgcgaccgcccgctcaaacactccctgaaccttggaaatggccagcccgtaattggtgatcggcactccgcgccgctgggcttccacgatgcggcggctcatctccatctggttgagcatgcaggctccgcagtggatcaccagcgcgaattcctccagattgggcggaaagtcgtgtcccgcgtaaacttcatactccagttccttgcccgtgaactggctcagccagcgcggaatcttcacccgcccgatgtcatccgcctgcacgtggtgggaacaggcttcggcgatcaggatcttgtcgccgtcgcgcagcttgtcgatctgcctcaccccttccgccaggacgtccagatcgcctttgtagcgggcaaagaggatggaaaaggtggtcatcttcacctcggggggcaggtcattcaccaccttcagcaccacctgcgaatccgtgatcaccagatcaggcggctccttcagggtttgcaaggcataggccagttcccgctctttcaccaccgtcaccaccgcgtcgtgatccagcagttcgcgaatcacctgcacctgcggcaggatcaggcgtcccttgggcgcggcgaggtcgatgggagtcaccagcagcaccctgtccccggccttcaccaagtcacccgccagggggcgctcctccagcagatgggcgggcgccagcttgatcagcagttccttggcggcatcgatgttttcccccttgagggcggagacggagacccagggcagtccccgttcctcgcaccaggcgatattggcgggggcaggctcgcgcaaatccctgtggttaaagaccattaacagcggtatcttcatctcgcggatgcgtttcagggaggacagctcgctctccgcgaaggggcggccatcgttcacaaacacggctatgtccgtgcggtaaagtatcttataggtggcgagtacccgtttttcgcccagttcgccgctgtcgtccagtccagcggtgtcaaagaaggtcaccgggcccaggggcagaagttcatagcgtttgtccaccgggtctgtggtggtgcccggggtgctggaaacgatggctatctcctgtcctgccagggcgttgatcaaggacgattttccagcgttgcggttacccagcagggtgatgtttacgcgttctccgcggggtgtgctcatctatcttctcccaaaaagtcttgcggcttgcggccgctaatagcttttattatcagttctttcatgtttctttccttgtcggactggataccagcccatgtaaaaataatatatgtgaaaagcgcgaatctgtcaagcaaagagaattctggcagacaggggcctgtgtttttgatatatccacaaattacacaaattaacacggattaaaagaacagaataaggacaagtgtccagcctaaaaacaacaaccagaccctgaaacaaaccgccaccaagccctaaagccgtgtcatcccgggctgtcggggtcaccgccaaagcgcgaagcggtttggtggggtggcttgacccgggatccagtcttttaaaaacaaccagcaagccccgaaacaaagcacaacagactaaaaaccgtgtcatcccgggctgtcggggtccccgccaaagcgcgaagcggtttggtggggtggcttgacccgggatccagtcttttagaaacaaacgcgtaaggttttaaaaaagcaggcacctttccacctcaaaacacctttccacaaattctccccccatatatataggtgctacgaccccttcatgccaggcgggaagcggatcccagggcaagtatatatatacttgcccgtaattgcgcggccatgggctggctgccctccctttcccctcgcgcgcgggtggctctcatttgcatccagcgttttggcgtgagtcttccttaggtcatccttataatttataaggttgacctaaggatgatggcatcaaatccagtagcagcaaaggagggcggtatgaaggattatgcggaaggttgtggtatttttgtggaaaggtggaaaggtgcccccgaaacaagtccaccaagttatattttgtgtcatcacgggaagtcggggccccctctggggtggcttacccgtgatccagtctttttaaaagaaacatccacaaattacacaaattaacacgaattaaaagaacattaaagagtcaacacacccgactccggaacaaaaccctccagactaaaaaccgtgtcatcacagcctgcgagccgtgatccagtgcccaggtgtggcaaagtccgtttgccacagagaccggaggtctcttccaaacaggcaactccgttgcctctgccgaacggacttcggcaacccttatattacaccaatccgtgtcaatctgcgccctttatccgcgtttatctgcgtgaaccgtggaacccgggatccagtcttttggaatgtttgaacttcgctgaaaacatttttcgctaccaggaatgaaaactggacaacaaacgcagcttgggatatctgacactaagagtgtaattcacacgatcaataagaacatagcgtgctgtgcatacaaaacatattaccgacggacttctgttctgaaatatggacgttttgaacttggtaaacagtccgtatatggactaccagctgggacttgccattaggcatatgcccgaatgtaaagctatattcttatataacgcattgtagacagcacaggttgttctctgctctttccatattacactagtggtcatcatttcaccagtaggggtttttttacgcttttttcccgggagttttcatgtaaagcaccctactggacaaagagatgggagccggaaaacacagcctgaactgggacggcaccgactccaacggcgcccaactggcaagcggagtctatatctaccgcctcagcaccggaaagacgagcgccagccgcaaaatgatattgctgaagtgacggacagccgcccttccaagtccgataattaacttgaaccgccgcgcattacacacggcggttctttccaacaagccaagtatcagcagcgggaaaactgcgctgaaaaagccgctggtggggctccgtaaaatgggagtggaagccgccgcatggaacaccttgaaagtaacaagataccgccccaaattgatctttcctaacccaaaatccgcaaagcaaatttcttgacaatgatctttggcttaaatataaggttcctatcgaacaaaaggagcatgttatgtacaatcttctttgtgataattgggtaaacgtggtctatctttcgggcaaaccagatagaatatctttagttcaaactcttgaagacgcacactgtctgcaactggcatacagcaatcctatggaccggttcgctgttttcagattcctgcttgctcttggctactggtgtttcgccaacaccaacggggagcctgaacctgataagccgcttccgacctcctggatatcctggctggaagaaaacaaggggtatttcgagctttttggggatggacagagatttttccaagccgatcccagttccaggatcagagccattaccgaccttattcatgagataccaacagctcacaacctatgccatttcaatcatgtcaccgactatatcgatgggctctgcgaagcttgctgcatcaagggactgctgagattacctgtctttaccactgtcggtggcagagggataggcgcgggaatcaacaacactcctccattttacctgctctggcatgcaaatgacctcgctggcatgctggttcaaaattggcaaccctgggataatatggggattccggcatggttgggttcttttcaaaaagaaagcaggaaagtgggcttacttgccggaatgacctggctgccgcgcaaggtgcatctgcatgatcctgtctcaggtcaggcagcatgttgttcctgcggcttaccctccaaagctctcgtctattcctgcagcataaaacctgaaccagtgccggaaggccttaaatggaaagaccctcatggtgtttacaccgatcagggaaaaagtctccagtccaaaatcaaactgatgtccaatgatagatacactttcgcggaccgggattggtatagcccgttgttcagctatttgcacgcggaaggaaactccagacaaggaaaactatggttggttggatttgccagcgataaagcaaaaagcatagacatctgggacaagatcatcgagcttgagggaactgatacaaatgatgagctactggctcaattggcaaacagggctactgcccttaatgccatgcgcaagaagcctctcagaggtgatttcaaaaagtcagtgggcactccccagattgctgacattatcccccacgccgaaagcagaattgccatcaatgcgggtaaaatgactgagaacaggggctattcctggcaggatgccgatactgaatacggagaactgctcaccaaggttgcatgctctttggagccggctcaaacagtggacgccaggctcaagagaggtaaattcatttcccgcaagccctggccagttataccagaatccaaaacaaaacccgcagaggaggaccagaatgaatagaggaaccgttgacttcattgcaagcctggagaacctcaaagaaggcgatttgggcattcttagaaaactcaggggagcccggcttgatgaaaagcttcccggatttgacctgttttccgccctatggtggcctttgcggcaaaagaatcaacgcgctcccaagcgtgaagtggcttggttgatcgccaaactttttgctgaattccgctttgaacagcgcgagggagccacattgcccattcttatgggaggcatctgccggaagttggaacccaaaaaggaattaccccgtgtattggcacgctttgatcaactcgcatcgcttgacattatgcagatggaagagccgctgtcggtcattatgggtatcttgcgcaagcaccagcaggtctgcctggactgggtagggcttactgatgttctgtcattttgggagcaggaacctgtcaaaagagaatggtcggattcatttattaaagcatacaagatcaacaaggaggattcagatgttgattgaaattcatatgattcagaatcacagcccggcaaatcttaaccgggacgacttgggcgcccccaagacctgttatttcggtggagtattacgttctcgcatctccagccaatgcatcaagcgcagcatccgttttgccccggaattcgcggaccttagaggaggtatccgaacaaggcgtctggcagagaaacttgaagaaatgctggaaaacaaagataagaagctggttgccaagtttcttgaagcctgcggaatcaaaaccaaatcttccaagaaagctgcaaaaaagtccgaaaagatacccgcggaagccgatgaagatcaggatgagcagcaggcggctgatacatctgacatgctggtttttaccacttatgatgccctgcgccaaatggcagagctgctttccgactccaaactaagtgaaagcgaaaaactgctgcagttcaaagatttgctcacaaactgcgtccattctccggatatagcactttgcggcaggatgttggagaccaaagagcttaaaaacactggcgttgaaggcgccctacaggttgcacatgcgatctccacccacattgccagacctgagatagactattttgtggcggccgatgatgttcccggtgaagacgccggagcgggtcatattggcgaatccatgtttgcctcagcctgtttctacaaatacttctccattgattgggaacagttggtcaagaacctgaaaggggacacgaatctggcagcccacaccgtgggtgcctttctcctcgccgctgccaaaaccaaccccagtggcaaacagaacagcttcgccgctcataactatcccgatggcatccttgttgagttcaagaattcccctattagctacgccaacgcattcgtcaggccagtttccgtggtcaaggaatcggacctggtggaacaaagcatcggccagctttccaactacgtgaacgacatcaggcttggctattatgatgagcaatccccagttatcagcttctggttttctccaaacaatcgctattcccttggcaatgagcattccaaactggcttccagaaacattggcaacctcaatgagcttgtaggcgctgtgttggattatattggcggcttcaagtgggaagaagttcagaaaagcaaggcttatgttggcggctgacatgagtgcgccacccaacaccttattcttgcgcttggagggggctttgcagtcttggggcagcaacgaggctaagtttgctttgcgcaggactaccgacgctcccacaaaatcaggtgtcctggggctgctttgcgcggccatgggaattgggcgcgcggaggctgctgattcatggctcccaaaactcgccaacctgcgcatgggcgtgcggatagaccgccccggcatacgctggtgggacttccatactgttggagcgggacaaagaatgcgcatggcagagctgaaggcacccaaaaaaccttccatggttggagctgccctggctgataccctgacaccaagcaaagtaaaaaccagggcagagaccttgctctcacgccgcgaatatcttgccgacgccagttttctggtcgccttgcagggtgagccggaacttgtggaaaagctctccgccgctctggccaagccggtctgggcaatttatctggggcgcaaatcctgtcccccttcacgtcccgtgggcgagcatgctccgggcttttataacactttggaggaggcgctgtccgcggttcccctgcaaaagcgctggcacaatgaacccctgccgcaaatactgccttgcgtcatggactggatccccagccaggacggagaacatgcgcctgatgacgcggagattcattacgatctgccggtttcttttcagccgccccgccatttgccgcgcttcgtgatcaggcgtgagctggttgtgggagaggatgtgcaagtgagcagggaaaccggaaccagcgtttggaggcccaaaggaacccgggcggattataacaattccgagtataagaaggtcagggcggagcggcttgtgatggaccatgccgcgtgcatggtatgcaaagctcccgccacgactgttcaacacgtgaattaccgcagggcgggaggcaaggaaataccggaagacctgcgggcgctgtgccgcctctgccacgacgcctgcaccatgctggaatacggttccggcatgaccaccgaccgcatcgacccctgcgaccccatctggcgggagcgaatactggcaaagcgcaaagatatagtcgagttccgttcgcgcgggcagcgtttccgcaaaatgaagccagaggaggaaaacggatgatctacttgtccaagctattgatcgatactggaggcaatccagaccgtccccgccccggcagaaagtggctggacaatatctataacgtccaccgccgcctttccatggcgttcccttcaggtttgcgccgggagcaggatccgcatttcctgaagcccttttcgccaaacgacttccaaaaaactcccttccttttccgggtcgataacaacatcgacggaaacgataaaagggcgattattatcgtccagtccgttcttgagccggattgggattattgcttccaaaacgcgcttgatttcctggcagcgccaccggaaacaaaggagtataatccagagtttcaagcgggacaactgctccggttcaggctgcgggtaaacgccagcgtacgccgtcatattcctgagaaggtgcaacaggacggtcaaaccatagaaactggcaacatcctgcacaaaagggtttctctcacctgggatccctcttccaccccggatcaggcccttgccgactggctggctgccaaaagcccaaagctgggcttcacccttcagcgctgtgagcttcttcaactgggttgggtttatggctccaagcctgaacctaaaaatgtcaaagcaaaggaacagggacagggctactggcgtgaacacacatacaatcctctgcgcttccgttcggctctactggagggaattctcaaagtggatgacccgaaactgttcctggaaacgcttagaagcggcattggaaaagcgaaaagcttcggctttggcctgctgtccgttctgccaatcaggaatgatgaataaagacctgcactctatcccccggatcagagatcggcttagctatctctatgtggagcatgccaaaattgatcagaacgggcaagccatcgccattcacgatgccctgggagaaaccccggttccttgtgccggcttggctatgctgatgctgggaccgggcataaccatcacccatgcggcaatactttcactggctgcctgtggctgtctggtagcctgggtgggggaacatggcgtcaggttctatgccgcaggcacaggtacaacccgtagcgccgtcaatcttatgaaacaggcaaagtactgggcagacccggttttgcatttacgggttgtgcgctccatgtatcagttgaggttccaggatgagctttctcctgatttaactttgaaccagatcaggggcaaggaaggtgcccgggtgcgcgatacatatttccaactctcccaaaagtatggtgtgcccatgcagggcagaaactatcaaagagacaactggaataaagcggatcccataaaccgggcattatctgtggcaaactcctgcctctacggcatatcgcacgctgccattgttgctgcaggattctctcccggattgggctttgtccacactggcaagcaactgtcatttgtctatgatatcgcggatctatacaaaatggaaatggctgctcccgccgcattccgggcgaccgctgaagggatcggcgaactcgaccgcagagtcaggcttgcctgccgtgatgaattccacaggcagaatctactcaaacgcattgtcgcggatattagttctctcttcggtgatattatgccag

SEQ ID NO: 564 - DNA, 18588 bp, Artificial Sequence
  Synthetic Oligonucleotide
ggatcatattggattcgctgttttccccgagccgtgcgacggttcatccccacgcgcgtggggatcatcaaggtgggttccgcccgacacacgattcccccggttcatccccacgcgcgtggggatcatactggcttcatgggccattttccttagttatgggcgttttcggcaggagaagtccttcgaagtcttcgatggttttgctggtccggccggatgttttgatcgagaatccctgttcggttgcatcttggtagacgatgagggcagcgccgccgcgcttcgacttggtcaccttgtcccagagcaggtcccggacccgcgaggagacacgcccgacaaatacccccgtcttgggctggatcagccagcgcgtcagttcaccccgcagcgagggcgtcactcgctccagaaccatcacgatcatcggctttgccctctgcagacccttcccttggaaaggcgtgcattttcagcacttgcccaataggcatattatcggagatagactggggctgccataagtcggccgggcgtgcggcgtcagcagagaattcgtcctctgcggcttcctttcggggcacatcgagcgtcttggcgatatccggcaagatacgctccatcaatcgtgtctgacgaaagcgatcccgacaggtgatccggacctgatgctccaaatcggacgggttggtggccgctatggcaaaggccgccggaatcgtgtactccaccttatacagatcggcgatgtcgtatacgaaggaaagctgcttgccgcaatggatgaatccgagcgccggcgagtaaccgccggacagaatggctgcgtgagccaagccgtacaggcaggcgttggcggccgagagtgcccgattgacagggtcggcggcgttccacgtgtcccgtttataggccctgccctgccaggcgatgccgaactcgcgcgatgcctgtgcatacgcttctctcacgcggattccctcctttccgcgaagctgctgcaaggtgatatcgggatcgacctgctcgtcgaatcgcatgcagtacatccgcacgacgacctgcaatcgggtaatgtcgttgctgaccagagcggcctgccggatgagatttcggctgtggcgagcgccgccgaggccctgggcatagaaccgcacgccgtgctccccgcaccacaagacttgacaattgttgtcgccgagggtcttgaccgccgcgtgcgtgatacttgtgccggggcctaagagcagcacagccagagatgccgccgggaccgatacgctgccatcggcacgatgtacggcgatagccttctcgtggcggtctacgaccgcgtgttccacgtacaaatagctgagcttgtccgcgaacctgggcagttcctggagattctgcatcaggtaatgcctcccactatccacttatcaaagagcaatatcggcgttttcaggcccggccttgaatcaaatccggatcggagctatcgacagcaacccaaacccaaacgccttggccgacccaatacccgaggcaacggcctgggcaaacaccggagcatcggtgaccgcaagcgttccttccagcaaggcggatcgaaatctcatctggcgaccggaattcttgtcgctgctttcttctcgttgcgttttcgctttggaccgatagcccaccacccaacccagatgcagcatgcgaaagtcgcacagtgagaagccgcatcgcttggctttggaggtgaaccattcctggactgccacttccggtccccgatccttctcccaagtcagcgccacgcgtttgccttgcgacttcggacgaccatacacgtcagtcctctcactctcctgttttcgatgttcgcggctcttcttgctcaggttgacccggatgcggaatcgcaggtcctcaccggcccggaacgttggattgtactgcctgctctgtggttcggcagcgagcaggatgcgcgcgttgtggaaggcatagtcccaatctggggccaagtccgactgtacaaggatgatcccgcgcgggccatcgtcctccacgctgttgtcaatgcggaacaggaagcggggatcttcgccgtcttgcgtgggcgtgagaaatgccatcgagagccgctggtgaacgtggtagatgttgcgcagccagaggcggccgggacgaggccggtcgggattgcttcccacatcgatcatgagatgcgagagatacatcattcgacctcctcggcggccagtttgcgccgccgcgtctccagcgagcggaacttgacgatctcagctctcttctggatgatcttctcgcgccactgttcctcttcggggttgatgcgatccaggcccatgcccaggccatattcgatcatcgtcaccgcatcgtggcacaggcggcagagggaccgcagttcgtcaatgcgttcctctccgccggcgtggcgaaacgtgacgtgttggacggtcgtcgcgggcgacttacagaagacgcacaggtatttgtcacggtcgagccgctcttcgcgcatcttcctgtattcggtgttccgatagtctgcccgtgggcgaagcggtcgtggagttgggttctgcgcgggtttttctgcgatgcggacctcgccatctgcacccacccgcaatgtccggcggataacgaagcggggtcgatgcgacggcggctcgaacgtcagcggcacgtcataccagatgagcgcgtcatcgggcgcatcgggctgctggtccgatggttcccagtcgagcaggcaatccgcggtttccggtgacggatcagcgttgaagcgtccccgccaagggatggatgtcaatgcggaaagcaaatcgggaaagacgccgggccgatgctccaccaacgggcgggatggcgggcaggacttacggcccaggtaaagcgtccatcgcgggttttgcattgccgccgccagttcggcaatcagcgccggatcaccttccagggcgacgagaaaggaagcatcgcacaggtactcgcgccgcgtgagcatcgcgccggacttggtctttccctccccttcggcaatgcgcatctgcatcttggccccgaccgtgtgataatcccaccaccgtacgccgggtcggtcgattcgaacacccatgcgcaagtcggcgagcctcggaagccactcggcagcttgggcacgcggaacgcccagtgccgcacagagcatcccgatgactcctgatttcgtcggggcctcggccgtgcgccggatgacaaacttggactcctggacaccccatgcctgcaaaggcccttccaaacgaagaaagagggtgttgaggctcatgccgccacctctgaattgatcactactctctgcacatcggcccaatcgagctttcccgggagggctttgatcacggcggggactaacgtttccagagagttaaagttgtgttcggcaagatcgatctcttgctgtctcttcttgccatcttcatctctgatctgcgccatcaagcggtactgcaaattgggcgaaaaccaaagtcgctcttgcggtttgccgtatccgacatccaggtcatgcacgtattgacccagttgcccaatgctctgcgaaatgatgtcccgctcgccttgtgccgcaggcttggcaaaggcattcgcgtagctgacgggggtgtccttgatctcgatcagcatcccatcgggcggattgtgtgcggcgaagctgttctgtttgcccgtgggattgaccattgccgctccacgaatgaacgctccaaccgtgtgggcggccagatgctctttgtttccctggaagccctcaagattcttgaggagcgtctcccaatggatcgagaagtacttgtagaagcaagccgaggcgaacatggcttcgtccacgtaggccgctcccgcatcgtcgcccgagatatcgtcggcggccacaaagtagtccacctcaggccgtgcttcatgcgttgaaatggcgtgagccacctgaagggcagcctcaaccgtcaaatccagtcctttccacacccccttgtccttggctccctcgcctccttcctcttttgcagaggaggcatcgcctgatttgcccttcttgcttttctcaggtttcttgggttccagcatcctgccgcagagcgccatgtctggaacggcagtatgctcggcgatcaatctggcgaattccgctgcaagtttctggtcggattctttcccgccgttcttcaggagcttggacatttcttcaatcgccttgcgactcgtgtaaacgcgcccggcgctcttgtcttcacttttgagatcatcgtcaccggcgccacctttcttttccttcggcgcgataccacagagtttgagaatcttcatagccctttcagactgggcgggatctgccccgttcccagcgatcaagtgagccaatctcctggtagctacgccgccgagcagcgtcttgaactcgtcgctcatacggatgctgcgcttgatacactgactggagatgcgcgagcgcaggacgccgccgaagtaacacgtcttgggcgcgcccaggtcgtctcggttcagattggccgggctgtggttctgaatggcatgaatctggattaacatgatggttccctttcgctgatctcgacgaattgtctcgcccattcgaggcgggtggtttcacgttcccatattgaaaggtcgtccgtcagtttgacccaatcgagtttccgaccgttcgatgcgatctcgccaagcacccactgtagcgcgggctcgatctggccgaccggcaggaccagcatccggtcgaacctcttctcgtatccttccctcgctctttcttcgtttggctgacaacggcgcaattgtcgggcaagataatcggcgggtgaatgctctatgggagagaaggcgtacagcttggcgatcagccatgccacctcacggcggggggcgcgctcgttcttctgtcgcaacggccaccacaaacccgcgaacaggtcgaacccatcgaccgattcatccaggccttgccctgcatgtgtacgcagcagcccaagttcacctgccttgagtctcgtcagcaggtcaatgtactggtctgttgcgctcacttgtgctctcctttcttccggcctggcttcttggccgattccactttgggccgcatatctggcgatgcaagggcaatctgctgccgccggtgaatggccgctgccgtgaagccaggggacagcgatctcgcgattaccttcatgagtgggcggtattccgcagccgcctgttgccacacctcatcagcgccgacaatcaactcacccgcttgcgcggacactctgccttcgatatcggggcgaatcgcggcgatagtcgctgaaccctcgacctctgatctccctatccgcttttccatacgccagccctccttccaccattgccgtaacaaggatgccaacgtttctttgatcgatgttcccggcggcacggcaatggtccactcccaagcatcaatgttctttgcttggtcggtggcaaatcccacgatgaaaagcgatgccaccgtcttttttgatccgaacctgtccgtttcgacaagacgggcaagcagatctggccatggacgatccatcctgaatttgcctgccgcagtcaaatcggccgctttcactgttcttcgtggcgttgcgtccgaatagactgcgtggggatcactccaaagggcattctcctgtctgccagccgtttgatattcgcaggtcaggatgagcggcgttcctcttgtgccacaaccaatgcacacgcccggccgttcgactgggtcatgtaagaaaacccgtctggacaaaagcgttagcccggtaagcaagggaacatcctcactgggagttggacgaacatcgggctgaacccaggcgggcgtgccaaggttcgcacatggcgaccagttcgcttgtagcgtctcccgcagcgacatgccccaaggcacaacatataccggcggagtaccattgacgcccgccttcagatcgggcaaaccgctcacggaaaacaacggaagtcgcaacaaacccagcacacagcatgctgggcaaagcccgtctatcttgtccgtcgcgtgacggaaatgccagaagttgttgccagtgggaatctcttgaatcagatccgtaaccgcacgggtcctttgtgcagtacgatcctgatagaagcgtcccgcgtcccccactaggttgaagcaatctctgttctcatcgagcctgaaaaaccactctgaggaaagcgaagcgacagaattggtgttcccttcatccggtgggtctcccttgcaccaatagagcaatgcgagtaagaaccgcagaatcgcgaggcggtccatgggattgttggccgcgatttgtcgaatgcggtcggcgtcctccagcgcctggcgaatcccgacgcgttcccacgttccatcgcagtaaaggacgggaatccagtgttcatccaacaggttgtagttcatagacgcctccctgtccttgcgaaaaggcccagcgcttcttccgcagttatgaccggccaattctccgccatatcgcggcctctcaaacctgtaaatgctcgtaaactcgactgaatcctaccccttcacatcggcgggagcaaggggattctggaagccgagacgtgcagatcagggccgatatcttacccgtgcgggcggctctttgcactcgccgtggcggcaagggctttcatctcttttccaggcggacggtgatggtctgggacttgatgtcggcggggctgttggctttgagggttatgtccttgcggaccggcttgtatccgggggcctcgacgtgcaggacgtggtcgccgggggcggcggcgaagacgtacccggataacgtggattcgagcggttctactgtcccttcgagcgagacatgagcgtcgtctcgcggcatggccttctcgtctacaacgagcacgatcagacaacccatccggcgttcaagctgcaccttcacatctacgtcaatcactttgtcctcgccctcgttgagcgtgaactccgtcagagcaggcattccatagaggaaggcagggtcggtgccgacgaagtacttgcccgcgggcaggtcagcgacggagaactgcgcaccctctctcgcaaggactaagccccaaatgtcctttccctcccgccagagggccagccaatttgcctcaccacggatgtggccggatatgctcgcactgcttcgcggaggggtcacagagatctgccacgggtcctgatcggccttgatctcgattttcgtttgccaccggacgccgtcccggcgaacgaccgtcagtacataggcgcctggtccgacgttgtcgatcagccacggcccgctcgcagaggtcggtgtctcagccgtacggaacttggcggccccgggccgatcattatccgaaatgaacgcttcttcgatctgccaggcggggtccgcctcaggaacgtggatggtcaccatcagcctggatgcgttgcggggaaccgtgcccagatcgacatctgcatctgcgaccgtgactgtcgcgatcttgagccagtcgttgcgtttgtccggccgctcatagtaaatggcgtgcgtgccccgaacagcgccggtgaatacaaaggcgccgtgctcatcggtccttgcgaagcatcggaatgcgccgaaatggggggaatcggtaggccccagcaggagtctggtgttggccagcgggaggccgtccacgatggcggcgccgctgactaagggcatgctgccgaagtccaggcgaatcgtctcgccgtcctggggcactacgactctgcggacgacgcccatactgttccactcgttggcgcgagttacgtagcacagggtctcgggcaggtgagcgacccgataaaacccgttgctgtcggtgaccgccgcgcccagccggccggcctccctgtcgcccgtgccgccgtagccgctgtcatcctggaagtacaagggctgagccgcctggggcacgccccgatcatcccacacatacccctcgaccgtgccgcccgccgtcagggtgatccggactccgtcggtgatcttgccttcagcgacctggacgttgtcggcgacgataaacgtatagtcagggtgcgtgaccttgagcgtctcggtgccgggcggcagattcttcagtgtgaaggcgcccgccgtcgtcgtcgcagcgccctcctcacacacgaagacgtctttggtccgcggcatcgcgccaccggccagggacagagggatgacctttgccgcatcgacgggctctccatttcgggtgacgaccatgcccgcaatcgttcctccaggcgacaaggcaatcgccgccggcgctatcagatcggtgttgatctcgtcgctccagagcggtgcatatccctcggcgaccgcctggacctgatagacgcccggcccgaccgtgtccatgctgaactgtccctgctcgttttcgaggtggacccaccgctccggctggacgtagttcggaccacgagaggtctggagcttcctcgcccggatgcggaaggtcttgatgggcgtacgcgtctgcctgtccaccaccgcgcctgtcagttggggcttggcggcgtacgccagctcgacctcaagtccctcgctcggcgccgggacatcacggagggtcttctcctcgacgcccgtgcccgagaattgcagcgtgtacgtcccgagctcgagccgattcaggacgaacgtatcgcccagcttgccatcgggtccgctcgcgatgttggcaaatgcgctcccgccggtcggcgaataggcggagatgctcacagaatccggcgttctctctccgacgaagatgagcttgccactgatggaggccagggactggggggatttgccgggcaggcgcacgaccagcggctctccgtcggccgggggaagttgagcctgcgctacgacggtggaggtgcccccgctgaagtccggcctggggatatacatggagatgtcgtatgtgccgggcgtgatgtgctggagcgtgaaggtgccgtccgcctttacgtcattgtccagcacactgtagttggagtgccaccaggtcggacgcgcgccgatcccaatgtccttggcgggcatgccgtcggcgtactcggcataaccctgtatcgcctggcccttttgcagagcgatctggacccgcctgatgacgttggggtcggtcagtcgaacggtcagcccggccggggcgaaatcatattccgagcgtccgaacggccggctggctcgatcttgcgcgggcaggtccgttgtacgccagacagtgagcaggcagtcggtctgagcgggagggatgccgccgagcaggatgtagccgttggggtcggtctgtcggcggggacttgtttcgccgagctcgcgcgaacggtcgtccgccagtgatgtgacgacaatgttcgccttgggcaccgggacgccgttcgggtccacgacccagacgtccaccatgcaggccttgggcaactggaagtgttggacggcctgcttgtcgttgctgaggtacacggccggaccctgattatcccgtgcgatgcccacgtactccagcgagaagactgcgacctggtagctgccggacgaatgcaccttgtcgaaggagtagaacccgttcgcgtcggtccgggtctccgccatccagcttgtgccgatctggaccagggcatcgcggacgggctcgcccgtgtcggtgtctgtaatcacgccgctgagcacgcccttgggtgcgaattcgtaacgtcgcgattgcacagccgtcgcgacggctcttgctctgtcccgctctacaggcggtgcagggagttcggaattgcgcgtgtggagtgcgaagtcctgattaccggtcgctggttcttgatttgcagtgggcattgggggttgcgggactcccatgcctgacccgctgattcccggctctgaatcgcgggtggccgaatcggcaacggacaagtgagaaccggcaaccggcgactgcccgggtttggtcagatgcttgtaggcgaccacgccgccggcgacgatgacgacacccgcggccagcgcgacaacctttgccgccaggcccgacagaactgccgtggtgccggaggacccggtcacaacggcggcgacccccgttgcagccatggcggtggttgtggtctttacagccgtggcggcgacagcggcaatgacggccgtggtgaaggccttgcccggcttcgtacgtgcgatcgtcgtctccacgatgtcggctacttgctcccggagcatgctcctgccccgcgagatccgctgccgagcggcgttctccgagagccccaattgctcggcgacctccctcactgatttctgctcacggtaaaacaggatcaccggctcgcggagcgattcggggatttgagccagggcgcgggcgacgacagcttgctgctctttcatcatggctgcctccacaggtccagcctcctcggataccttctcgaccgcacagtccagtggggccgccttgccgaccacgtcctgtctctggctgcggaaccagttctgcaccgtcctgcgggcgatgctgcacagccatgccttgaacttggccaggtcctgtagctgatccaggctcttccaggcccgcaggaacgtttcctgggcgagttcctcgctcttttccacgctgccggtgccgctgtaggtgatggcgcagacgagcgactggtgtctgccgacgatcacctcaaaggcctgcgtgctgccctggaggctcgccttcagcagagacacgacatcctgtgtttcgccggtcttgtctttccgtcttccaaacatcctgcaacctcgtcatgtgacaaaaccactatgactctctatctgactccactatctaagaaaccggcggagcagagatgtgacatggattttgtggaatggctcctacagctttcgacggacggttacgcagaaatggttttcgcgttttctggtcccgatgatctcctggccctgcctgccgaggctggccgggaggttctgaatcggctcgccctcgtcaagttcgatctcgaggacgtcacccacgccgatgctctcaatggccagcttcgcctttacgaggttcagcgggcaggggacccctcgcaggtccagggtgtggacccgaggttcagaaggggtcagcatcgtcagtctttcctgttgcaccccgcagggccgtcatccatgagcgtggttatggtgggattggagccgcagagggggcaatccgccctgcgccccgtatgcaccttgcggaactccatcgtcagggcggagtaaacgagcaggcagtcggtcgccagggagccgattcccaggaggtacttgatggcctccgttgcctgaagcgacccgatgacgccgggcaaaacgcccagcacgcccgcctgtccgcaggagggcgctgagccgggcggcggcggcgagcggaaaacgcagcgatagcaggccgtccgccagggaatcaccgtcatcaactggccctcgaactggaggatccccgcatggcagaatgggaccttctcgaagcagcaggcatcgttgatcaggaacttggcggcgaagttgtccgccccgtcgatgacaaagtcgtactgccggacgatctccctgatgttgctcgctcgggcccatagatcgtaggttcggacggtgacatccggattgatggcctgtatcttctccctggccgaatcgactttcctcctgccgatatccgcggtgtgatggacgatttgcctctggagattcgcgaggtccacggcatcaccgtctaccagcccgatggttcccacgccggcggcggccaggtacagggcggccggcgagccgaggcctcccatgccaatgatgagcaccttcgaggcgagcagtctctcctggccgcggccacctatctcctggagtaggatgtgccggctgtatctctcgatctgctgttcactcagggtcatgttgcagaagtcctcaggggcttaagaacgcccgatcccaatctttccacacgggttcgaggccctggcccttcaacatctcggcgacgacgtgcgaatttcgcgtgtcatccacctcgaattgggagggactcgtgtgccctctggagtagcctcccggattagtccggctgcccgcgctcattttcgttatgccgagccggaccagtcgatcgcgaaagtccgcgcgctcccgcgtggaaaggacaagcccggcatcggcaaagcacagccgcaatgccagcatcatctggacgaggttgcgatccgtcacaagatgtggaaacgcctccggcggcacgccgcacgccggcctcagccgggggaaggaaaacgagatccgcgactgccagtaccgcttgaacaggtgaaaggcgtgctcgccgagtgccagggtttcgagccgccaatcggccaggccaagaagaacgcccagcccgatctcccgcatgccggcaccggcgaagtcctcggggccgcgcaatcgcctgtcgtaatccgccttaggtcccgccagatggtggtgggcgtaggcggtgcgatcgtacgtctcctggtagagcgtgatcccctcgatgccggcatcgaacagcctgccgtactcggctgccgacacttggtaaatctcggcactgatgaaactgaatctggtccttaactgcctcgcgagatccgccagataggatgccgtgatgaattccctgtcctcgctcgtgaccaagaggatgtccctgaacccatcggccgcgaggatttccgcctccgctacggcttcctcaatcgtcaggcggaccctttcgaatcggttgtcctgattgaagccgcagtattggcagcgattcacgcaatggctggagagatacaacggtgcatagagccggatcgttcgaccgaatcgctgcaacgtcaggtggtgagacagctcggccatttgttcgaggtatccttccgctgctggcgagatgagggccagcagctttgtcaggctgtacgagcccggccgaggcagcagggcggcttcgacatcgtgcgaggtcacttgctgcagacgttgttgccaaatctcccgattctcgtcgagctgttgccgtgcgaggattgtcttgatagagccgtccgaacaggttgacctggctgacgcgttcatctcaatccctcaagaaccccgtcaacgggctggacgcttccgctttgtgcgtcgcagcgcgtggcccggccatgtacgctctacgcccggcctccacggcgagccggaaggctgccgccatctccaccgggtcggccgccgtggcaatcgccgtattgatgaggaccgcgtccgcacccagctccatggcctcggcggcgtgggatggcaggcccaatcccgcatccaccacgaccggcacgttgctctgctcgatgatgatctccagcgaggcccgcgtcttgatgccctggttggagccgatcgggctgcccagcggcatcacggttgcggtaccggcgtcctggagcctgcgggcgaggatggggtccgcattgatgtaaggcaggacgacaaagccctcttttaccaggatctcggcggccttgagcgtctccaccgggtccggcagcagatagtacggatcgggggtcacttccagcttcacccagttgatgtccgtagccacacgggccagccgggccagccgcaccgcctcctccgcggtcctggcgccggacgtattcggcaggagcaggaatttggtgcgatcgatctcgcgaagcgtatcattctgtgggttgccgatatccacccggcgaagcgccacagtgacaatctgagcgcccgaagcggtcaatgcttgcgccatgacctgcggggatgcgaatttccccgtcccgagcagcagccgggagtcgaattgcctgccggcgatgaccagtgcatccatgcgatcaacctcctcccatgaacttcacaagctcgatcgactgcccatcgctgagcgctgtgcgcgcgaactcggcgggcctgacgatcctgccgtccacctcggccacgaccgtcgccgctgtgaggcccagcttctcgaccaatgccgagagtgtcgcgggcatctctcccggcgggaactgccgcacctggccgttgacttgaagggatcccatttcagtccgtccaaaaacaaagaaagcaccccgcaaagagggtgcctggatatgccgccaagcctcccttcgcaggtcctaacctgatcaggttcgtagggtcatcactcaccgagtgatctctcagccgaccaagcccgtgattccgcctgtcggctcccctggcttcttatgtactactgcaatatgatagggcagttcagtctacgtggcaagtggattgtgggcacgatggcagatttacgtatgggcaatcgctttgtggtccaggagcatacgacgccggagggcgtccattgggacctgatggtcgagagggggcaagtcctaacgacctttcgccttgcggagagtcctgagaacgtcattagacacgctgtcgaggccgccaggatattcgatcacgccctgcgattcctcacctacgagggccccgtccagaagggaacgggcaacgtgcgaatcgtcgagcgcggagactacagcgccttcgacgaacgagatgatgccatagcactggaattgcacggcacaattctgcaaggccgcttctccctgacccggatcgaagcggcacagtggcgactggcccaggcagaggctggttagggggccgcatttctctttttgcagtttatgcttgacattgcatagtatgcacagcataatatgtgaaacataataacatggcttatgtgaagaacaggaggttgacatgcgattcgaaagtcagttgctcaagggggtggcgcccgtggcggtgctgcagatcctgtcgcgagggccggtgtacgggtatgagctgagccaggcgatcgagcggcgaagcggcgacgttctgacgctgggcaaggggacgctgtacccactgctgtacaacttagaggccaagaaactggtcaagggcaagtgggagacgaccgagtgcggccgcaagagacgctactactcgatcaccggcaaaggcgaagaggacctcgcccggcagaaggcccagctccaggagctgacgaagggcctgaacatcattctgggcggcgctctgaaggcggcaatataagatgcaagagccgggaggtgtaccatggaaaacaagcccagcgagagtcacggcggggacctgcccgcttgcgcggcggagttcgtccgacaagtcgttcggaagatgcgatatcgcgggaaggccgcacaggacgtgcagaccgagctgacggcgcactttgaggatgagctgcacggctgcacggacgcccaggagcggcaacagagggcgcagcggctgatcgagcagttcggtgacgcaaaactgctggcggtcctgtgccggcgtgcgaagaagcggtgccgtccgctatgggccaaggcgataggtcggacggcacaaggcatcggcgtgatgctgctattgttcattgtctatacggcctggttcgtcctgggcaagccgtcgccgagcatcgactacctggcgttgctgaaccagatgaaccgaccccaaattgtggatcgcgacaacgcatggcctcgctacgaaaaggcgttcgctgttctggtggacccgaacgcggagcgtgagctggtgacagcccttcgctggaccgaccgacctgaccttcgaggtttggccgatctgcctgtagagacacagcaactcctcaggcagtgggtggcggaaaatgaagccgcattccagcaatttgcggcggccgccgccaggtcgtactgttacaggcaatacacctgttaccccactgagagacagggatggatcatcgatattacattgccgcatttgagcggatttcggacccttggcagactggcagtctggcgttctctggtcgacctggaacgaggcgatgtgccacaggcaatcgcagattgcctggcggcggcgcaggcgggccgccacttgcagttgagcaagaccctgatcgagcagcttgtcggcctggcactgagcgacgtggggcacgaggggatcctcaggatcgtccaccgacgaaatctctccacggcggagctggcgaacgtgcaacgggaactgtcgctgctctattccggccagtttcccccggtcgacattgagtgcgagcgccttgccgtcctggatacggtgcagcatgtcttcacagacaccggcccgggcggcgggcacttggcgcccgcctcgctctcgatgctcaggactaccgtactgaccggggaaatgaccgatttcctggcgacagatccccttgcgacggcggtgagcctgctccacgccggtcgcgaccaaaccgtggcgaaggccaactggttcttcgaccaacaggtgaagatcgcaaagctcagcccctacgagaagcatgccgcccagacgccaggctcggaagaactcctgaagtccataccagaataccggtacgcggtactccatatgatggtgccggcattggatcgagtcgcgacgctggcatttcgcggcaaggccatgcacgaggcgacaatgaccatcgtagcccttcagcggtatcgtgcagagaagggggcctaccctgcatcactcgatgaattgaagcaggcagggtacatcgatgctctgcctgccgacccctacagcaacggtccgctggtctacaaagtcatcggcgatcgcttcaccctctacagcgtcggccaggacttccgcgatgacggcggcacctcgggcaaagaccgcaaaggccggcggcaaatgtgggacgcggaaaccggcgacgccgtcttctggccgggaaatccttgaatttgaccgctgcacgacttagtatgcgctcccgtgggcacgcgtgacgttgggtgctctgttcttgggtacgggaggtcgccatgacggttggaagatgtcctctgcattgtcacgagcatgattgtgtcagccggcgtgagtttctcaagggctccacggtgcttctggccggtacgtcggtgctggcgggatgctcgtcgctgaaacagaagcgggccgatgtgccgccgatccggcagtgtggaccggcggcgaagtacaggcccacgctatgggcggcgttcgtgcggcggcagcgcgagtatgggatgctgtggccgggggcggtctatgacggcgaggcggcactcgggatgtacacagcgaagatcgcggagacggcgtcgcggcttggggcgggactggagatgcggtcaaagccgatctacagtctggccgagggacaggcgtggctggcggaagccaaggcggcgaaagtcgatggtcttgtactggcgatgctcgaccggcaggagcatgcctggccgacggcgcagaaggtggcccaatccggcattccatcgatcatctattcgccgctggggacatctttcacgacgaacaccgctgagttcgcgggggcgccgggatgcgtggtgtactccacggatgatttcagccaggcggcctacggcatcaagatgctttgtgcggcggccaagatgcgccggacgtgctgcgtggcgatccagggcgacaagcgatatgattccgtgctggccgacacgggcatcacgctgaggcacgttcccgcctccgtgttcatcgaggagtatcgacgcacgccggatagtgaggacattctggcgatggcgaatgaatacgtgaagcgggcccggcgacgaatcgacgcgacccgggaggacgtgatcaacgggctcaagagctattacgtcgcgggcaagctgctcgaacgcgagggcggtgacgcaatcacgatggactgcctcggggcgctgggcaatatccaggtgagcctgccgtgcatcgcgtggtcgcggatgaacgacgacggcatcccggcggcgtgcgaggcggattacggggcggtggcatcgctggtgatggtccattacctgttcgaccggccgggctttcagcaggaccccgtggccgatacggccgatgacaccatcatcggcgctcactgctcctgcccgacgcggctgaacggcttcgagcaggctcccgagcctttcgacatcaagcatcaccacggcaaccgtgacgccgtgccgcggaccatctggcgcaagggccagcgggtcacgagcatcgacctgctgccgggcagtgcgcagacgccgtccgcggtcctggtctcggcagggacggtcgtcgagaacaaggaggtgccgcccagcggcggatgcgtcgtctcggtgaaagtcaagttcgacggcggccaggaggtgctcaacttccccggcttccaccagatcttcttctacggcgattacaagcatcaggtcaaagacttctgccagctctgcggcttcaaggtacaggcggtataatcatgtcaacagaagaaaacaaactgctggtgcgtcgctacatggatgaggtcgtgaacaccggg

SEQ ID NO: 565 - DNA, 18271 bp, Artificial Sequence
  Synthetic Oligonucleotide
agcgctcgggggtcttgtccaaaatcgggggggctggcccaactctttcagcaaatcagcgcgcttcatgatgaccttcttcacgatgcttggcacccccctgagcggatacacccatcccataaaaaaaatcggggactgtcgtccccgaacgtggaaggattgagagcatggatttttgcgatcgtattactaccgatgaagaaatttctttggttgatttggaaagtttcctggaaaacccgttgttctaagactcgatatactgctagccggcaaccaagtcctcttagagtcccagtccgaatcctcctgtcacgctaccgagaagccccgcacagatgtcaagacatggcagccctgaaagcacgctccctccaaacggaccataggccggaccgtacccgggagcagccggggcagcacaaggctgcggcgctctgaccaccggcgcggtcttgtaaaccggtcctgcgccaggaccgcacggccctagagtatttcctcccaagagacttcccacaacgagaaacggtagagcaaccactccaccgcacatgcccgggaacggcgcatcgccccagtaggcgcacgggttgcctgccggcgcgtatgacgggcctgcacacggagcacccggataggcggcctggcccgggcctccggctagagcgagcgaggcggtaacaatgagaatgacgcagagaatgaaactggaaactggtttcacgatcataccctccttttattcagacaggtctttacactgaaaaagtgtgcaattccaggaagcgctggaaggcctcttccccgtctgttcctgggggcggaggtatcacgggctcggaaccctgtcaagtaaaataattgatgttcaaggccttagattccagttgccaggccggtgatgaaactagcaaagtaacacagtgaaacaacaattgtttataaccatcaaaatgttgacactccgtttgaaccgctataggcgatcaaatcaggtagtgccccgcggccaacttgctttctcgcacaaggagaagacagtaacatcttatgatttccagccatttcagcgtcacagctttgccgagagaacaaaaaggctgaaccgcctgagagggttccgacttgctgctccaattccacttgacttgaacaaggttacgaggaaccatgagaaggcacaaggcatcgcgcctcaccgttcatgaggccggttcgttgcgatcctgaagaacccgtcacgccgagctcggcttcaacccaaccctgtcgagccgccgcggagatcgtggtcggaggatgaatgaaagttaggctgtatctactcttgctcttaatgttcgctgccgtgaacgctcaaatagtcgctaaagcgggaggaatcgcgccggaacagatcttccaaccgaccatcgactggcagaatgccatcggcacgtgggaagttctccccgaggacaatccattgtcggaaaagaaccgagtgggcgaggctaacccccatcgggtcattatgaccctgagaaaggacggcacttgcagggttttcgacaaagctcggccgctgggttcggacggtctgtggacctttgaagaccacgagatggccatcagttttccccctggtgcccgggtcgacttctttgtctacggaatcaaaggggatttcatggttacccggtcaccctctaagggtggcaaagatcaactctggtccaaggtgccatgatcctcaaccaatcaatacgctcgcgcgtttttgtccggagtcgggccggcggcagaatcccatgaatcggaaagggaccatatcctgatggctcgaatcctctatggcgtgatgggcgatgcgcgcgggcacgtaaatcgggccaggaccgtggcccaggggatgcctcatcacgaattcctttttgtcggagcgggcagagttcacgatttgagggcagacgggtactcagtggaggcggtgcccatggcggccacgctttataggaataacagagtggacattcccaggacgcttgccaatgcgtttcgggtattcggcggaaagaaaggggtggtccggcgaattgcccgggtcatagacgattacgatcctcacctgattctcaccgattacgagttcttcaccccgcgggcggctatcatgcggggcaggccatgcgtcagtcttgatcatcagcatgtgctgacccattgccattatcagcctccggcagggcagcgcctcagccgagcaatgacatgcttcgcggtccgacaattgtacagcaaggcttccgtgttcctcgttgtgtcgttttttcccttgcccgtaaaggaccccaaaactaccgtccttctgccgcccctgattcgtggcgcagttctccggtattctccaacagatggagagcatgtgctggtatatcagacctcccccacgtttttccagctgtttcctgtcctggagcggatgaagacgcgattcatcgtatatgggttcggcgacagaccgtcccggaaaaatatcatgttcaagggcccgtcagatggaggctttctggaagatctggcctccgctcggtacgtaatcaccaatggcggccacaatgtaatctctgaggcgctgtatctcggaaagcccgtgttctcatttccgatagccaatgcctacgaacagttcgtcaattcatatttcctggcacagtgcggatatggggcatactcgtgctcgccgaagccctcacccgatattctggcgtccttcgaatcaaagttggaatcatacaggaccgccatccgaggccgaaatttcttcggcaaccaagacatgcttcacgtggtagaccatttgacatcgagcggcggactgataccggcggcttgatgtcacggctcgttttctcatactccggcccgagatcgggctcgcggtgggaggacctcgctgcacgggtggtctaacaagatgttagcctataaatttaggcacacagagcttggtaaaaggtcgttgacatttcctgggggtttggctatactctcagcggtagtttaggtataaattgtgggtgcctattttataacttttgtcaggtgttatgatcagtccctagaatctgcgtgaaaggggactttagggtatgggaatcacgtgctaacttcgacgacaaaagtcgtggcctcgtgccccagccgcgtgaacagactgattcggcgttgctctgccgggcatggtgcttcaggctgcctgttgttccttgtcttgggatttgtacttttatgggcccatcaagcggtcgcctcttcggacggtgtccagaaaccacgcgactacgggtattttgattttcccacttgtgtcagctatgcgctggtgcattcggactcattcgtcaggaatcgtctggacattcaaatcaggtctgcggacgtcaaggacgcgcacgcggaactcttccccaccatacagttgctgactcgctattatttcaatcgtgcaggacagaacaccaccgatgatccgaactgggcgccccccaaaaacagattcaacgtccaggttttcatgcagaactggaacccttttctggcgttgataaaaattcagtccgggggggtcctggtcgatattgccaagatcagtcatttggaccggatatccgaggatgtggccaacatggccaagttgtttcaccgggtccagacactggagaagagcattcaggccagcaagcagcttgtggccctccaccgaaacaaggtgagctacggcaagaacaaggacgaacaggggaccgtggatcctatcgggttgcaagtgtggatgaccacgcttcgagctcaggagcttaaggtcaaagacctggagcgggagctgcaggaaaagaccggtagcctgaagatcttgatgagctacaatcctgatatggggctgcctctggacaccagagacgctgctaatcagatcctgaccggctttaacggccgttttgtcaccttcgcagacatccaggggggcaatctcaggctgaaaatcatggccaagcgggaacaggtccaatcgcagcgggtattgggctcctacgtggccctgttgccccggcccgtactggtcttcgaacagattcagaacgaagtggacagatcgtcgggtatgaactttgccatggggctggattatacgatctgggacggctttgcgcgcgtccgggacatcaaaagacagaaaatggtcgcgcgacaattgaacatcgacaggcggcaatactcggaaaggctgtacgtgacgttccggcagctgaaagcaacgctggacgtatccggggagcgggaagcccttgtccgcgaacaggccaagctctcggaactgtccgaggaaagggccttccttcagtacaagtccggcgcaataggatacgactattacatggacaggcgcatcgacacggttcaagcccagttgaacgctttggccgttgttcaggagagggttgcggcccttatcgatttggccaccatggcaggaggtttgaccaagtacaatgcctcgatacgatactgatggacctcggcctcggcgccgtgccaaggccttcggtgtttttctggcgggtttggtagccatcgggtctttaacgcttgtggcgctgacgcaggagcccaaaagcgctgtttcgagccctgttccggccaaagccgctatagtgccccagattgctgacgccaaatccgaggcggaaatcctgtttcgcggaaagagtttttccgtgctcgatcgcatcattccgctgcgcttctccggagagatcctgtccatagacgtgaacgaaggccaaatggtaaagcagaacgacacgctggtaacgtacagaatggatcgcacaaccatgatccaagtgcacaccttgctgtaccccgtgaatgtccttaatctgaaaaaggcggtgtatgacggcgacctgaacatcaagagaatcaaagacgtcaacattccggtgaaaaagtcccagatcgaggccatggaaaaagagttggcagacatccaggaactcttcacgaagaatttgattcagaaagaggcagtggaaaacaaagagcggcagttggacgcgagcaagaaagacatggtgtccctcaaggattctcttaaacagaccgaggagagcgttgaacgaacaaggggagatcttagtttttccgaggacaagcaaaggagagacgtggaactgctcgagtggcagacgcagcggtcgtatgctccggattccaagataccgctggatatcgctcacctgaaggccccgatatcgggacaggttatctggctaaatcccggcctcaggatccaagccgagctgcccagcggctttcaggcgttgcgcgtagcagaggtgagcccgatggttgtccggtgcaaggtccacgaactggatatcgtgaagctcaagcagggagacagaggcactgtcacctttgatgccattcccgacaagaaatactcgtgcaagataagcagaattccctgggtcagccgaaatccggccctggaagtccctgcggattacgaaatcgaatgtcttttggataattcagacgggacgataaaggacgggcttacctgcaatgtccgggtgagcatagctcagtaagcggctcgattggtcgagagcgccgggccggcatggaatcgcctttcgagacatcctcgggacccgccgaaaatattctttcgccctttacgccaatgcggcttcaaacatgtaagttcaggggtcccgcgcctcgcgggatttgtgcaaaacccgcaggccgcgcgtctcctgagtcccccttaagaaactctatatatcgcagggtttccgacttcttgtttcaggaagtcggaaaccctgcggaataatagaagcttttggagaggggtccggggagagaccttttctcgaaaaggtcctccccggattacgctatatctcgttcggtgcaaacacgatgggcgttccaggcgggtttttcacaatttggctcgcggttacggtcctgccggtcctggctttgatagccatcggcctgagcaggataggcatggcccgccgggttcgatccgtcccggatcgcaaagccaggctcccttgtacggaaatactcattccggtcaaaggggtttttccgcaccaggaagcggcccttcggtccatgctggagcaaaaccacccctgctatgggctgattttcatcctggaccgcgatgatgatcctgccaacgctctggtggaagagttgtgcagccactatctccatgcccgaaaggtcgtggcagggctgagcacgtcctgctgccagaagaaccacaatctcatcgagggcatgaggcatcttacgcccgaaaccgagatcgtggtcttttgcgatgcttccaactgcgccgaacgggattggctggttcgattcacgggcccgctgtgttcgggcgatgcgcaggtggtcaccactttcaggacctttgatccccggccgaggacaattgccggcgtttgtcaggcgatctatgcgtcgtttgttctgatactggacatggtcaagcctaagacgtggggaggggccacggcgatccttcggacgaccttcgagaggctcgacgttattggggcctggtccgggacggtagtggacgatctggtcctgaccaatgttctcgatcgggccggggtgagaatccgagtttgccccgagcaccttctctgctcgcccttgagaaaccagacggtgagagggttcctgggctatttggatcgccagatcctctttcccaagttcaccaatccggtgatatgggctgcgtccgtggtaacgcacctgagcttaacgcttgctctgacggctgtgctgccggtcgggttggctttcctcttcggtctggtgggtcaggcggcgggttgggtgacgtgtggcgtgattgttggttgccttgctgccgtgctgttgctgcgcatgttgaatccgttctccattccgatgtcatcttggctattggcgttcttcccttgtatgtatctcgcgtcttacatttttgtgcgttcattgttcattaactacatagattggcacggcaggcgctactggtgcggaagagggggcaaggtggtgcggatcggctgattggagccgaaacgagcacatttgcaggctttacttttgtagcccatttcagcgaaatgcagcgacaactacgccgtatgaactgccttgaagtcgccccttcccctccacatctcctcctattgacgggaggagacaaagtaaggggagagcataggcgccaacatagtgtctcgactattcgtcctgtggggacggtacgaaaatagcccggcaatttagcgactgtcgcaaaagtcgaaaatatgtcggaatcgtgccacgccctaccctcaccctgccctttcccaaagggagaggggactgcggagctgcttcagagggctccctctccttctgggagagggttggggtgagggagtttcaaggaccggcaacccaatcgtgccacgatgtcagcccttgccagggttttgagacaccctctttattgccgggtcagagagccgaacaaagccggcgcgtgccgtaggtacgcctgaattcctcgtcttttgtcgctcaagccgaaaaatagtttgacacagagcgccaaaaatcactatcagtatatgtgatattgtaggggggacttctaacctcaatccctcctttccttcattccggttctgcaggccgctttcgaacaatcggagcgtaccgattcgcaaggtacgtccctggtcaagcgcaattgtcactccacatacggaatcgaggaagccatgaatcagaaaactgaaaactataacctgctcgtggaagagtggatccccattctgcggaccaatgggaaattcgagcgtgtgggcatctggaccgcgctgacggaggcgggccgcatccgccagatcgctgcgagcaatccgatggacaacgtggccctgctgcgcctcctactggcggtcttgcagtggtgtgcgccggaagcgacagaagacgaactggaagagcttcgctgcgaagacactgtgggcattccttcgcacttgctggaggacaaactcggaatgccagaacagccgaattccgcgttcgatctgttgggcacgactagtgggttttaccaggatcatacggctggcggagtaaaggtcgctgtcaccaacctgctgcacgattttccttctggttccaagattgcgcattttcggcatactcgggaccatcgcgaaggaatgtgcctggcgtgttgcgcgctcggccttgtcaggtggcccggcgtcgcatcagcgggaaccgctggtgccggccagagcatgactgcaagtattaatggaaacacaccagcatactctgtccggattagcgcaacgttactcgccacgctgatgttcacctggccatgtgaccatgcagttgacggcgatgcaccggtttgggcttcggcaaatgaggaatctccgcttggttttttcaaagggatgacttggcgctcccgccgcgtcttgttggcgttccgggacacagagggcgaacgagaggtgcctccccaatgctgttgtctctgcggccaacataccaatcgcttgatccgctcgatccattttcgtccaggttggcaaagattttccaaagagccttggtcggaagatcctcatctgttgcggatcactcgaaggaccggcaagagtttcaagaagaataagattgttccgtcgtggccaagcccgaacgaccgattggaagaccatgctgcagtctggcgttccgtgttggagggacacttgcaacgttcagccgcttccgagaccgaagcgacagagttacacaccacattgctcgctaacagccaggcgctctacaagcatgtcgggctacatacggcctcactgccaagaattagccccgatttggcccatcgtctgttgaatgaaatggaatggctcaagcaattaacatggatcacgacatcgacacggtccggcaattggcgtgaaccgcccaaaggtcatttcgtcgttgaggcgctatgtgcgcctggtgcgaaggggcatgccattcggtcgggactctgcgctcgcagtccgctcaccgagtccggattggaaaaagccttcctgaagctggcgcacggtctagccgtcctcaggcaagcggaccgaaatgcaacggaacaggctgtggacgactggagatctgaagtacgccgaattctccggaaccatattgacccagtgatttacaccactactcccgggtcaccgctgcgccagcaggaagcaacgcgacacgctgatgacgctgttgggggggcggttcggcaggtcgaacggcaacgaacgaaagtagtcgacaaacccgaaggcggacggcggaagggaaacaaagcatgactcagaccgaccagttcattcggcggctcgacgcgctcaaggaaggcgagcgttcgcggctccgcacactcgcggggaaatcgttggacgagaccctccaaggttttgatctgttctccggcttgtggtggcccttgcggcagcagaaccaggcagcgccgcgaagagagacgagttggcttgtggtcaagctattcggggcgtttcccgtccgtcacgtgcgatcagacaggccagaggctggtccaacactggcacgaatcctcggttggtgcgagccacacgatgagcacgctcgcccccgcttccgggggcgattcgatgcgcttctgtgctcgccgctttccgccctggagccgcacctgcgctgggccctgcccgttgtcgccgatgcggtgactgcacgccgggcaaccggcctcgattgggtgcaattgctggacgatctgtcaatttgggaccgcggcgaagagcatcgtcgcggcatagacgtccgtcaagattgggctcgccaatacctggaagccgcaaagtgaaagggggagttgaccatgctgattgaaatccacatcatccagaaccacagtccgtccaatctaaaccgcgacgacctgggcgcgcccaagacgtgcatcttcggcggcgtaatccgcgcccgcatgtccagccagtgccagaaacgcagcatacgcaatcccggtaatcccgatgacgctcacaaccgggagccgggaatgttcgcgcaggcaatgaagggacatataggcaaacggacaaagttctttccctggctggtagagcaagcgctcgcagattcaggaattcctgatggcgagcacgatcgaattgtgctggcggcgcaaagaattgctgtcagcaaggagaaagatgacaagcggacggcagttggggccacaacagacctcaggcgaaagacgcggcaattgatccatctcggaccggaccacgccaagtactttgttgccaaacttgccgaacttcgggacgaggcaagagaccgatatgactacttcctcaaccctgttgtcggctttcaggagatggtgcgtgagcttcttgacgaatcaggcctgaacgagaaggagcgagataagatcgttaaagctagttggacaattgccaagtgccgaatgtctaaactgctccaagctcccgagggggaagagccggaacctgagcctgcgatggaggacgaccaaccaggccctgaacacgcgaaacttctcgctgaacgcctctccgaactccgtatttccgatccgaaccggttcaaggacctgacgaaggccactaccacagacgagaagagccggcttaaggaggatgctcctgaaaagccaaagaaaatggacgagttcatggaagccctcaaaacggtcaatcgttgtgatgccgttgacatcgccctcttcggtcgcatgaccacatcggatgccttcgaagacgtggaagccgccatgcaggtggcacacgccatctctacccacgccgtcgttaatgaggtggactacttcacagctgtggacgatttgggcaagaccggtggtggagcgggccacgtggatgaggcgcagttcaactccgcatgtttctataagtacttttgcctcgactgggatcaactcgtgcataatctcgcgcccgaaccacaaaagccgaaagacaagaaggatgacagctcggaagtgacgaagtggaagaagcaccacagcgactgggccaataaagtgaagcctgatgctgaacgacttgccgcttgtactctcggccactttatccgcgccgccgctctgaccacacccagcgggaagcagaacagcttcgcctccaattgcgagccgtgcggtattcttgtcgagatcaagaagaacgagaagacgccttcgagctacgccaatgcattcgctgaaccggctcgcaagatcggtaacccgccgaatgacgcggccgactgcgtcagcctcgtcgggcggagtatcgcccagctcggcgaccacgtctaccaacttcggaaagcctaccaaacagattccacgttgctatggtatgccctgccgctgtggcgctacccgcttcaaggctgggaacgcgaaaccgacgggagcaaagccaaagtccgaaacgagaagggtgagccgacgaaagactacaaacctgctgttcaattcgcctcaagctgcctcgatgtcctaggcggacgcgatacagagcagcccggcttagttgaagcggtgatcgacgcactgaagctcaacctgaaatgggccgaagtgaaggacctcggcgaggtaaaggggggctgacaatgagtgaagcgcccaacacagtcttccttcgcctggaaggtccgcttcaagcatggggagacaactccaagttcgtgattcgccggacgatggaggcgccaacaaaatccggggtcatcggcctgatctgctgtgcgaggggactgtcgcggcaggaggcccgaaagcatctaccagatttgaacgacttggcgatgggagttcgcatagaccgggcgggcactcgctggtgggattatcacaccgtcggggccggctacggcatcttgacagcgcaaggcatagtcaagaagacggcaagcacgggagattacgaaacactcatcagccggagggagtacctatgtgatgcaagctttctcgtagcacttcaaggtgacgcttcgcttattcagaaagtggtcggtgcgctgattagtccgaaatggccgttattcctgggccgcaagagttgtccgccttccgtgcctgtgatggccctgcctggaccgaatgagtcatggaccaatcctatgcgcgccaagaacggcctccttgaggccctgcagggcattccgtggcgaccccggtacaagattaacgcaccacaagaagacagcaaaccacgcaaatccatcaaattggattccctgatcgaatggcagcctcgtaatggcacgatcgcgcctgccgacgcagagatttggtacgatgcaccggtatcgttcgatccgccggtacaggagcctcggctggtgcagcgatgtcctggcattgaagtaccagtcggtcagccagtccagcatcacacgccgcctccgcctcgcccgcgggccgattataagaacacagagttcaggaaacgccgcgaagatcggctgaattccgattacgggctctgcgtcttttgcaaggctcccgcgacgaccgtgcagcacatcacgtaccgtcgggctggaggcaacgaagaaccggacgatctagcctcgctgtgccggctctgccacgacgcggtgactatgatcgagtacggcctcggtatgggcctggaccggattaatcccgaagagccgcgttggcgtgatcacataatcgcgaaacgggacgaaatccgcaaatggcgcagcgaggaaggacgccgccgcgccctgcgcaagtcccctgcgaacgtccgccgcgaactcctcgaagaggaggtgtgagccatgtaccattctcacctactcatcaacgtcggtgacaatcccgatcagccggactggaacctctgccgccgctggcttcgtaatctgtaccgtgtgcatcagcgcctctgcatggcgtttccgtcagtgctgcctgccgagcacgagcgccaagcagcgtactgccggccgttcaatactgtggactgtccacagcagcatgagttgcctaccgcaaccaacggcggcgatgtgcatctggcacgaagcaggggcaacggttttctttttcgcatcgattacccggtcgatcccaagcaaggaggacgtagaccggttatcatcgtccagtcggctaccaaacccgattgggagtacgccttcggcttgaccaaagacgcgatggatgaccgcgggcaccctatcggaaacgccgattttcttctcagcgctccgccgcaggctaagccggtctccatcgatcttgacggcaagtctctcgttctctccagtgataagcaggactaccacctacgtcctggcaatttggtgcgcttccgactcagggctaacccgacgcggaagattcaggatagttctcccaacgggaaacgcaaacgggtgaatccaaccccgaaggatcacgccgattggctggcccacaaactcgaagaagctattgatggcccgttttgtttcgaagacttcgtccccggctgggcgtacggctggcgcacgaagtacgaaccgcagcccggccaacgcatgcagtggtggtctgtgctgtttgaggggacctttcgtctgaaggacccagtcgtgctcaagcagcttctcgaatccggcatcgggcccggcaaagctttcggtttcggccttctctccatagcgcctgtcaatccctgactccgggagcggcgacatgagaattcaagatctgcacgtactgccgaagttccgtgacgggtggagttacctatatgtcgaacactgccggatcgaccaggaagctcaagccgtcgcgatccacgacgccgcaggcaaagcgcccgttccctgcgcaaatctggctctgttaatgctgggtcccggggtgtccatcacacacgcggcgatttcggtgctggcggaccatgggtgcctggtggcctggtgcggagaagaaggggtccggttttacgctgtgggcatgggcgagactcggagcgcatcaaacctcctgcaccaggcacggatgtgggcggagccaggactccgcatacaggtcgtgcggcgcttctacgagttgcgcttttccgaggaactagatccggcactgacactccggcaaatacgagggatggaaggggtccgcgtccgggacgcctacgccaaagccgctcgggagacaggtgtcccttggtcgggccgaagttaccgccgagacgagtggagcgcttcggatcccgtgaaccgagccctttcgacagctaactcgtgcctgtacggcatctgccatgccgcgatcgtgtccgcgggcttctcgcccgcgctcgggttcatccacaccgggaagatgctgtcgtttgtgtatgacgtcgcggacctgtataaaactgaggtcaccatacccgcggcatttcgagccgcagcggacgggacggatggactggaacgacgggtgcgcctggcatgtcgggatgagtttgtctcaacacggctgctcggaagggtcattccggatatccagatggtgctggagtttccgccgcggaggacggccggcgacggtgaacggttcgattgggaaccggcagcgccgggctcgttgtgggacccggaggagggtcaggtcgaaggcggacgcctctattcgccgatagtggaggaaacggaggccgacgatggtagtgctgatccttgaacgtgtgccgccgggattgcgtggcgaattgtcacggtggttcctggagccgaaggccggggtgttcgtgggccgtgtttcggctatggtgcgggaccggctctgggagaaggcgtgcggtcaggcaaagaaaggcggttgtttgatgatccacgccagtaacaccgagcaaggtttcgcgatacggtcacatggggagccttcccgactgatcgaagacttcgagggcatttttctggtacgaatcccgtgttgaagcggattttttcagtattgtccccacgcacgtgggggtgaaccgacctcgataggcttgaagcggcccaagcgacattgtccccacgcacgtgggggtgaaccgagagtccattcgtctttgtttcaacgagtaacattgtccccacgcacgtgggggtgaaccgattatatactcttggtgctggcccagggtcttattgtccccacgcacgtgggggtgaaccgttaagagcacaaagccatgaaaaaaaccttccattgtccccacgcacgtgggggtgaaccgcggtgggtgcccgtttcgagttttaatatcttattgtccccacgcacgtgggggtgaaccgtatatagtttccaaagaaaaagaccgatttaaattgtccccacgcacgtgggggtgaaccgcgtacccaggatattcatggcgcaaatacgaaattgtccccacgcacgtgggggtgaaccgaggcggtctccgcattggcattggcgctatccattgtccccacgcacgtgggggtgaaccgcataacccgagacttgaagattctcgcaaaagattgtccccacgcacgtgggggtgaaccgtattgtcgcctgctatgcccgtgagtattggcattgtccccacgcacgtgggggtgaaccgcggcttggcccttcggatcaacgtgcggaggtattgtccccacgcacgtgggggtgaaccaggcggctatgcgtgggacgagcacgcgcaggcattgtccccacgcacgtgggggtgaaccgcacgggaacaggtaaaggcggctatcgagataattgtccccacgcacgtgggggtgaacccagttcggttgcgtgttctaggctattgcgggaattgtccccacgcacgtgggggtgaaccgtgccgcgagatcatcgacacccgcagcattgaattgtccccacgcacgtgggggtgaaccgggcgggtgcccgcgggcatcggaatggagatcattgtccccacgcacgtgggggtgaaccgccatcaagaagagaatacgtggagtggttatgattgtccccacgcacgtgggggtgaaccggaaggctacgggcgtatgcccgtgggcaaaacattgtccccacgcacgtgggggtgaaccggattcattctcggatcaaagttcaccgcataaattgtccccacgcacgtgggggtgaaccgaacgggtaaaggccgccggagggaatgttgagattgtccccacgcacgtgggggtgaaccgccgtggccggttttgcctctgccttaacccctcccgccagcagaggggaatgagttccccgcttttgatgggcggggtcacgaaaaccggtgattggttcaaattcaacgcggggctgtataaggatcgctcgtgtgaccttgcatggacggggccttgacggagcgctcatcatgggcaaagatctctttagggcacgagtcacggaggttcaaagacatgagtatgcaggacatctggaagaaggcttccttctccgcagtctatattcttattgcgctcctggtgttcctgatgctccagatctggctggccccccacgtggaaaacgtcccatactccactttcaagaagtacataaccgacggaaagatcacctcagtggtggtgtcatcccgatttctcaaaggatatgagaagatccaggatggctccaaggaaccgctgtttcccaagctgatctacatcactccgagagtggacgatcgcaacctggtggattttctcgaacggaacaacgtagagataatcgcggaaaatgagaatacgttcctgatgacgctcctgtcctggatccttcccgctctgatctttgtggggatatggctctgggccatgaagaaaatgggacagggcacaggaatcatgactctaggcaagaacaaggccagaatcattgcccagaccgatgtaggcgtcacgtttcgcgacgtggccggacaggacgaggccatacaggaattacaggagatactggaattccttcagaacccggaacgattcacccgaatcggggccaaaatccccaaaggcgtcctccttgtgggaccgcccggcacgggcaagaccctcctggccaaggccgtggcaggagaagccggtgtgccgttcttcaatattagcgggtcggatttcatagagatgtttgtgggactgggagcagcgcgggtgagagaccttttcgagcaggcgagcaagatagctccttgcctcgtgttcatcgacgagctggacgccctgggcaaagcccgaggcgcgggggccatcgctggccatgacgagcgggaacagactctcaatcagttgctggtggaaatggacgggttcgaacccaatcaaggcgtagtgatccttgcggccaccaacaggccggagatcctggaccctgccctgctcaggccggggcgcttcgaccgacacatcctcgtggatcgccctgacttgaaaggacgaatcgacatcctcaaggttcatacccgcaacgttcccctttccagggatgtgaacctcgaagtcatcgcccgacgcacaccgggcttcacgggagcggacctggcaaatcttatcaacgagggtgcgcttcttgccgctcgcaaggacaaaaccgaagtggggccgcaagaactcgaggacgccatcgacaggatcatcgcagggctggaaaagaaaaaccgcgtgcttaacgagaaggaaaagaagaccgtcgcatatcacgagagcggccacgccctggtggcatcgtttcgcgaaacagcggaaaaggtccataagatcagcatagtgccgagagggatcggagctttgggctttaccctgcaactgcctaccgaggaccgctatcttatgtcgcggcaggaacttcttgaaaagatcgacgtgctgctcggtggccgcgcagcggaaaccatcatcttccatgacgttaccactggtgcgcaaaacgaccttcagcgagccacggatatcgcgcacagcatggtcacactgtacggtatgacagagcaactaggccccgtcgcgtaccaaaaggcgcccaattcgttcctccagccccgggagctgttcccgaccaaagaggtcagcgaggaaaccgccaagctcatcgatgagg

SEQ ID NO: 566 - DNA, 18055 bp, Artificial Sequence
  Synthetic Oligonucleotide
acacgatggccgcatgacagattccgtacaggcaggaattggcggcggacaaagcgcgatttgcagggtctgctttgctccactcatcgcgtttatagtttcggcctgaccacgtgatgccggcttcctgcgcggctttggcgtacgcctcccgaacccttacgccttccatgcctcggatttgctgaagggtcagaccgggatcgaatttctcggtgaagcgaagctggtagaggcgtcgcaccacttgcatgtggaagccctcatgcgcccacattcgcgcctgatgcaggaagttggccgcgctgcgcgtctcgcccattcctgtggcgtaaaagcggactccctcctcaccgcaccaggctacaaggcaaccgtggtcggcgagtaccgagatggctgcatgcgtgatcgagacgcccggccctaacatgagcaaagccagattcgcgcaaggcacaggggtcttgccggcctggtcgtggatggctatggcccggtcctcctggtcaacgcgacaatgctccacgtagagatagctccacccgtcactgaacttgggcaagacgtggaggtcttcaatcctcatcattgctccgctgggactggcgtgtggcagggggccacggaaagcaggccgaagccgaaggctttgcccggcccgatgccgtggatcagagtttcgcggaatggggcgggctccgtgacctggagaatgccctcgtaacggaccgagcgcagccgggcctgctggctcttccgcaaggcttccgcttcttctttcccgacaaccggacgcttgttgaaatactgatagctcggctgaacgatagttgagcgctggtcgagacagaatccggatgttgcccctcggttggcgagccactccaggagcttactctcaatgaaggggcgcggatcttgattggcattcttgcggagccaatcctcgatttcccgcgcgcttggcaccgggacgcgcctgccgtggcgtccttgtttttgagcaagctcgtctttggagagactctgtctctccgccttgttgatcgtgccgaccttccttgtcggattcaccagaaggcagaagcgaaggcgctgcctcggcttgaaggatgggtcgaatgacttcacttggggcggcgcggccaggagatagccggcattgtggaaggcgtagtcccagtcgggctttgcggcggactgcaccagaatcacaacgcggccgccgggctgcgggtcgatgcgaaagagaaaaccggagtccggtcctcgcttgctgtgtacgtgttttaagatttctggatcgacttcggtcttctttttatctgccaagtgacgctgctccgggaagtcctcaggtgcataaggggcaagaaagtctggatcacgccgttttctgggattggacggaaacgccatgcataggcgctggtggacatgatagaggtttctaagccacaagcgtccgggccggggccggtcggggttgtcgcccacgtcgattaagagataggagaggtacatggctactctacctcctcagccgcgagcttgcggcggcgtgtttcgagcgagcggaagcagatgatctcttctcgtttctgaacaatcatgtcgcgccagcggggctcctcgggattaatgcggtccattcccatgttcaagccgtattcgatcatggtcacggcgtcatggcagtagcggcagagagcgcgcaaatcctcggcaacctcgtcgccgccagcccgccggtaggtaacgtgctggacggtggtggcgggggccttgcagaagacgcagaggtgatggtcgaggtcgaggcgctcctttcgccgttccctgaacttcgtgttggtatagttcgcgcgaggccgcggcggtgccagcggaatgctctgggcaggttcacctgcgctggcaacctcgccgttcgcacccactcgcaattcctcgcggattacaaaccggggagaatgcgagggaggatcgaaggtgaggggcacgtcataccagatgagggcgtgatcggaagcttctggctcttctggcgtgggcgcccagtcgcgcaggcatacgagcctttggggctgtgggtcatcctccagccgtttttgccaagggacggatttaagcgctccaagcaaatccgggaagtaacccgccggatgcttcgggtcaagcaaagggcgcgaaggggggcagcactttctgccgagatagagggcccatctgggcgccttgattgccccctccagttcagcaatcagggccgattcgccctgaagagcgaccaggaaggaggcatcgcaaaggtactcgcggcgggtgacgagggtttcgatttcccccgtcgtagccgtccgcttgatgcccttgccatctgccctgcggataccaatcttggcgcccaccgtgtgatagtcccaccagcgcacgccgggtcgatcaatgcggacacccatgcgcagggcactgagctttgggagccactcttggggggcctcggtacgagacacgcccaaggctgcgcagagcatcccgaaaactccggacttggtcggggcctcagcggtgcgccggatgacaaatttcgattgctggtcgccccaagcctgaagagggccttcaaagcggagaagaagggtgttgggggtcatcaggccacctccgtgtttacgatgaccttcttaacctcctcccaatcatgcccgattgccttaataacggcgggtatcaactcatcgagcgatccgaggttgttttcggtaagcgcgacctcacgggttttctcctttccgttctcctttgccttgatggaaaccgtcaagggacagcggagattgggggagaaccaaaaccgctcggtcggcttgccgtagccgttatccaggtcgtagatgtattggcccagttgcgcgatgctctgcgaaatgaggtcgcggccatcttccttgatgctggccccgacacccaccggtctggcaaaggcgttagcgtagctgaggggagagtttctgatctcgaccagtatcccgtcgggatgattgtgcgcggcgtagctgttctgcttgcccgtggggttggcaagcgccgcaccgcgaaggaaggcgcccacggtgtgtgcggccagcttcttgtggttgtctccgtaaccctcaagattgtcgacaagggtttcccagtcgattgagaaatacttgtagaagcacgccgaagcgaacatagcttcgtccacatagccagcgcccgcatccgcgccggggatgtcgtcggcggcaacgtagtaatccacctccgggcgggcctcatgagtggaaatagcgtgggcagcttgcagcgccgcttcgacggtggtattgagttcttcccatactttcttcccggactcatcgggttccaacatgcggcctgacaaggccatgtccgggacggcggtgcgcttggcaataatctcggccagctctcttgccaattggttgtcgtctttgccgtcgccgttgcggaagaggcttgccatttcttctatggcctggtccgtggtgtagacaagcattttgcttctctcggaaccttccccatcaccttccgatttcttaggtttgaagccgcacatctcgagtaccttctcagcgcgcttcttcacgtccttttcccggaccttctcggcgatcagtctggctagctggcgagtacgcttcccgccgagcaatcgctggaactcttcactcctgcggatacttcgcttgaggcactggctggaaatgcgggagcgcagaaccccgccgaagaaacaggttttgggggcgcccaggtcatcccggttcaggttggccgggctgtggttttgaatcatgtgaatttcgatcaacatcgctgtcctccttggttgatttcaagaattcttccgcccacttgaggcggacggattcgcgttcccaaatggaaagatcattcgtcaggcttacccagtcgagtttcaggccctttgagccgagcaggtcgagcgcccattgcaaggccggttcgatcttgtcgagcggaagggtaagcattttgtcaaccttccggcggaatcgtttctgtttgtcaaccttctggcggaatcgtttctgtgctcgttcctcatcgggccggagctttgcgagttggcgggggagtgtctcgccgggtgaatgtttgatgggacgcaaggcatagagcttggcgatgagccaggccacttggcggcgaggcgcgcgctcgtttcttcgacgcaatggccaccataggcctgtgaacaggtcgaacccgtccacagtttcatcgaggccctgcccagcatgcgtgcgtaacagtcccagtgcaccgggcttcaagcccgttagaagtttgatgtactgctcggttggagtcacttcttctctcccttccgcgagccgggcttcttggccgcttttgcgtttagacgcatgttcggctccacgctggcaatccgtcgccgcatctccacggcggcagtggtgtaacccggcgaaagcgatcgggcgatggcgtccatccctggactatattcgcgggccgcttgctgccaggcgtgatcgcccccggctagcaactcgcccacattcgtagagactttgtcttcgacatgggggcggagggcggcaagcattggctgcacctccacatgttctctttggcgagatgctccctggcgggtcccctcggtgcgtcgcaatagattctgaacttttccggcgagtcttgagccctctttctgccaagtctgaatcttgctgatgctgtcctgaagcttctgctcatcggttgcagacagaaggggaatctcgtattccttcgcctccaggtacttgtttcgatcagtagcaaacccaacaatccagacttgacgcgtgcctgtgggtacagccttccggagcaccccggcggctacccttgcccaatcaccagccattgcgtcagcggcgtcaagaggattgcgggaagtcacgagaatgtccctagggtcgcgaatgacgtgcggatcatgccagattcggcttgcggccttcgcctttatgctgcccctgccggcatatacgctttgccggatcaacagttctttgcgcgcacatgagatgcatttaccttcgggttcctcagggtcgtctaaccaaacgcaccgcggtagccatgtcagtccggttagcaggggcacgtccccggtcttggggagttgtaaagccggattttcccatgcgggtgttcccaggttcgaaacgttctgccacgacaggctcagggtatgcgcgagcgaagagcctaaaggaatgacgtagaccggtggccgcccattgatcccgggtgactttccggcccctccctgggtggtgaaaacaggaagtcgcacgaggccgagagcgcaacatgccggacagagaccgtcaactttgtctgtcgcgtgtcggaagtgccaaacgtttgttcccgtgggaacttcgtggacgaggtaattaacgggaggctttttgtcgttttgtgagctggacttgtactgatagaaccgcttcacctcgcccagaagttcgaagcattctctgttgtcgtcgagtctcgtgaaccactctcgcggaaaggaatcggccgggatgggaccgtcccggggattgtcattgcaccaatagagcagcgcaagcaggaagcgcaatatcgccacgcggtccatgggattactggaggcgatctgccgaatgtgaccagcttgggtgagcgcctcaataatccccacgcgacgcggtgttccttgtttgtagagaaccggaatccactcctgatcaagcaagttatagttcacggcttcctccgccgactgcgccttggcgtttccgttcgcagtctgagttggattggcgaggggattgtatccccgaaaggcagcaaggataaattaaaaccgtctgaaacgtggcgcgtccttttgtcctgagccaggggattccatctggcttgtgggccgacgccttgcaggtcggcgtaagggggggctctgaaccccggatggaggcttctcctcagcagaagtcaaggggttcggctgggcctggagcttccacttattggaaagcgggtgcggggtctcgcccatgcgagcacaaacggttccgtgtctgggcggcggtccgcaaggcaagggcgacgcaccccgccccatcccaggacctatccggccgggggccgcccgtggcgattggggcctgtactttatcagactttcgcctaaaatggccgtaatcgcggcaggatgccccaggacgcgcagatggggtgcggggcgtggtttgatatggggaaagtggcggcaatagtcgtgctgttttttcaataggttgcggccaagttcgacctaacataatctccgatgtcagaccttagcggacaagtattgacttttctagggctttgggctatggtctcccatggaggcccgaaaatggccgaactaagcgatctggtacggggataccttagcgaaatcggctcgaagggcggacgtgcgcgcgccgcgcggcacgaccacgctcagttaagcgcatgggcgcgcttgggcgggcgtccgcggcggctggacgcgaggggcctggagcggctcgccgtaatgcgccggcaaggcgcggctttggcggaatgcgccgcacggcttggcgtctcgttggcgacagtagtccggcactccaagtggcggaaagagtgaggccagatcatacttgaagcggcgggcttcggtgtcggacctactgtagcagattttgtagctagtgccagtttagagggctttgcagggattaggactgcgcttggcattttgccgattttacttgcgcttgcgggcccttactaaaccatgcatcagttactttttggattttaagtcccttgcgtcttcctgttccgtcacccccgcacttgaagcatggtctccttcgcggccattttcgcaacggttgtccatcccgcgcaagcttggccttcgcgaagaccgcggaagggaatgggctggggcccccgctcaacggaagtgacaacctagcgcggggcttaagagacggcgcgtcctggaccccggcttgggtgggtaacaagccaacggcaggccagggccatccttgttgtcgctaccgcgcctatgatcgtccttccggcgtctatcgtcattcccccgggaacgggagtcccgccaccctccgggtgattgccatcttcacaacgcaagcgcctcagtactgacactccccgttctccgccttgacgtaatacgacttgtagtttgtggccttctcgtccatgcagcccgccaggttcagcaattccaccttgcggaattcgatggggtggctctcgctctgcaatgcaatgtagccctcggtgaggagcttgccgtcctttttcgcccagggattgtacctgttcaccgcgccgccgccgatttgcggcatttcgtagctgaggacggtctgcccgtcgatctgatggcggatgacggaatcgcccagcaccatcacttccacgcgcacccactggtcgccgtgataggttttggagctggagttcaggcagtgcgtggtgaaaaggacgccgtcgcgcacgacgtgcgtcccgggcgtgcagaggttggccgtgggccgttctccggttccgcgtccgccgagcaactgcacttcgatcgagatggggaagtcctgatccttctgcatggattcgggcgactggcaatgcagcattaccccgctattacgatacgcccaatccggcgcgccgcgcacctgctcgccgacgaagcggtattcaacggccacgatatagtgcgaaaacttccggcgatagaacatgtggccgaatcttccccggaattcatcgtactggtcgtaggcgaccttgagcacgccgttttccacccggtaggtgttcccgaaattctcgttcaaggcgtagccggtgatcttcaccgcccagtcgttcaagtccttgccgttgaagagctgaatccattccttctgattcggatcggtggccgcgaaaaccgcgggaagggacaacatccaagctgtaacgatccatagcagtgtgcgcataggagccttttcctccctcgtgccacaattatagactcgggcgcgggcccgcgggtccgtcattgccatcgccgggatcctcaccgcggccccggcggctgcgcaggaacgtcgatgagcacaggcttgcgttggatgaaccgagcgcgatcgtccagcttggcggcctcttcgctgcggccggctcggcgcagcatttcggcgtagccgttgaggatgggaaccaggctggggtcttgcgggccgcgcatcttctctacaaggctgagggtccgctggtagagcggctccgctcggtcgaatttcctttcagcccggtagacatccgccagaatgttgagtgcgatcgtaaggccggaggcttctcgccctacggccacgggcgctctcgagcgcaaactgaaggtgacgccggcgggggtgccgtggctgtcggtgccccagcagcgcgccgtcgcatcgctcaacacggcgcaggtgtgagtagcgcctgcggccagcgctgtcgagcgcggcagccccgccaccaccacggggctggaggaattcagattcttgccatcgccgagctggccttcctcgttattgccccagcaccggaccgagccatccgccagcagcgcgcaggtatgtgagtagccagccacgaggccttcgacccgcgcgagctctttgaccagcgtgggtgtcgccacccgggcactggccggagttcccgcctgcccggactggttgcgcccccagcaggccaccgtcccatcggccagcagcgcgcaggtgtggttggccccggcggcaagggcggtggccggtgccgtcagtcccgccacgcgcaccggcgtaagggcaggctccgtgccgactttgccggtttgtccggccacgtttgaaccccagcacatgacgccgccatccgtcgcgaccgcgcacgcgtgatggcctccggcagcaatggctttggcgcccgcgatgccgctcaccgtgaccgggctggccgaactggccgtcgttccattcccgagctgcccctgctcgttgttcccccagcatttcaccgtcccgtcggccaatagagcgcaggcgtgctcgcctccggcggcgacggcgcgggcattcaagatccctcccactagcacgggttcggtgagttcgctgggcgtcgcgcccgcctgacccctttgattcgcgccccagcaggtcaccttgtgatcggaaagcagggcgcaggtaaatgccaacccggcggccaacgccacgctgttgctcagtttggacacggtcaccggaaaggcggaaaccgccgccccggggacgccgagctggccactcagattggatccccagcactgcacctggcccgcgcccactatcgcgcaagtgtgattctggccggccgccaggtgagttacgccggagagccccgcggcggcgcgttcggcaatcagcagggcgcgttccgcatgcgcttcggcttcggccagtttgccctggaggttctcaatgaccgcgatgtcatccagggaatcccccaccgcgggatgatccgggcccagggtgcgttcgcgaatctccagcaggcgggtgtacacagggaaggcttcgacgtagatgccttgctggtagtagtaggtgcccagggcatccaacgagaccaccacgcgctggtcgagcggcccgaacttctctgcctcggcgagcgcgcccttcaggagtttttcgacctcggccagttgcccgctctggcgggcctcggccgcctgcttgagcgcttcctgccatcgcacgtcgtcctgggcgtgcgcattcgcggcaacgcccgtaaaggcgcaggcgaaaagcgccacgctcctgaaccagcctgctctgccttgcatcatccccttcttccttacccccttggctcccccaaagtcatgctagctgaccgtcggctgcttatcatcatctgaagtcagtcggggttcaagcgcagattacaggcttggcctggaagtgacgctgagcaaactcagagaaatgggctctggcccatgcgtccggcaatgcgcgccctcagcgggccgaggtggtatggaaatcccagtggagctggtagtagtagaggtccacgatcaccgagtagtcagcggtgatgcgagtgcccgtggggcccatttcgacctggatgttatccgcctcgagaggaatctcaagctgcagggcggcgcggagaatattggcgcgcacctgctcggccgtccggtcattggcctcggcaaagcgcgcttcttcccacatcttgtcctttaattgcgagttcgcgaagtagggtggggtgactttgaacagcacgtacccggctaccccgagcaggagcaaggccagcagagtcttcaactgaatcatgccttgagcggaatggcgacgcaggggggtcgctccagtcgccggcgcacgtcgggggctcatgacacgcattctaaaacgactcgcaagcccaatgcagcaacataacgtcaacctcaacctgtgtcccaagtcgagagtccgttcaaaagggccaggcgcacgtagcacggccatcttggctatgcgcatgggcagcgtgcccatgctacagagccttgcaggttccgcgttgcggacaacgcaggttgcggagtttctgactcaggagactgcggcgcgcttgcgggcgacgacgttcacgtcggccgtcagacgcgggaacgcccgcccccacaaggtgttgaggcggaaataccaccaccagttttccaggggaaggtgacgcgaggaaaagaaacggaagccgcgaatgtccacgatctcgaattccttcagcaacgctttgagagatggcagagtgaagaacgtgacatggccgaagttggcggtgaggacgtccgcctttttctccggcaccagccggggcaggagatgaatgcgcagccagcgcgtccaccaccaggacatggggacgcccgccaggaacagtcccccgggccgcaggacacggagcacttcctgcaccaggcgttccggattcggcaaatgctccagcacgtggctgcagaccagcacatcgaagctcgccggcgcgaacggcaaaccctcgttgagattggcctgtaggacggcggcatagccgttctgtcgggcgacttcgagcgaggataggcggacgtcgatccccatgaactcgattcccgggtggggacatgcgcggcgcagcttgccgataccgcagccgacatccagcagacgcagcgcccgcttctgttccagttcagagcgcaagaactccgccaaagccaggtagcgagcgagccgcagcggatacttggtcgtggcaggatcaatcccgaacgccaggcgctcgcggccatccggggtctgaaggtgtcctttgctcatgtggggtcagggaagtttccgctccctcactcacacgtaggtgcccttgagttcctacgtccgccgcaggccggcccggcctatggaccattcgtactggccggcattgccggtcggcgccgtcttggcccgcagggagcccactggagcttcgacgtagttgatcccttcatcgatgccggcgtggatgaagcgcgtgctttcttcctcgcccgccctgcgaccgaatggccatccacccatgccgaccggcgacaacttttcgcccgtgcccccagcgtgcgatagggcatcgtgcccttgacggcgggcgctgtgggggcgtcgagcaagggcaatgcggccaccgctcccgccacgcctgcggtcatccctccgaggaacgcgcggcgagtgggcttttccatcgaatgacacctcccgtggagttgcggtcccgcgctctgtatttccaatcctgctccgatgacgctgggattataccgcagggcgtcggcgccccgcgcggcgacggttggtcacgccgccttgaatccccttgccgaaaccccgcagaagctgtatacgtttcccgtcccgctgtgtcggggcgatagccccaaaatgaattctggcggttttgaccatgaggcatcgaattccctctcgattcgtcctgtgcgtgctggcattactgctcggctgcgcgcaagctccaacatcttcgtccgggagtagtcacatggtaaaaaaagatcctttcggcaagacccacgacggccaggcggtggacgtgtacacgctcaccaatgctcagggtatggaagtccgcgcgatgacctacggcggcatcgtcgtttcgctcaaggtgccggaccgcaacggcaagctggacgacgtagcgctcggctttgattccctcgaaggttatctcgccgggcatccctattttggcgcaatcatcggacgctacggaaaccgcatcggccaagccaaatttacgctggacggcgtcgaatacaagctcgctgccaataacggcccgaaccatctccacggcggcctcaagggtttcgacaaggtggtatggcaggccgagcccttcgagaagaaagattcggtgggcatcgtgttcacctacacgagcccggacggcgaggagggctatcctggcaatctcaagaccagggtcacctacaccctcaccgacaagaacgaactcatcttcgactaccacgccacgagcgacaaggccacgccggtcaacttgacgaaccacacctacttcaatctggcgggagcgggccggcgcgacatcctcggccacgacatgatgctgaacgccgaccactttacccccgtggactccacgctgatccctaccggggagattcgcagcgtcgcggggacaccatttgattttcgcaagcccacgcccatcggcgcgcgcatcgatgccgacgatgagcagatcaagtacggaccgggctatgaccacaacttcgtggtgaaccgcaaaggcgaaggcctgtcgcttgccgcgcgcgtcattgagccgacgaccggccgcgtgatggaagtcttgacgaccgaaccgggcatccagttctacgccgggaatttcttggatggcaccctgaccggtaaaggcggctacgtctataaacggcggttcgggttctgccttgagacgcagcatttccccgattccccgaacaagcccaactttccatcaacgattctgcgaccggggaaaacctacatgtcgcggacggtgtacgcgttttcggtcgagaggtaatgaatatcggcgcgcccctcaccctcaacctctctctcatgggaagaggggaaatttgattccccagccctccccttgagggggagaaagtcctgacttctcgggaggggggctggggtgacaagcagcggcgcccagagccacaagcgacggtgtgcagggtcgcggcgcatggaatcccacccctaccaactcagctgcaccagtgatgttccctggcgcggcagtgagaactggatccttaccttgccattctccacgctcaaccacgcaggcgatgtcagcatccgcaactggcccgccgcgacgagtcgcgcgtactgttgcgcgctgggatcttgcggcgcgcccatctgctgccacgcggtataggcattgctgtgagtctggtcgatgcggtagtggtggaccagaacgcgctcaaggtcgagaggaagcccttgaattcccaaatcgatctccgccgcgggggccgggacatcgtcgtcgtgatagttccacaccaggaccgaaacggttcgttcgctgcgcgtcgccatcgcgccgatgtcgggcgcaccggcaactcctgccttcaggatttcatccaacctggccgactggctgctcgtggtgggaatgcgctcccccttcatcaatccgaacatacgaaagatgttaagcaccggtttgtcgatgccattcgtcgccaggctccggaagccatcgaagtaaggttggtcttcaaactcgaaggcccaggtcaccgcgccctgaagacgaatctggtggcgctcggcgagcgccagggtcttctcgtagatcgcggccgtataggaaggatagagcgtgccgttgcgataggcgttctgaggatggacgcgcgccgagcatgcggcgcagccctccggatcggactcgccaaggatgaccggcaaatgacgaaattcgggaaaggaggcgacaatttcaaatccctttgcgatggactgcaactgacggctactgcccatccgaacgtggccacccaccaccttgggactacctttggcgtggaaggcgacgaaatccaggggcgagccggtgcggcccgtggcgtagttggtcccgcgggcgcagtgctcgagaaagcggcgcaagaattccgccgccttcggttccgccggtccggttgagtgcggcccgccgacccgcgcctccggcaaggcgcgcttcaccgcctcggcggcgtagtcgtagagcttgtgatattcctcgggtgtgccttgccaatagccgatgtcgggctcgttccacacttcccagtaccacgatcgcacctccgtctggccatagcgcgcaatgcagcggcgaacccactggtggactagctccgcccacttctcatagtccttgggcggatacgcccagcctgtccagatcgggccttgcgggaaagtatgccggtagggctgcggcttcgtggaaagtgcttccggcatgaagccgatttcgacgagcggcttcacgcccgtctccatgtaggtgtcaaagattcgatcgagaatcgtccaatcatagatgggccggccggcggcgtcttccctgtaggcgttcgtcgagccccacttcagcgcgtattgcccgtcgcccgtggtcagcagattgtgggctcggatatagacgggggctgaactcaaagcggcgagttcgcctaacaacttctgtccattcgccgtatacgtgtagttgggttcgtcatagccgaaataggcccatgcgggcgcgaaggatttgcgcacaccggcggcatcaacctcgatgaggacgggactttgcgcctgcagcgacgtcgcggccgccaggaagaggatagaagtcatcagttgccgagagaccatttttcaaattccttttgtgcggggcccctggggcgcctcgacaacgctgggatcggcgccccgcccaacacactggagcacaggatgctgagcgaatgtaaccctccgaggagcaccgtgtcaaaatctatcgctgctggtgctgtgcggcccgcgccatccgggctaaaatgggactctgcccgccgccaatgcattcgagcgggcgggcgtttatcgatccggaaggagagagcatatgtcaaagacgatcattcttgtgcttattattatgtctagtgccctcagcggtcggggcacagcaagcgcagccgcctctcaccgagaaggaagtgttgaagctgctcaagaagcacaagaaagaccagatgaaagccgtggccatcgtgggcgagcgcggcgtcacctttgacgtgacgccggaatttcagcggaagctcgaagagaccggtgccgagctggagtttttccaggcggtggtgggcgccagcccttcagggcgcacgttcaagacgcctctcggcgataagctggaggtttcaccggtggagaaagccgccttccttcaggtgcagaacgaaatggaccccgacaggcagcgcacgcttgccgcggattttgagcagaagcatcccactagcccgctcatgacctacgtgtggagccagaccgcacgcgtctatcagcagaagggggattacgcgaagaccgtcgagcatggcgagcgaagcctcaaactcgacgccaataatgtcttcagcctcgtgcttgtggcattggttctccctcagccgcggatgctgcagggcacaccggccgagaatgataggaatctggcgacggcggaatcctatgccacgcgtgctttgcagctcctggaccagatccccgccgcgtcactcgaaaacgatgagcagctccaaaagcagaaggcggcactcgcctcggatgcccatgcggcgttgggcatggtcgccctgcatcgggacgactctccaaaggccgtagaggaattcaaggcggccatttccacggcgaccggcgccaatcccatgaattattaccggctgggtgaagcatacgagaacttggggaagctggaccaagccattgacgctttcgagaatgcttcgaacctcggccagggcacggtgctcaaggattacgcggactagaaagtggaagagatcaaggcgaggaaggccctcgtctcgccgcggtagcggccgcagaaagaccgtgcggctcgattccttggccctattcttaactatttggccccgtcagccttgccgcggcttgaagatcagcacggtgaccgaggcgggcgggaatgtgtgccgcaaactgccgctgcctacattctcctgcgaagccaccggccggatcctttcgggattttcttcgtcgttcctgacgaggagggagtcgccggtcagtgtgtggaccatcgcctcgcccgccggcgcgaagtctctgatctcaaccgtagccgccatcgcgtttttccagtcgcggttcacgacgaagacgacgagatcgcctttcttgctatcacgcgtggccaacacgtcgagataggggacatcggggatttcaggaaaacgccgttgcccttcgtgcacgtcgtagtgcctgacgctggtgcgggtgaccaggggagtgtctccggcgtgattcgaatagagcgaaaacgcccaggcctgcggcgtgagaaagaccctgctgcgtttcttctggataccggcgaagtcgataattccggtcatgttggccagccgaacggagtcggcgcgggcgagcagcatgttcatccaggccgcgccgttgatggcgccgcccaggttgtcgaaccggatgttttccgagccttcccgcgcccagaagagatactcggtgaatgcgatcttcacgcggccgcgcgtcgccgcgtgcgagtcaatctgggcgcgcatggattcgagcgcgcgtcccacggcgacgggaagggccagtccggcggtccaggtgaagtcccgggcggcgccgtctctaaccatctcgcccatgttcacaacgaaatgcgtggaaatgtaatgtagggcctcggggtcggcgctgagaagcgccgcgttccatttctcgaaagcatccggatcggcgcccgtagcgatcacgagcgtgtctttcggaatcgtgctgcgcgtcgcgcggtaatactcgcgatagcggcggaggttgccctccggcgtttgccagccgatttgaaaatgcccccaaagttcgttgccaaattcccaggcagcgacggggaacggttggggatgtccgttcgcggcgcgacgcttgccttcggccgtcgtggtggcgccctggcagtactcgatccaggcacgcgcttcctccggagttccgctgccgagattgaggcagatctgcgcctgagcaccgatcaactcacaataggccatgatctcgtccgtgccgatgtcgttgtattcgggatagccccacgcctggttcagtttcgtgggtcgctggtcgagcgggccgaccccgtcccgccagtggtagccgctcgtaaagtttccgccatagcggaggaggggagtgtgtaggtttttcgacgcgcggatgacgtccgggtccatcccgcgcacagcgtcggcagggaagagccggatgaaatcgagcgagacgcgatgctcgccccgcacggagacaacaaaatccgccgaagcgagcggggcgagggcgccttccggaagcgtcaggcgaaaggggagcttcgcccagcgtccgccggcgggcacgaggaggcgcgtggcggccagcgccgcatccggcgagtcctgctggcggatgctgatatcgagcggcacggctcctttctcggaggaggcaaaaagcgatccgtcgtaggtgcgctc

SEQ ID NO: 567 - DNA, 17819 bp, Artificial Sequence
  Synthetic Oligonucleotide
gcctgacccaggaggcttacaacaagttctatcccatcattcgccctggcggcacgctgatcacggattcccgctttgtgaagaccgagctgaaggtggatgcccggcagattgagcttggcatgtatcagtcggtgatggatgcaatcggaaagcccattgtctttaatatctgcatgttgggagctgtgatagccatcactggtctggtcagacccgaatccgtcattcgtgtgctggaaacccgcattcaccccagttttctggagatgaaccgaaaggctctggatattggaatcaaaatcgctcaggatatcgataccccatcatgaaattaccaccggtgagattggtcattaactcatcgtaagaggttaaaacaaaatatgacagacagacttgacattattgaggatcacctgcttaatcgtaaactcgttggagtgtgggagatggtcagtgatgattctcccacgactgccgatgggtacgccctcagtttggaaggatatttccttgagatagagacaatgttagatttttccgctgtaagtattgggtgcggacattcccggactgactttcccctggatgcagaatcaggctatttctaccatgaggtatctcatgatacgccctactcgcagttcataggtaagcggctctcaaaatggcgtttgctggtgggcgaagggggcaattgggatggattgatggtaagctttggcacatccacagggctctgttttatctcagtggattgctcaatctcagttctgacgttgaatggaatccaatgttaggtagtactaagcaatggcgtgaaacatgaattagggtagcggtagttgactcattatctgttcgactgtgtacggacaggtttcagggaatgcggactctggcagtttcctgcacgccgatccggttgataatcccatttcaacaggtgcatcaataacactgccatcctgcttaataattcccgcttctggcttttccccattgacgacaggatacgcaagataaagaagaatacctcctattctgtattttccattatcctgtctatcgttgaacggattgatgacgaattttgaagaagcatctgattatccagccatcaacccggatattttccctttgcaatacaaaggcctgagaaaaaacaatgaatatgaaatcagacaattataatctgcttgaagaaaaatggattcctgttctgcgctcaaacgggaagtttgaccatgttggcatatacaccgcattaaatgaggcagatagaatccgttgtatagcagccggcaatcccatggatcgcatggcaattttgcgattcctgctggccctgctgtattggtgcatgggaaatccgccagacaaaatggacaaacaattctgtgaaggttttcctgccgactggttgtccaaactcttcgataaaaaggactgctttaacctgctaagccaggaaaagcggttctttcagtaccagaaactcaatgacaagaagcttacctccaattatctcatccacgagattcccacaggaacaaatctgtggcattttcgacattcgaccgatgcagtaaatggattgtgtcctgcctgttgcgccatggggcttttacgcctgccattgttttcaacatctggaggaaggggaaaaccgcccggtattaatgccaaacctccaatctatgtcttacccttcggaaagtcactggcggaaacccttcggctctcatggagcgcaaatccaaatttaggtgaaccagcgtgggttcgacccgatctcaaactaccggtaagcggacaagttcctctcctgacaggattgacgtggttgcctcggcgcgtttggttgagcgatccggaaacctctgaggcgcattgtatttcctgcggccgcatggaacggctgatcttatcctgtgtgtttgaagggctcgggagcaccaaaacggatgatggcgccccaactcggatgtggaaggatccgcatgtcatttatgaaccaaacagcaaaggagatatgctgtctcttcataacagtagcgttttagatgcagcggatgcagcagccaatcagtgggccagaattaccgcaggcgtgattcgcagatcggaacccgataaacacaaatgggtatggatcattggtttttctactgttaagaatgataaatatcttgaggcaatcgagtttctggtgcctctgtcaggtttggagcagcatcaagaatccattgaaagactggaacgatggcaagatcaatgcaaaaaactttcaaatcgtttggttcatgtgttcatgtcttcgggtgaaaaatcgtcttcccggaaacataacgaattgttatcaattctaaatacgattcgaccgcaggttgaaaccgtggtatttaatatggcacccgatctggttaccggatgtgatgaagcttggcaattggcagcaaagaaatatcaacagatgatcaaaatggcagtgcattcactcgtaccgggttttacaacagcatcgattcaaaagcgcaagcagatcgagaatgtgtttccggacatgactataagtgaaaaacttctatccgatcggaaaaaaggaggcaaaaattgaccgccacagaacaattcattgatgttttgaaaacgttaaaggcgggggatcgaaagctgttacgtactcatgctggactgggtctcgatcaatcggtacaggggttcgatttgttcgccggaatttggtggccactgcgacaaaatagctccaaagcgccccgccgtgaggtggcatggttggttgcaaaaatttttgcttcttatccgattccgcatttcccgaatgaaacacttgcgagtcaattaaaaaaacgccaaccaacccaaacccaagacagtaatcgttttgctcaaagattcgacaggatgttggttcttccgcttaataaaatcgaatcggcgctgcaatgggcgctgaagtgcatagcagagttgaaatatcccaaacttgattgggtgagactgacatacgatctgtccatttgggaaagagacgccactcggctcaaatgggcaaaccaatttttgcaattaacaaaaggagacagtgatgttaatcgagattcacacgattcaaaaccatagcccatccaacttgaaccgggatgatttgggggctcccaaaacctgttatttcggaggagtattgcgctcgcgcatctccagccagtgcattaagcgaagcatccgtatgagtgacgaattcttgttgttgcgtggcgggatccgcacccggaaactggcggatgagattgccaaggcaagcaaagccggagcggataataggaaacgagctgcaaaaattcttggttgctgtggtatcaaatccaaggagaagaaggataaggatgatgataaaagcgatatgttggtttatacctcccgtgaggctatacaggaaatggcgaatctcttggataacgacgaaggtaaaaccgacgatcaacaactggcgttagcttttggcacgcttattagtgaaaaaacatccgttcctgatatggcgctcagcggaagaatgttagagacaggcattcttaaaaacaccacagtagaggcttcccttcaggtggctcacgccatatcaacacacgaggcccgctcggaagtagattattatgttgccgcagacgacatacctggcgatgatgcaggtgctggctaccttgatgaatctttgtttgtatcatcttgtttttacaaatatttttcgattcactgggaaacattggtccaaaacctggagggaaatatggaccttgccgcacacactgtaggggcctttatgcgtgctgctgctctggttacaccaacaggcaaacaaaacagtttcgccgcccacaatccccccgatgggatacttgtgcaaatccaggatagaaacatcccaatcagctacgctaacgccttcgctaaaccagttgatgtcaatgatagagatatcgtctcgcagagcattgcacagcttgggcaatacatacatgaccttgacatcggcttcggcaaacctcaaaaaagattctggttttcaccaaatcttcgttttccacttaacgccatgaaagaagataaggaatttgcactttccgaacaaaatataatgtcccttgaaggtctgattaccagcgtaatgaaagaggtcggatacgactggagcgatgttcagaaaagcattgtaaatcctgaggtaccgtcatgagtgttaacaccctctttctccgtttggaaggaccattgcaatcgtggggtacggagcagtcgaaatttgtgataagaaggacaagcgaagcccctacgaaatcaggaataattggaatgtgttgtgcagcgctcggcatttcacggcaggaggctgcaaacggttggcttcaaaaactgagtgagcttcgtatggcagtccggattgatgtgccgggggtccgatggtgggattatcatacggttggagcaggcatgatgatgcgcaccagtgaaaaccgaagcaagacaaagccaggccccctggttacccgacgcgaatatctctgtgatgcaagttttctggttatccttcagggtgagcatagtttggtcgccgaattggagattgcagtcaacaatcccaggtggccaatttacctgggcagaaaatgttgtactctatctcgtccactgctggtgcatccggcaggcgattttccgaatttggtttcagcactgaagtccataccctggcaaccaagacttgccggtgatccgatgccgcaaacagttgattgtcttatcgactgggaaccgacaatcgatcaaccagagccgccagacgatgcgctcattttctacgatgtgccgctgacattcgatcctccatcgcattgtcctcgttttgtcatcagagagtctttgatagtggggaaaaaccgggaaattggcattgcagaaaagccggcgcagaataaaacgccacgaccgtcacaaccacgggcagactacagaaatacggaataccgccatgctcgcataaaacgtcttgatgctgaccaccatctgtgcatactttgtaaatccccggccacgaccgtccagcatatcacctaccgcagggccggagggaatgaaaccccggatgacctccgttccctgtgtcggctttgtcatgatgcagtgacgatgattgaatatggcgcaggcatgggattggaccgcatcaatccggaagaaaaaaagtggcgggaacaaatcattgagaagcgaagcgaaattattcgttttcggtcaatagaaacccgacggcggcatctttccaaccaggaggtctaatgtacttatcaacgcttttgatcaacgctggcgatcatcccgaccgaccacgccctggaaggtcatggttgcggaatgtttacagggttcatcagcggctgtgcatggcatttccctccggggagcgaaaacaggctgatgaggattttctcaagccctataaaccggaggattttggatatcatcaagttcatgtaccacgaataaaggatgccggattcctgtttcgtatcgatcccattccgggaggcagggccatcattctggtgcagtctgcagtggaacccgactgggattttgcattccataatgctatgtttctgctgtctgcaccgcccgatataaagccttttgatcctcaattttcaattgggcaaaaactactgtttcggctgacagcaaatccaactaaaaaaatagacacaaaaagtgggcctgatggaaaaaagcgtaacggaagacgagttccggtaaggccagaaaactttttggaatggctggttcaaaagagcattcggtcgggattctctattatgagtgataatattatcattcagacatcctatatcttttttcacaaaccgaatacacaacaggaaaattatttgagtgaaatatcacctgggaaaggcgattatcaagcccgcctgcgattggtccgttatgatggagttctcacaattgatgacattaacctttttcatttagctattgaacgtggcatagggtcaggcaaagcctttggttttggccttctttcgttagcacaaatgcagtgtggaacgctatgaaaatcaaggacctacacattcttccgaagtttcgtgatggtttgagttatctctacgtggaacactgtcgaattgatcaagaatctttggctatcgccatccatgacgcgcgcggaaaagtacctgttccctgtgcgaccctggctctcttgatgctcggtcccggtgtttcaataactcacgccgcaatatctgttcttgctgatcatggttgccttgtggtctggtgcggggaacagggcgttcgtttctatgcagtgggcatgggagagacgcgcagttcagctaacctgttgcaccaggcgaagatgtgggcggatgataattgtcgcatacaagtgatacgtcgtctttatcagttacgatttcccgaaaaattggatacatccctgacccttcagcaaattcgcggaatggaaggattacgggttcgctcggcttattccagagcagccaaggagtccggtgtctcctggaccggtcgcagctacaaatccaacgaatggaacagtgcagaccccgttaacagagctttgtcaactgctaattcctgtctttatggcatctgccacgcggcagtggtgtcagcaggcttttcgccggcgctggggttcattcatacggggaaaatgttgtcattcgtttatgatgttgctgatctttataaaaacgagattacgatcccaattgcatttcgtgttgttgctgaatccaaagatgttctggaaaaacgtgtacgggtggcctgcagggatatgttcgtttctatccgcctgctgaaacgaatcattccggatatccagatggctttggggctttcaacgcagaaaacagcagatgataatgaaccattcgaccgggatgctaccgcaccaggttctttgtgggatccggagttaggcacggtggaaggcgggcgctcgcatcctctggaaatggatcaaatgactgaaagggaagatgatggtagttttcatccttgaaaatgtgccactgaggttaagaggagaattatctcgctggttcctcgaaccaaaggcaggtgtttttgtggggaatgtttcggcaatggtaagggagaagatttgggaaatggtttgcaaacaagtaaaggaaggcggttgcttgatgatctatcgcagtgataatgaacagggatatcaaattcttagttctggtcaaacattgagagcaattgaagacttcgaaggattattgcttattcgggtaccacagatttaatattttttcagtattgtccccacgcacgtgggggtgaaccgataatggaagcaactcaggaaagaatgatttaattgtccccacgcacgtgggggtgaaccgcctcggcagatgacgttatcgcagcagggttgattgtccccacgcacgtgggggtgaaccagcagcgacatcatcttcagcaaccccatcaaaattgtccccacgcacgtgggggtgaaccgccgtatcatgttcgtatcaatatcgagcatcgattgtccccacgcacgtgggggtgaaccggtcatcgtcatgtcgattatgaagtgccttgcattgtccccacgcacgtgggggtgaaccggagttaatgctgatttgtcagcgggaattcccattgtccccacgcacgtgggggtgaaccgaatcttcgccgcaatcacggatgatgatttccattgtccccacgcacgtgggggtgaaccggaaggataaaaatggcaaatccaacactgtacattgtccccacgcacgtgggggtgaaccgtgcgggttgatgctaccaggcacccaagcagtattgtccccacgcacgtgggggtgaaccggagctgggttatggagaccaaggtgttagtagattgtccccacgcacgtgggggtgaaccgcgcctatcgtctgcaaaaaagacggcgataatattgtccccacgcacgtgggggtgaaccggaattgaaaataatttgataccttttccgtttattgtccccacgcacgtgggggtgaaccgcaatctttaatttgttggtgaaaacatcaagcacagatcaagtgaaaaatatcccatcgaaagaagcgcgaattaaaatactatgctctgcttttaaggtaaatgatgtattggctgatggtaaatataatgtgttaattgtggatgacctgtgtgacacagggtcatcacttgaagcggctacagtcatgttaaaacagtacacaaaaatcaataagatttttgtagtcgcagtaacgaggaaaaactcatgaaaaatgtttttgtatctggctcaatcaatataaaaaaactcgattctaaagttatcgaacggttaaaaaatattatctcatcgaacttaagagtcattgttggggatgcaagtggtgttgatagctctattcaagaatacttaaaatcaaatgaagtccgttccgttgttgtttattgctcaggagataagcctagaaacaatatagggcattgggacaccaaaaaggttgatacttcctataagcctggaactcgacagtttttcacagttaaagacaaagcaatggctgcggactgtgattatggctttatgatttgggatggcagtagcacgggtactctgagtaatgcaattgaacttgtcgaaagaaataaaatagcggtagtgtatgtaagcaaaactaaacaattttttaatataaaaaacgttcaagacatcgaaaaactaatcaaatttatgagcgagacatcgcttgaaaaagcagacaataaaattggtttattcaaaaaaattgaaaccataaagtctatccaacatgacatattcgatattcagcctatcgaagccaacacgcagatcaaacagccaaatctaacgcaacactccataggaacttcgccatcgctcaagcgctgaactttgcgttatgctgattcccctcctatttccatgtcatggatgattactgacatcagccaattcgaaggcacttgctaatcgatgtgctgtccggaaaaatacgccagcaaatgctggaacctgcaatccgtcttcttcgaggaggatcacttcgtaaatgatgtctatttgtttttcacaaccactgatcgccggttccttaaattggaatcccagaacctgagccgtttgcgcgaaatgataggctatgcgcacacagcgctggaacaacacgatacaattgcaatacatggcatttaataatccgcaccaacagcgttgcaactgcattcttgacattgttgatttcacatcatgaagctgaactacagaagaccacttctttttcaccaaaacgatcgctccaattatcgatagttgttgggatttcatctttgtattgtgggtcgttggaaaaatatttgactgtattaccgtcaatcacagcggcataaatcattctgttaggacaatgcattattatagcttccataggcatccgtgaaagaacataaattcaccatcggcagatctcgcaagtgcgacattgtgttggcagacgataccgtcagccgtcatcatgctgaactcatttttttgcataatggccacctgcatatgccatgcgggaaacggatcggctgagtgtgacggcgcacacaggcaaggatcgggagaactttcagtttggattacaggcatttctggaagaagctcggaccgttgccaagttggtgcatccgaatattgttcgggtgaaaacatatctggagcagaaccatacggcctatctggtgatggagtattacgaaggattgtccgtggctgaatatgttaggcaacaaggcggtcgaatacccgaaaaatcagcagtggggatcatgcaattcgtcctggatggcctgcgccatgtgcatgagaatgggtatctgcatcgggatgtgaaaccagcgaacatttatatgacgaagcgtggtcaggttattttgcggattttggggctgcacggtgtgcgctcggggaacacagccgaagtctgtccgtggttgtgtcgtctggatattcgccatttgagcagtatcgcagcaacggaaaacaggggccgtggacggatgtctatgcatgcggggcgacattgtactatctggtgacgggacaaaccccaccaacagcggtggatcgtacagacgaggatgacccagcgctactgattccgcctttgcagttatctccagggttatcgcctcaagttggtcgggcgatacagaacgcgctgacactaaaagccagtgatcgcccccagaatacgaccaaatttctgaagatgctgacaggtgtaacgctgtccccgatgccaggcttcactcctcaaccggcgcacagcccaaaaccgaaaccatcaccagtacccagtccgaaaccgactcatgtgcaaaaacctgcagacacttggacagagccgataacagggatgatatttgtgtgggtgcctggggggtgttacatgatggggtgtgggaatggggaagggaataataatgagaaaccggtgcatgaggtatgtgtttatggattttggatgggtcagacggaagtgacgcagggtcagtggcagcaggtgatggggagcaatccgtcctattttaaaaaaggggataattatccggtagatgagtggcaacgtgtgggaatggtgtgaggacgtatatctagccgatcaaataaaaacaatcctgtatatcattatggctgtcccggccgggtgatccggggcgggagttggaactacggaccggactatgcgcgttgcgccttccggtacagcgacgaccctgccttccggaactacgacgttggctttcgccttctgaggatgcattagcttttagttttttacttttttatctttttaaggtttttatttgtggtttcagggagcgtagccccatggtcgcggtcatccaacggaacctttctgaattccaaagaaaaacttaaccccggtgaacagcgatgggtgcccgatggaacacggttttatctggcaaatcctgcctatcaatttgaactaaaacgaaccggtaaaggagattgaaatgaactacgatacatcttttgtcagtgagattggcggccgcaaggtcaacgaggatacttatggctatcaaatcgcaccatccggcggctgctgggtggtggccgacggtcttggggggcatcggggaggacagccagcctcttttttggcagtaaaaaccgttatggaatccttggctctgacgacggacaattccccgaacacgctgcatcgcagcctcgaaactgcacagaatgccatcattgccggtcagcagtcggatcatgaactctatgctatgcgcaccacgatcgtccttctggtgattcaaaacgatcaagccagatgggcgcaccttggcgacagccgattatatgcttttcacaaaaaccgtgtggtgtttcagaccaaagatcatagcgtccctcaggtgctggtcagcgccggcgacatccggtccgagaatattcgcggccatgaagaccgtaaccgtctgctacgcagtttgggaaatcaagacgattttcgtcctgtcattttgagaatcctttcctggtacgctctggtgatgcatttttgctgtgtacggacggattctgggagtatatactggaaaacgaaatggaggaactgttgttcaattcagattcaactgcacagtggcttcagcaaatggaaaagctgctattgagccgggcgccgaaaaatcaagacaattatacagcaattggcatcagggcgatttagaccgacgagccattccttggcccccccccctttttcccaaataaggttgtaaaggttacaaagctcacatgttcagtctttatttaccgttgtccatttgaatccaaaacgataatgtttgtcggcctctctatggcctttaaaatatttttcctcttttgtaatctcaatcttgtcaccaatattgcgaatattacagatggcgcagaatgtccttctcttgtcaggattgtctaatcgtagtaatatcacattgtcaagttcatcctttatcgcgattcgaccgttaacatcagcaaagtttgcattacccttgtagataaatgtgaagatcaaaatgacatcaatgatatctggacgcatgataaagaggttttcgccatccgacgattggccgctccggtcattcttatcaaggtagatgaaaggacgctcgttcttacttccaaacatatcacctaaagcctgaatgatccccatgctaccatccttgagtacaaacatgcagcctaggtccaggtctgcgttgactgtctccgacgcggagaaaaaaccttttcgggtgatagactgctcccagtttagattgatatggattggttggatgcctcccctcttccttagatcgacggtttttttgtctcctctcttctccatggtgaccttcgatatatttattttgggggaaggaggcgttgaaggggcggactgcattagcgatggcgatgcagcggaaatatccacgccaccgaaatgtttgagcagagcgcttagtccgccattaaaaccctgtcccacagcagccaatcgccacaggtccttgaagtatatctccccaacgatgatcgccttctccgttgaaaattccgaacccaagaagggaaacctcaccaattcctcatttttgacgagaactcttagatatcctctggagatttgattcatagcgcctgaaccatccatcgccaccgtgaagaccagtttcttaatggtgttaggcaactttgacagattcaccatgaacctttcagaatcacctgcaactgggccaatcttgctcagagcattttcaggtgaagtaggttgattaaagaaaataaaatatcgatcatcggagagacggttgttctgatcgacaccaaaacaagtcacatcaattgagtcggggccgccgtattcgatatggatgccgacttcgatatcaagagatttcgttaaatcggaaagttttactttctgcccgcgtatcaaattcattaacaatatatccttataaattagacttaaacaggatagggttagcatctggggtgatgaaaatcatcaaaaaaatggttttaaattcaatatccgtgaatgaatgatattcattgcaggtcaagacaaaataattgcctcattccatggaatttcttttgcttttgcttttcctttactgtctgtccaagtctggcctatagcacatcgcatccacattaaatttgtttttgaatctgcaacagtaccatcattgttatcaatataccgtccctgcggaccgattctatctcttacaggagaactgtctgatctttcgctggaggactttgtcgctggtgaagcatcattatattccagttgtcttttatactcagagatcgatagacatagtggggacgtgataagagagcaatcggattatctttttctccacgatgccagttgacacatccagcccggataattctgatttaaccgagcgccgcagcgccgggacgtaccaagaaacatcgcttccaggggataccttgtcgccatctttaacttcagttttgagtacgatcttcagcgcttcaaactctccagcaggcacttgaactttttcccatccttccaccatacctatgattgtatgttggcgttgatgtcctgtcttcttgtcggtttcggtagattgcgcagtccacttctttccaggactgaggggaaagtcaaggtatttgagtgcaggcgaaaacgaaaccccattattgtcgccggaaccagatccaagatatccccaggtacggtcgtagtaggtggtgcgctcgctgccgctcttcgcgttagtggtcaccattgtcaatcggttgtcttcaatggctgtaacttcacgcgtcgcgacgtagctgagtttgctgttcgagacgttttccgcttcgaacgtatagctgtcaccaaccctgattgttggtgcgactaccggcttatctgtcacagcggctgatgtggagactggtgcgactgttgtggtattggtgattggggtaggaactgatatcggttcttcaccaggaatgtgatctttggttatatatttcccgtccttgaatgtgtagttcaacgttgtgacatcatctgtctgccccgtgattttatgctttacgctgattttgaatgtggaatacccagttgcaggtgctggatcaaaagcgatatgtagggagtaggattcgccttcttcaaagctatctgaaatactcatctgcaaaagaggagtcaatccattattacccaattcattgatggaaataccttcccaattgaaacccatgtgcgtatctccgctttgtacaactatcgcatatttatctgcgccgatctgcgtccaagacatagagggtggagtgccataagttcccataaaggctaaatatggataatgcgcctccacacgccatttttcacctaccttgacgaagatggcggcattgatcagtggggcgcatccgtgacattggttgctatctccattaggctgcgtcgaagtgagaaggatttgttttgtcacacctgtctgcgtaaattcgttcgaagcgatgacgctaaccagcccatccgtctcggaaaaaatctcattggtgtcgatttgatgcggtacttgcatatcactccaaagcgctgccttcgcttctggctggtagggtccgtagaggatttcgagcgctttaatgtcatcgaacgcacctatgatcatgcggttttcctcagccttgtcacataccagttttattagagctgagattccaggctgtgtctgagtatctatgtttattttatcagatgggaatttcgcttcacttgtgccatcatctttgtacttcactccctcgttgccctgaaagacatttcggcaatctgtctgggcattctgaatcacatatccgccaccgtaaaccacgcgaaccatattgaaacttacagtcccacttcgatcacgtatgacagaattaaggtccacaaagaacttcgcagcatcaccttcccttccagtctgagtaaatcccggaaaccgattaggatcaattgactcgtcggacttaccgcatgcagccagcgtcagcaatacaaaagagcaaataagaaaatttttcatggtatcacctgacgggtgttgcgttcgattgcaagtagtacgaggataagactgaagagagcaataagtattatcgcagacacggcagcacctgcaaaataaaggcgtgtttgttgaagatccactttcgagacagcgtccttcgcaagtttattctttttcagttccacaaacttgttgatggcctcgtatgtattcagattctgcttttcaacctctgcaacaacagcagccatttcatcgataaactcttgctggttttcctttggaatgtcgtttagaatgtttctcagcgcccggatgttgtctggtgtattgaattgcttctgtagagcgaacggaagctttatcccaggcagcatatttggatcaggtatcgccgctttaggcggggtggacgttgcggtaatggtctcctgaacataaacaggaggttttatagcttctatgacctctgagggattgaccttggtcacggtatttcctaagagcgagctgtacgcaatcaaagctccaaccacgatcactgtaattagtccgaaaataaagagcatggcgagcccgcgggtcagatgaaaaagaaactttctctcgaacgagtcaaagaatgacatttgctttattcctctcagttgataaaaagctcatctatgtgtgctggaagctatattgtatgttttcttgttcacttcaacatcaataaatattagacgaccctatatgaatatcagcacgttaagtcaagaagaatattatggcctgaatatcgtaagaaaccattttggcagcctctgtcccaactgcgcgaaagatgaatgctgaaatactgccgagcagactgtccctgcttccggcgttgatcactgttttttcaagcgatcttctatgctcagattgagcaataaaattatcgatgatgatctttgctgaatcaggataaatggcgttgtaatgctcaaggatgttcggaggaggcaatgggccactatattgttgacccaccaacgttaatgcatttttgttatctttctttttggaagcggtatgcggagctgaaggaacctgccgcttatctggcattttcttgctcaaaggtttttatagctgcgtacatatccgcgccgaccgccatccagtccgccatcagcgcgtcgtaatcggccatgctttcagacgaggaatcattgtatggggatcgctaaaccaaaacataccttatgttaatcttgactttatttttataatagcatgactatattatacttttctaaactgattgcattccaataaagttgcaatttttgtattattcttaaatttcatcgaacaatctaaaatactgaaatcgaaaggattcccccctttgaaaaagagggaccaggggggatttatgaggctatctacctgaaaaatccccctcgatcccccttttccaaagggggaagtatcattttcatatatggggtgatcgaatttaagaaagataccgattttccggcatccaaatcctgttcaaagctcggtaaaacgcatacaatcaggcggggagacagatgaaaccttgttctttgaaatgcttgtcaagagtgaaagcagttgtaacccccaaaagccgcatggtttcaaagctcacacagtcaacaagactcagttttttcctatcggcagcaagcagggcccccattgcagcatgatgcacagctttatcaatccattcaatccggaggacaggaacaatgtcttcctgaaacagttttatcgctttcatgcctaaccggttctgcacaagggcgcaggtttccacaaggacataattacttgtcacaagagtttcttcggatgtcaaaatatctatccaggtttttgctgcctcggaatgactcgcgtcgtccgtgtccaggaccgcaatgaatcccgacgtgtcaataaaaatgctcattcgccaaatatctctatcaggtaggaatcgtgagaagttgccaggtccttaacaccggatctaaagcaaccagcggccgccattgcccgtttccgacgctgctcatctccccctgcctgcttggccttggcaaaataatcaacagcctgtctgataatttcagccattgatttatgctgggctgcagccatttttttcagcaacaccacatgttcttccggtaactgtatctgtgttcttaccatatatgcctccgcaggtgattacactttacagaaatatgataacacttatgcggcaacatgtcaattttcgtatagcggctactgtgttgacaggtaaacagtattctgcaaaaattgcactgaatcgcactacactacaagaggtgaggaacaaacatggaaaagaacttgaaaactggtggcaagaaaggtttggtcacaccttcgacagccttactcaatcagaggctcgctaccttctcaaaaccgagaatgctgacagaatacgaaataaaattgctacggcagagcaaggttgaaattgccgaagcca

SEQ ID NO: 568 - DNA, 17450 bp, Artificial Sequence
  Synthetic Oligonucleotide
cagatcgcgatggcgtgctcctcctgatccacaacggcgcgctcgacgtagaggtacgagagcttgtcgctgaaacgggggaggtcttgggggttgatggtcttgcggtccatggctcaggctttccggggcgggggtggcacagcggcagcggcgcaacgggagcgggacagcgggagagggacaagcggtgtgtcgcgccaaacagatgcgcgaatcagatgacaggcgagacgcctgtcccaccctgctgacaggcgagacgcctgtcccaccctgctgacaggcgagacgcctgtcccactctcttgtgtccacgaaacacagggctgcccaaagtaggacgggcgtcccgcctgtcagattcaaagccggctccttcgcgggataccctcccggcatatccactcaggcgggagcgacgctcaggaggccgaaaccaaacgccttggccgaacctatgcccgatgctatagcctgggcaaagagcggcgcatcggcaaccgcaagcgttccctccagcaaggcagatcggaatttcatctggcggccaggatgcccgccctccccttccttcccttccttcccaggcgttttcctttccggcagatagcctgcgacccaccccaggcgcagaacgcggcagtcgcgcaactcaaacccgctctgcgctgctttgcgcgcaaaccacggaaggatcatgtcctccggtctctggccctcttcccaagtcagcgcaacgcgctttccttgtgatttcgggcggccctgggtatcggtccactctcgcaccttacgaagatcggtcccgtctctgctctccgcggtcttcttgctcaggttgatgaggatacggaagcggagttcttcgcctaccgtgaatgcgggctgccattcgcgactctcaggctccgccgcgaggaacatgcgggcgttctggaaggcatagtcccaatccggctttagcacggactgcacaaggatgatggcgcgcgggctgttctcctggatgctgttgtcaatgcggaagaggaaactgtggcgtgggtctttcggcacagcgttcggattgcgcagcagcgggaagtccttctctttgaacggctgcaagaaagccggatcctcgcgcggccgctcgcatttcggaaacgccatgcagagccgctggtgcacatgatacatattcctcagccacaaccggccggggcggggccggtccgggttgctccccacctcaatcatgagatgcgatagatacatcattccacctcctcggcggcgagcttgcgccggcgcgtttccagcgaccggaactcgatgatctcgcggcgcttctcaatgattttgtcccgccagcgctcctcttcgggattgattcgatccaaccccatgcctaagccgtattcgatcatggtcacggcgtcgtggcacaagcgacaaagcgagcgcaagtcatcgcgcttctcgtctcccccggcgcggcgataagtgatgtgttgaacggtggtcgcgggcgacttgcagaagacgcagaggtgatggtcgtggtcgagccgttccagtcgaaccttcttgtattcggtgttgccgtagttggctcgcgggcggggaggcggcggagttcgattctgcgcggggggaccggcgcacacctggccgccctcgcccacccgcaatgtggcgcggatgacgaaccgggggcgatgcgccggcggctcgaacgtcaagggcacatcgtaccagacgagcgcgtcgtccggcgcttcggactgtgcaggcgtcggaatccagtcgagcaggcaatccaatatttccggtttgcgatccttttccagacgcgggcgccagggaacggatgcgagcgcggacagaaggctgtcatgctgcatggggttcgcccacacctcgccgtcacgcggtcgcgctagcagcggcgccgctggcgggcagcattttcttccgaggtaaagcgtccacttggggttttgcatggccgcgtgcagctcgccaataaacgccggatccccctgcaaggccactagaaaagaggcgtcgcaaaggtattcgcgccgcgtgagcatcgcgccgggcttggtctttccctcaccttcggcaatgcgcatttccatcccggcgccaaccgtgtgatagtcccaccagcgcacgccgggctcgtcaatacggacgcccacgcgcagggcgctgagcttcgggagccagtcggcggcggcgggtcgggaaatgccccgcgccgcgcagagcaacccgatcacgccggattttgtcggggcttccgccgtccgccggatgacgaacttcgactcctgatcgccccacgcctgcagggggccttcgaggcgcagaaagagagtgttggcgctcatggtgtcacctcggggttcacgatctccttttgcaccttctccttttgcaccttttcccaatcacacttgatgggttcggcggcgatcacggcggcgatcagttcgtccagcgacttgatgttgttcttcgcaagcgcaagagggatttcctgcggagtctttttcccgttctcctcccttatctgagctaccaaagggtattggagattgggcgagaaccagaaacgctctttcggcttgccgtatccggtatccagatcgtgaatgtactggcccaattgcgcgatgctctgcgagatgatgtcgcgttccccttggaccgccggcttggcgaaggcattggcatagctgatcggggtattcttgatctcgatcagcattccatcgggcggattatgcgcggcgaagctgttctgcttgcccgtcggattggtcatcgccgccccgcgaatgaacgcgccgaccgtgtgcgcggccaatttctcgttgcccttcagattcccgaccagcgtttcccaatggatcgaaaagtacttgtagaaacaggccgaggagaacatcgcttcgtccagatagcccgccccggcatcgtcgccgggaacgtcatcggcggcgacgtagtaatccacttccgggcgagcttcatgcgtcgagatcgcgtgggccacctgaagggcagcttcgacagtggtgtcgtgtcctttccatatctccttggaggccttgtcgggctccaacattctcccggacagtgccatatccggcacagccacacgttcactgatcaatttaccgaaatcaagcgccagctgtttctcagtcttcccaccatcgttttgcagaagcttggccatttcctcaatcgcttcgcggctcgtatagacaagcatcttgctcttctcagaatcgtcggaatcgttcccttctacgtcctgttttttcgccttcttgggcttgaagccacaaacttcgaggattctctccgcacccttctggacgtcggatttgccagtgactttctccgcaatcttagtcgctaactgccgtgtgcgaatgccgccgagcaactgcctaaactcagcacccatccggatgctgcgcttgatgcactggctggaaatgcgcgagcgcaggaccccgccgaagtagcaggtcttgggcgcgcccaagtcgtcccggttcagattggccgggctgtggttttgaatcgcatgaatctcgatcaacatggctatctcctttggctcacttctaggaattcctcggcccaccccaagcgggtcgtttcgcgttcccattgggaaagatgatccgtcagtttcacccagtcgagttgcaggttgtttgaggcgatgaggccgagcgcccattgcagcgcgggctcgatccggccgaccggcaggaccagcatccggtcaaacctctgctgaaaccgttttttcgccgggtccttgtttggctggcagcggtgcagttgacgggcgagcgtgccgccgggcgattgggggattgggcaaaaggcgtagagtttggcgatcagccaggcaacctcgcgccggggcgctcgctcgttcttctgccgcaatggccaccacaggcccgagaacaggtcgaacccgtcaaccgtttcatcgagcccttgtccggcgtgttggcgcagcaggccgagttcgccggttttcagctttgtcaaaacgtcaatgaactgctccgtggctgtcacttgccgcctcctttcttgctcttggacttcttcgccgattctgtttttggccgcatgtccggcgtgacgccggcaatcttccgccgccgttggaccgccaccgtggtgaagccgggggaaagagagtttgcgatcacctccatcattggcctgtattcttgcgccgctcgctcccatgcttcatcaccaccaccgattatctcgcccgccttcgcggaaactctctcttcgacatgggggcgaatggcagcaaccattggtgggatttcaagatgctttcgtgacggttttttctcattagctggacgaaccttgcgcacaaggtttgatccttctttctgccatcgctcgattccggcgatagactcctgaagttgatctgttgaacaggaacaagacaatagtgcttccatcgcctctaggtatttgtcgttttgcaccgttgagaaacctatgatccatacacttcttgccccgcccgatccttggctcggcaaagagcctgccaggaacttcgtccattgccccgcagcggcgtcggatgctccaagggcatcactagcatgtagtgatgtaatctcgcctttgctggtagtggcataggtaacatgcggatctcgccacattcgcccctctgccttcgaactcccctttccgtcgaacacgcaacaccgaatcagccgccccgggcgcccacatgaaatgcaggccgattgagattcctcgggggcgcccaaccacacgctccgggggagccatgtcatcccggtcagcaggggcacctcgccttgttttgggagctccacatccgccttttcccatgccggtattcccatttctttgtcagttctgtgccaggagagccggagagttgacgccagtgatcttccaacctgcagaaggtagattgggggttttgcattgatccctggtgacttgccgctttttgccgtcattccctttcccgccgatgtggcgaacataggcaatcgtattaggcccatcgcgcaacatgccgggcacaatccgtccactccgtcggtcgagtgccggaaatgccatttgttcgtgccactaggcacctcatgaatgaggtaattcgttgtgtgctccggcgttttccgtttgtacgcatcattttgatagaaccgcttcccgtcgcccaataaattgaagcgctctttgttgtcgtcgagtttcttgaaccaatccaagggaaacgagtcggacggaatcgcgtcggcctgatccggcgggtttcccttacaccaatacaagatagcgagcaggaaccgcagaatcgcaacgcggtccatgggattgctcgcggcgatctgccggatattgccggcatcctccagcgccctgcgaattccaacgcgctcccatcgtccatcgtgataaaggacgggaatccatttttcctccagcaggttatagttcattgtcgcctccctctcatcgtcaaattccccgccgctccttctcctgggttctctgccgcggacatcaacgttcaatacggattattcataaccgcttggcatggaagaagcgagagttttttttggaaacgagggcgtttcagtccggagtctggagtccggagtctctaatctcaagcctcaagcctccagtctccagcctccagcctgtagttcccgcctccttttgccttgacaatcccgccccccggctctgagataggttcctggaccctgtggtccgcccaccgcccgccaaggatagtctcatgttccctctggataccccacaaccgccgcgcgaaccgtataaaccgctccggttgaggctgatcgcctgcgagatcttctaccgcgagatctgcctgtgcgcggcgcagtcccgcaacatcattgacctgcacttcctgacccagggcctgcacgacctccgctcggagaaaatggccgagcggttgcagcaggagatcgccgcggtggacccgcaacgctacgccgccgtcctgctcggcttcgcgctctgcaacaacggcatcgtggggctgggacatcccgcgctgcccctcgtgatcccgcgctcgcacgactgcatcgcgcttttcctgggttcgcgggcggcctatgaccggtatttcggcgagaaccccggcacgttctacaagacgtcgggctggatcgagcgcgaccacgaaaacctcgaggaactgccggccgagagcgcgtctcctttcggcgcgctgcgaaccttcgagcaatacgtggagaagtacggcgaggaaaacgcccgctatctcatggagaccctgacgggcctgcacaactacagccgcatgacttatgtggacgttccggggctgtgcccgctgccgtatcaagaggagaccgtgcaagccgcccggaaaaccggcctggccttcgacctccagaagggcgacctgggatggctgcggcggctggtggacggcccctgggacgatagcgatttcctggtggtgccgccgggggcgcgcgtggccgcggcctacgacgggacgatcatgagagcggttccggccgccgggggaacgaacaaggccgagggaaccgacaaggagggatagcaatcggttgtatggtggggggttgcgcctcatgggttccggccgccgggggaagggacaaggagggatagacatggccatgaagctggtgaccgcggaggaaatgcggcggatagacgccgtcacgatccaggagcggaacataaccggtttggaattgatggagcgggccggggaggccgtggccgagacgatcctcgccgaataccagccacgctgcgccgggatcgtcaccggcaagggcaacaacgccggcgacgggctggtcgcggcccgcatcctggcgcaaaaccaggtgcgggtgcgggtgatcatgctgatcgagagccagaacctgagcgacgccgggcgggccaacttcgagaggttgcccgagggggtggaaatcctggaccggcacagcgtccccctcatggcctccgcgttcgaggagtgcgacgtgatcgtggacgcgatcctgggcacgggcgccaccgggccggttcggggcgcgtttggggaagccatcgccgtaatgaacagcctcgaaacccccgtggtggcgattgatatcccctccggactcgatccggatacgggtttggcggagggttcgtgtgttattgccgatcttacagttacgatgggcctcccgaagcgggggctggttcttgggcaggggccggagttctgcggcgaagtcgtggtggcggatattggtttccctgaggatctcctgcaaaatcccgaactcaaactccacgccattgacgagagcgatgtttcagacgccttgccaacgcggccctttgatggacacaaggggactttcggctccctcctggtgatcgcgggccaggacgggatgagcggggccgcttacctgacgactgcctcggcgctgcggtccgggtgtgggatggtctatgccgctttcccctcggaagtatcccacgttctggccggctggctggtggaagcggtgaagatccccatccccggcggaggcggacgctacctgacgcacgactcctgggattcttttgagccgtatctcggtaaggcagacgccatcgcactggggccgggaatcggcacccggccggaaaccgcccggctggtggacgaactggtttgcctggatatccccatggtccttgacgcagatgcactgaattgcctgggaaccaggattgattacctgagcaagagaccggcgcccacggttttgacgcctcatcccggggaaatggggcggcttctggggatttcggcggacgaagttcaggaacgtcgcatcgaaacggcgctgaagctggcccaagacgcgcgggtcgtggtggtcctgaagggttcaaggagcattgttgcggctccggacggcagggcgttcgtcaattccacggggaacaatgggatggccaagggaggatcgggcgacgtcctgaccggcctgatcggggggttgctggcgcaggggtgttcggcgctgagcgcggcttgcgcgggcgtgtttctccacgggcttgcgggggacctggcgcgggaggaatcaggggcgcggggaatgaccgccggggatattctgcggcacatgcccgaggcgctcaagatgcacgaatagggcactgcgagggcgaaatggcggacttcgatccagaacgcacaaaaaacccttgattccttggcgggaaaaacctataagcatttggggtgctgcgaaatcgggatccgtttcacgtgaaacacccaggaaacagtcctctcccatgtttcacgtgaaacacgaccgccgcaagcccccttttcggtatctcccatgactcacgtcatcgctattaccaaccagaaaggcggcgtcggcaagactactacagccgttaatctggcagcctgccttgccgccgcgggacgaaaaacccttctggttgacatggatccccaggcaaacgcgacaagcgccctgaacattgacaagccgtcgctcaaacaaactatctaccagatcctcattgattccgtcgagccgcacgacgttttgatccccacttccgtggaacggcttgatatcctgccctccaccattgacctcgtcggcgcggagatggagttgattgatcttcccgaccgcgctcgtcggttggcgctttccctggaccgaattctccccgaatatgattatgttctgatagactcgcccccttcgctcggcctcctcacgctgaacgtcctgaccttcgcgaagtctgttcttgtccctgtccagagcgagtatttcgccctcgagggtctcagtgctctgactcagaccattgatcgcgtgcggcagtcctacaaccccgctctttccctccttggtctggtcatcacgatgttcgactcccgcacgaacctgtccgtccaggtccaggatgaggtgcggcgggtgtttggcagtcgcgttttcaaaacggtggttcatcgctccgtgaagctgagcgaggccactagtttcggcaagcccattattctgtatgattttcggtctcgcggagccctcaactacatcgagctctgccaggaggttgtgcatgcctgcgaaaaaacgagcgctggggcgcggacttgattcgctgatcggcgaaccccagatcccgcctcattcttccccgattccgccgcaaacgcatgacggcagacgggttgtggacatttcggtcgcggatctccgcccgaacctcaatcagccccgttccgtcttccacgaggaccatatcacggagcttgcggactcgatccgcgagaaggggattctgcagccgctcctggtccggcacacggtcaacggctacgagatggtggcgggcgagcgccggttccgcgcggcgcaattgcttgggcttgagacggtgccgtgtatcctcgtggacgtgtccgacgagggttccctcgagatggcgctcatcgagaacctgcagcgcgaggatctgaacccgatggaagaggccggtgctttcaaatccctgatggagcaatttcacctcagccaggaacaggtcgccgaccgggtcgggaagaaacgccccacgatcgccaacagcctccgcctcctgaaccttcccctggatatccaggacgatatccatgagaaccgcctcacagcgggccacgcccgcgcgatcctttcgttgcccgacgcgcccaagcagcgtcacctccgaaacctcattctcgcgaagggtctctccgtccgcgagtcggaggtgcttgcccgccgcctcggagcgcagaagaagacccggccgccgcgggccgtcacggtcgaggcccaaatgcgcacccttcaggaagcgttttcactgaaaatcggtcttccggtcttcatccgcccggtgaccgacagcgccggcaaggttgagattcagtatcacaatctggacgattttgagataatcacagacttcttcgggatcgagccatcatgaaaccactattctctcagcgaaatcagaatgattccagggcctcgcggcccctgctcaggccaggcacggccattcttctgccggttgcgcttctccttgccgccctgatgctggcatccggttgcgccaccagtttctcgtcgagcggcctcacccagtggctcggggtcgacatcatcaagatgatcgtccaagccgacttcataggcaaggtctgcatggtggggatcctcttcttctctgtgggcacgtgggccgtcatcgtgtataagttcattcatatcaatgcggcagtgcggcagaccaaccgttttgtgaacgaatgcatggcgggtagcgggagcctccaggacgcctaccgcaacacggcggcttacccggacagccctctggcccagattctgcgggagggatacctggagctcgagatagaagactggtacaaattgggttacaagctgagcgacgagcaacggatcgacgtggccaaggctggcatcgagcgcgtgttcgagcggaccatctccaacgagatcgctcatctcgagagccacctgatcttccttgccctcacctcgaacgtctgccctttcatcggactctttgggacggtgtgggggatcatggtcacctttcaggggcttggaagccagggggctgcgtccctgagcaccctggcgccaggcattgctaccgccctgatggttacggtcgggggtctggctgcggccatccccgcgtctgtcatgtacaactactttacatccaaggttcagcttctgatcagccggatggactctttcgccctggagctctccaacgtcatccagaagcagttgctcaaacacgagatctgagagacttgattgtggaacctttacacagaaccatcgtctgagttataatggcacgcgcaggcgtgcggggggattctccaaatgcgtcagagacgccatcgccaacttctggaagtgaacgccacgatcaacgtgacaaacctgttggataccgcgttcattctgctgatcactttcatgctcgtggcgccgcggctctcgcaacacggcctgaaggtggaccttcctcccgtcgagcgcacaggttccacggacgtggatcagtccaagatcctcacggtcgtgatccagaaacccgagaccggcgaaaccaaggaaaaggtgtacctgctggatcgccgcaaggctgagcatcgtctggacctttcggacccgaaaggccgtgaggagttcatttccaccatccggaccgaaaagggcaacgatgacaagttcgccgtcgtgatcgagggagacatgaacagccgctttggcgttggcgtccaggtaatcagcgccatacaacaggccggcgttacgaatatcggcattgcaaccaaaccggagagttctgaaacgccttcctccccggccagatgatcccgcgcggaggcaaccgccatgtcccatttctccaagcactacccgttccccttcgcgatcacgctcttctgctcggcgggcggccacgtcttccttgtggtcgctctgcttgttctggggcttattcccgtccggccgcacacccggtacacgtggctggaccccgggactatcattatccgacctgtaggaccgcccatcaaagggacgtcggagaaacccctcggagtggagcgcgccattcccgtcgaaaacgcccagcttcccaagcccaagccgacaccgccacctgcgcccgcgcccgcgcccaagcctgaaacgcctaagaacaggatcgttctccctcccaaggaagcgccgaaatccgcgcgtaagatgcccgaggaggtcaagagaatcatctctacggcgcccaagatcaacaagccgatcgcgaagaaggaccccccgcttccagccattccctcccctctggacaggagttcggggaaggacacgagggtcgcggacgcgggaccaagccggccccttcccccctggccttccgtgggggattatggcggcgccggcccggctccgctccgcaagggcgatccgaacggctctttggacggccccacaggcgcgctgacaaccgagggcaacgtttttctgccctatggctacggttcggacgcacagggccggatccaggccaatttcagctatcccagcagtctgaagggcagagccaatactatctgtgtcctgcggttccgcatccagcgtaacggcacgattgacaccattgaggtgctccagagcacgggtcagtcccgcctggatgactttgccaagcaggcgctcatccagacccaggctcttcttcccttgcccggcacaatcaaggatcagttcattaccgtcacggttcccttctcctttggtgaggagggccggtgagacgatagatagttccgcggatcacccggatcataggagagaccaagcttttcgccgcggaaagtatggacaacacggagaaagcaggatctcctcgtattttgcggggtccgcctcttcggtggttttttcgcgttttcagttctctgagctttcttctttctggactatgcgcgggattttgtggatatcttgaaactgccgcaggacaggaaggcgctggactcgatgcggcacaaggagtaaacatgaggaattacatcgcagcaataatcgttctcacggccgccgcagtgccaacacgtccggtccttgcccagcaaacagaccaaagcaacacctcggagaaggcgggcgaaagtcccgcggggggcgtcaagccaatgaaagattatgggttgaaagactatgtccgtgtgtccaaagatctgccccactcggagagtaagccatggaaactggtttgcacgatgccctataactgccattttcaaccctggatcgaagtcgaggccccggcggacaaggtgatcagcctcaactccagcaatccactcgtcctctacctgaccccaacggaaacatacacgacaaaatccggcctccaggactacgaggccaagaattgggtgagcggggaaggcgccatttataccatccccgcgggcgtaaccgtgaaagccgtaaagtatcgtgagacgggatacgatacgacgtttgccggttcgtttgagtgcaacgataacgactataacattctctggaaaaaggcggccaggaccgcgtatatctgcatgagagaatggttttatgattgccccgaccgtgagagggtcgggttttggggcgatggaacccctgagttgaaccagtgcttttacgtgtttgactctgcatcccatcggttgtgcaaggatctggtgttgaggaaactcgaacctggtttttatccgggtcaacatctggagttcctcggcgagtatggcctatggttctattatctacagaccggcgatctggaatccatccgttccgtgtatgaccagacgaaaacctttcttctggagacctacaaatttggaaaccggcggacatggttcgattggggaaaagaagtgaaagataccgccgtcatcgagacgtgtttctggtatattgacttgaaaacactgaagaagatggcgcaggtgaccggacatgacgcggatattgcggccattgacgcaaagctcgacggcataagaagcacctttgacagcaagtactggaaggggagttattacatgtcttcgcaagtcaccactccggacgacagggcaaacgcgatggcggtcaatgccggccttgcggacagctcgaagtgggacgcgatctatgacaatgtcctgacaacaaagacctatgcgagttgtttctttgaccgatgggtcttggaagccctttgcgccatgggaaaacaggagtatgccctgctcagaatgtataatcgttacaagaccatgataccatgcagttttacaacactttgggaacattatgaccggtggtgggcatcacacatagatgcctttgatgccggatcatcgcttaatcatgggtggaatcctccggtccttattctttctcaaaccatagcaggggtttccccggaggcgccgggctggagcacgtatcatgtgttgccaaaggaagcatttctgaccgccattaaagtggttgttccctccattaagggcgatatcacagtggatatgaaaaaaaccacatctgaatactccttgggcctgatttcgccctcaaacaccaaggccatagtgggtatacccaaaggctcattctcaaagctggattccatcaaggtaaatggcgccaccatctggaacgggacctatcgcggcggagtaaccggtattgcatggaacggggaggacgccggttacgtcaaattcagcgcggagcctggcacatggaaatttgccgggctgggtgtattgccgatcacttcacccaaaccgttgccgccgcctccgccggatgattcgccgctcgacaagaagtcatggaccgcttcggcgtcggtggtggacggcgtgtttgttttcaaccgtgttccgttcgatgtgtccgccgcaaatgcgattgatggcgaccattggacgggatggcgcgatatgacgaaaacccaatatgccggacaatggttccaggttgatatgaagcaagagcagacgttctacagaatagtgctcgataatacctgggccttatgggattcaccggacaagtattccgtatcggtatcaaaagatggcacgaactgggggaacccgatcgcaaccggttccggacaattgggaattaccaccattacctttccggcgcagaccgcgcgctacataaggataacgcagaccggaacgaatgccacgtaccattggtcaatctatgagttggacgtttaccggaagaatccggggaaatgacgccgattcttcttgcctttttccgcctgcctttctatagacccgaatggacagtgttgctcggaagaagggtcgctccttggccgaacaggatccacgcgcgagaaaattccccgaccgcaagctcggcgccagctggtatgactgggacggcgacgtcgagcgccatgaagccagcctcaacgaaggccctcgcctctacttccttctgctgctggccgaactcgtcgtggtcaccctcattctcgttgtggacgcgtggtttctcacccaagttgttttccgctccgtctccattgccgcttcccgcgccgtccccgttgcaaccgtcatcgttatcgtggtgatcggcgctcccctggccagctggtggcatgcgtggttcttctgcgtcctggccgtggcggcgcgcagccgctacctcgctttcccctggttttcgaggtggctcacgctccaggttcccttcctggcctggtgcgcgaggccgttcggtctgagccgcgaccggatcggctcgtcctgcgtcgccatcaccaacacgctggcccggctgcagctgcgcgctatttccgccgtgcggcccctcgtgcttctgccgcgctgcctcacgccggagacgattcgctccatcaaggaaatcgccgcggggtgggattgcccggtcgtcgtggtcggggccaacaagcaggcgcgggacaaggtgcgcgagttccgcccgaccgccatcgtggcggtggcttgcgaacgcgacctggtgagcgggctgtatgacttcgggcacaagttgccgatcctggtgttggccaacgaccggccgttcgggccgtgcctgaaggcgtccgtcaacctggaacgtttgcgggaggcgttgcgggatatctatgagagaagaaaggactgagtgctgaggactgagtgctgaggattggggattgcggattggagatttcggtttggggattacgatctcatagcccaggactcagcgcagcactcagcactcagtccttagtcctcagcactgctactaaggccggatcctatgcttgcccgcgcgtttgcagacatctgccgggacatttacgacgcgatgctgccgccgatctgctcggtgtgcggcgacccggtgcgcgagcgccacgaagcgatctgcgactcctgccgcggggctttccgggcggtggggcgggcggtgtgtccgctgtgcggggcggcggtggtgcggagcgtgaagcggcgctgtccgcgctgtccccgggagccggtatattttgtgtccgcccgcgccgcctacctatatcagggcgccctgcgcgacgccattcatgctttcaagtacaagcggcggatggagctgcggcggcccctggcgcgggccatgttcatgaacctggccgagttccgcctcgcctcggagaagcccgaagtgctggttgccgtgccgatgcatttcctgcggcggacgtggcggggctacaaccacgccgaggaactcgcgcgggatctggcggagctgtcgggcctgccggcggagccgggcctgctggtccgctcgcgccatactccgcggcaggcccttctgcctccggagcggcgcgcccggagcgtcttcggggcgtttgaggcgccttatccggacgtggtgcgggggctgcgagtggctttggtggacgacgtgttcacgagcgggagcacggtgaatgagtgcgcgcgggtgctggcgggggcaggggccgcgtcggtggaggtgttggcgctttcgcgggcatgaggttttgcttgagttccgggcgcgggcgcgctgtaatggaggccggccgctgcgccagggcgcgttcttatgccaggcggacggagggaagccatggtgagacatacttccaaagaagagaggacgtgggggatgctgtgtcatctcgcggcattggcggggttcctcccgatgatgcccttcctggccgtggccggccccttggtggtctggctggtcaagaaagatgaatacccgtttgtgaacacgcaggggaaggcggccatcaatttccagatatccatgctcatttacggggcttttgcgattttgctggcgctggcgtgcgggtcgctcggaatcgggatagtccttttcctggccgtggtgatctccgacctgatcttgacgataatcgccgcgatcaaggccaacgaaggcgagtcctttcagtaccccgtgtcgttcacgttcattcgctgagtcggggtgtcgctcgctgcgcgttgttgcccgtggaccctttcgtaaaccgcgagggtttttcgggcggtttcgcgccaggagaagccccgggcgcgttccagacctttgcggcgcgtttccacctgaagctccagggaacccgcgacctgtttaagcgcgcgggcgatctgctccggatcatcgggcggcacgtagatcgcggcgtcgcccgca

SEQ ID NO: 569 - DNA, 17354 bp, Artificial Sequence
  Synthetic Oligonucleotide
aggcgatcatctgggacaagcagcatcccgtcctgacgcgcaaggactacatgggcgcgcatgagtggtgcttctactgctggaaggaaggggccgcccacgtctttctcgggccgaacaacgccaccgacctgtggcgcgtcaagaaggtcaacccgcagaacatggtgcacttgacggagaagccggtggaactggccgtgcgggccatccagtactccagccgccccggcgagaacgtgctcgacccgttcgggggctcaggctcgaccctgatcgcggccgagcagaccggccggcgggcttttttgacggagctggaccccctgtattgtgatgtgatcgttcagcggtgggagaacttcgcggggcggaaggcggatcgcattgcgtcgaatgtgccggtatcatcttccgatctgtcagacaggagttgagaagcatggatacggtgaacggtgccacccagctgcgtcgggtaatccggttgattcgattgctgtcgggtccaccgcggactttgtatcagctggcagagcggcttggagtctccgatcgcaccattcaacgtgacatcaagctcctgcagtcggtcggctatcgaatcgagagcatcgaacgaccgcgcaaggcgcccgtccgccgtattacgcggcggccgcggtggagtatctgacggggcctagtccatcgattttgcagacggattcgactctcaggccggagcaacgccccggacacgtccgaggcgttggtcgagggcgtgggatgatgtcacccagtcgcggcttgttccgcgtcgcaggtgtcgcacgtggtgaacggctcgccgggctcgtccggcgggcagcgtgtgggcccgccgcagaatgtacatggcgggtgtgtcgctccgcaggtcgggcaggtgaagtcgggccgttccccttcggccagtacccagtactccgtcatggcgtccaggtggacgccggctgtcgcggcatggtttcggcggtaacgggtctcgacgatcccccgttctttcatgaaggccagggcgaccgcgacctgcgtccacggcaggttctcgtgctcggcgattgtctccagggtgaagccgtcctcgccgagctcttcggccgcgtgggcgatctgctcgaacgagaccagcgggcaccggtgctcgtacggccggccgcgtcgcggcacgaccttgcgagccaggttcccatcgaatacctcgaaggtctccctgcgttttcgtttggcgatcatggttcaagcctccgtcccggcgtactcgaacttgccacgctcgaccttacggaaccgtgccgcgtcgcccttcgtgccgatctcgcggatgatcgcggcgtagagcgtggcctcaggcgtcttgccgttcgggctctgccacaggtcttgctcgaccatcgcggcgatcatctcgcctgaccgcatggcctgccctgatgccttcagcacttgtgccgcggcgttcaggacgccgagccgtttcggcttgggttcgctggccttccgggcccgggtcttcttcgccggcgtcgggatggcgatcccttcggccaggttgcccgcctggacggcctcgacggtcgcggcgatctccgcggtttcgtcctggcgacactgctgatcccagcaggcctggcagagcgggtcgcccagatgggtcaacgcggacggttggccgcaccgcgagcagtggtcacggtccggcggcggtgcgtcggccggcgcctctgcgatctcgcggcggagtcgctgggcgcccttgatgcggaccttcttgcccgtggccaggttcgtcgcgttccagccgccgtgcgggttcaccccgtcgatccggacttcggtgatccggtcgctgaccttcgcggcgtagatgccgccgattctcacttcgttcttcttcatcggtcttctccttatgtgctagccctgttccgcagctgcccgtttcttccgcaaaacgcgctcaacgcgcggcagcacggtcttcaagaggttgccctgccacagatcgtcccgtaccaggcctacgcccggaatctcgaccggcgtgtccatgcgaacccggtagtagatcggctcgtttcgcccgagcttctcggtcccgatgatcgtgcccgttcgcccgacgaactcaggcatcccgccgaggatcttgactcgttttccgactctgctgttcatcgtttcctcctgccctttgggctcgtggcgtgtggcgttctggtcggttcagtcgttcaccgggattgtcacgatccggtgcgtcccatcgggcatctcttggtcgcccaggtatgcgaatcccgcacccgcggcggccagccgaacggcctcggcatcctcgacgacgtagttccggccgttcagccggaccgccttgccccggccggcggcgtccgagtactggatcgcctcgccggcggaatcgaactcgatggcttgtatggtgatggtcttcacggttcggtctcctgatcgatgtggcgcgggcccccgcgtgggagcccgcgcccgggtggtcacagggcgtcgatgtacgtctggaggtctttgccttcggtttcggcggcctgcatgcccagcacgaaggcccgctgaatcacccgtttcagggcggcgacgtgcacgtcgtggaaatccaggcagtcgcggttgcgggtttcgagggtctcgatccccagttccgcggccaggcggccggccaggtcgtccaatcgggttttcgcgttgttcgtcttcgtcgtcatctgcgttctccttcgcgtttggaattcgctgtccacacccatgtcattgccatgagaacgcaccggaatccaggcgattcgcaggattattcgatgtttcttttttcagtgtcaccggatggcaccttctggctcacgggagccgaatggccgcccggcgggcccccatcggcccgccggggttcgcgttcgggctactcgcccagggtctcttcgatccgctcccgttcgatcccggagatgaactcgagggtgtcgatcaggttgctgcggacctggcccatcgagcccgcgtggccccagttcagcgggtcggccttggcctgctcgtcgctcttgtcgagctccatctgcagccaatcgatcaggcgggcgatgtccgcccggtgggcctggtaggtctccagggccttcggcgttgccttcttttcgttcttcgcgttcatcttcgttctccttcgtgtttgggattcgcaatcgtcatcactgtcattgccatgcaaatggcgatcagggaaggcgaatcgcagaataatctgcagaatctgcgatcgttgcggattcggtgtcactgcatgacatcctatggctcacacgagccgatcggcgttgatttcacaggagcggaggtgtttgccggtccgattcgccgcgctagaatgcaatgacgccggatggctcacgggagccaggcggccgcgggcgatccgggtggtccacgtggtcgcctggaccgccgtgcgtcgcacaggcgcaaacgacgggccgcccgtggcggccctggcgttggtcctggagggatcaggcggcggtatggtcgtacttgcgggccatttcgaggagcttggccttgatggccttccagtcgggcgtctggccgtccatcgccatctgcccgaagaccttgtcccgcagggcgcccttgtaccacccccgggtccaacccaatcggtagaacaggcggttcagttcggtctcgcccgtcccggcccccgggcggtcccagcaactgcgggcgccttcgcgcttcgtgtaatcccaatccgggcagcgcttggtgttcagggcgagctcgaccaggcccaggcacatcatcaggtacccggccaccttggtcttgttcagcgttcccgcgaaggcccggaactcgatccggttccgcccgcgggccaggtgcgtcaggttcagcaggtggtagcggtcggcctcgcagcgagtcttggcgcggtccttatcgccgtacggcttgatctgcttggtgtaggtggtctgctcccggtggcgggtgcccgtgctggcgaagatcgccttctcgtggttgcccaccaggctgatcaggcgggccagggccgatgcgtcgccgttccattcgacggtgacgtgcagcccgcaggtcggattgacccgggccccgcgggcggcgatccggtcgatggccgtctcgagctccagcagcccggtccacccgcgaagctttgggctgacgaactcgcagcctttgcggttggcggtggtgggccggatgctgccgtcgcgctccgcccgccagccctcgggcagccaggggacctggtagcccgcgtggtacggcccgatgggtgtgtcgtcgcggttgggcagggtcgtttcgaattcgatcccgaaggcgatctcgttggcgttcatcgtgttttcctcctcgtgtttcccgccgcccatcgcgtcgggtcaggtgtgtcagtacgctgcgttttggcatgaatccaatgaaagcagcggattcttcgatgtttttttcgatccggctgcactgaatgtcacagcctgacactgagtggctcccgggagccgaaaggatgcgagaatgcccgaaggagaagcagcagcggcgcgaagcccgacggccatgcccgttgcggacctggtccgactgttgacggccgccggcggccgtgcgattacgaccgtgatgattgaagcggacgtggaatccggcgcaccgacgaacgcggacggcacgatgaacctggtgcactacgcggcgtggttggcgaaggagagcccgaattgaacgaagtcggggaccggctcagcgtcacctgaaaccgatcccctgaccaccccactgaatgaccagtgtgatggctacccgtactgatcggcgtgcgacccgcacgtctgaagttagcgcatgcctggccggggcggcggatccctgggatcccgaccgcctggccgtacgacttgccgaggagctggggttggccatcgacccgcgcaagctgaaacccatcgaactggtccgactactcaattcgacccccctgggcgaagtgacgtcggcacggtccctctatcagcaccgggcccgggccggcatgcggatcggcgacgacaagaccgtcgacctgttgcggtacaccgcttggctcgcgtgggagcggcaccatcgcgatgcctacgacgctcaccgtgagcgggcccggcaacgccaggcggagcagtcgcggtccggccgggacgtcggcgagctgccggcggtggtgaatcccgagcgccgggcgcggtgcgaacgcaaccttcgcgcgttctacgaggagtacttcccgcagacgttctacctgccctggtcaccggaccacctgaaggtcatcgcgaagctggaggcggcgattctcgagggcggcctgttcgccctggccatgccccgcggcggcgggaagacctcgatgatcgaggcggcgtgcctgtgggcgttgggctacggccatcggcggttcgtgcccatcatcgggccggacgaggggcatgcggtcgatcgcattcgcaacctgcggacggagctcgagacgaacgaccgcctggcggaggattttccggagatctgctacccgatccggtgccttgaagggatcaaccagcgtcggttgctgtaccagggccgaccgatcgtcatggacttcacggccaagcgcatcgtgctgccggacatcccggacagccgggccgcgggggcggtggtcaccacggccgggatcaccggccaggtccgcgggctgaactacaaacgccgcgatggcgtgacggtgcggccggacttcgtgatcctggacgatccacagaccgatgagtcggcccacagccccagtcagtgcgactaccgcgagcgtgtcatcaacggcgccatcctcggcctggccgggcccggcgtgcggatctcggccatcatgccgtgcaccgtcatccggccggacgacctggcggaccggatcctcgaccgcgagcgcaacccgcactggcagggtgaacggacgaaactggtctactcgttcccgaccaacgaggcgctgtggaagaagtacgaggaactccgccgcgaggatctggcgcgggacgaccgaaagctgaccaccgcgacggccctgtatgccgccaatcgcgaggcgatggacgcgggggcggtggtcgcctggcccgagcggcacaacgcggacgagctctcggccgtccagcacgtgatgaacctgcggtacgagcgcggcgaggtcgccttctgggcggagtatcagaacgagcccctgccggagaatccactctccgaggacctgctgacggccgacgagatcgcggcgaaggtgaacgggcaccgaaagggcgaggtgcccctgactgtgacgcacctgaccatgttcatcgacgtgcaggccaaggtgctgttctggctggtcgtggcgtgggaggacgatttcaccgggtacgtcatcgactacggcaccgagccggaccagaaggcggcgtacttcaccctgcgtgacgtccggcacaccctggccgtcgcggcgccccgggcggggctcgaggggtcgatccgggcgggcctggtccggctgtgcgggcggatgctgggccgggagtggaagcgggaggacgggtcggcggcccggatcgagcggtgcctgatcgacgcaaactggggccagtcgacggacgtggtgtacgagttctgccggcagagcgaccacgcgagcgtcctgacccccagccacgggaaatacgtaggcgcgtcaagcattccattcgccgagtacaagcgcaaacggggtgaccgggtcgggctgaactggcggatcccgcacacgagcggccggcgggcgatccgccacgtcgtgtacgacacgaactactggaagtcctttatccaggcgaggttccggacggcccagggcgatccgggttgcctgacgctgtttggccgccagccggagcaccaccggctgctgggcgagcatttgacctcggagtacccggtccggaccgaggggcgcggccggacggtcgacgagtggaagctccgtgccagcgggctggagaaccactggctggactgcctggtcgggtctgcggtcgcggcctcgatgcagggggcggtgctcttcggaacccaagatatgggccgcccgcggccggcgggccggcgaaagctctcggagttgcagcgaggacggcgatgaggaaggaccaggtcaaaccgcccaagccggaggagccgtcgggcctcgtctgctcgaagtgcgggtgtaagcacttctacgtagtctacacccgggcccgctggggtggccggatcgttcgccgccgggaatgccggtactgcgggcggcgggtgaccacgacggagcgggtgacgggatgataggaaggcattctgccgtttcgcgcaactttctgtagattcagctgttagcagagccagcaacctcgcagctttggctgagttgctgcgttttgccggcggtgcgacacaccttgtcggtcccccgggttacaggtaggttgggaagaacaatctctctgtcgcttcgcagtccccggggctgtgcggtattgtagatgccgtaaacacctattctcagaagggacacgcttatgcaattcaaccttctggacgaggcgtggattccggttctgcgaaccaacggcacttgtgaccgtgtcggcatccgcgaggcgctgacagaggccgggagtatccggcagatcgcggcgtccaacccgatggatcgagtggcgatcgtgcggctgctccttgcggccctgtattggtgcaagggatacccgtctccgcaggaggaggaagatcgcctcagtggggacgggcgcttcccgcctgattggttcaaaaaactcgatgactgccggaagtacttcaatctgcttggagatggcccccgtttctttcagaatgagggcctcaagaaccggccaccgaagcacaccacacattacctgatgcacgaagtgccgagcggtacgaatgcgtggcacttccatcacactaccgaccaatcgggtggcttgtgcgcagcttgttgtgccacgggtttggcccggctgccggtcttcgcgacctcgggtggcaagggaaagtcgccagggatcaactcaaagccacccctctacgtcataccggtcggcacgacgcttgcgacgactctgcgattgtcctggagatatggggatgcgtcactgggcatgccagaatgggaaacaccaggatacgaactcccccgacggggtaatgtgcccctgctgccaggaatgacctggcttcctcgcaatgtatggttgggaaaccgggaaaagaacgaaacggcctgtgtctcctgtgggcgggccgagcgcgtccttcggcgatgtgtgttcgacggcaaaggcggctccaggggtgaagaccggaggtggcgtgatccacacgtggtccccgtgccgctgggaagaaacgcgaccggaccacttcagacaagcgacgctctgaaatcgaaggatgccgcggcggggcagtgggtgagggctctggcagccattctcggacaaaggacggttgaccaaggagcgggcatctgggcagtcggcttctccacagtcaagaacgacaagtacctcgaggcaactgaactcctggtcgcgccggaacggtggccgtcgccagcggaagactggatcgcgttggcggagcagtggcaacaagaaggaagagcggtcatgcgacgggcgcgttcgccaagtgcttcctccactcgacacgaagtcgaactggacatcgttctcggtgctgttcgggcacatgtcgagtcacggcttgccagccgcatcgacgggctgctgtcagacgctgaaggtgagtgggtgaaggcaacgagagagtaccagaagatgatggcggcagtggcgatgtcgcttgcgccagggtttacgacgcgcgcgatccgccgacgcaatcagattgcccgatccggtccggacatggcgcccacatcgcggtgcaggaagggagaagcaccaccacggaaaggcggcgaacgatgacgccaacagagaagtttgtccgaacgctggaatcgcttgagcctggcagccttgggcgattgcgcagcctgggtgggcgcagcctggatgagtcagtggagggtttcgaccttttcacggggatttggtggccactgagggaacagaaccagagagcccctcgccgtgaggtggcgtggctggttgccaaagtgtatgcgtaccgcccgatgcgacaatgcaaaggagcaaggcttgccatgcagctggggaatgtgaaaggcgagagcgagccagtgatgcagcgacgacaagccaagttcgacgaactcctcctgctccctctgaccctgatcgagccagcgctgtgttgggcgctggatctgattgcgaaagacagcggtgagttggactgggtgcgcctcaccgatgagttgtccgcatgggagcgtgaagaaacgcggctcaactgggcgacgcaatacctgcacttcgggcagtgacatgctcaaaaggagaatactatgctgatcgaaatccatgggattcagaaccacagcccggccaatctcaaccgtgatgatctgggtgctccaaagacatgcttcttcggcggggtgatgcgctcacgtatctccagccagtgcatcaagaggagcatccggaccagcgagcagttcaagctgctgtgtggtgggatccgcacgcgaagactgccgcaatacctggcgtcccagatcgcagaaaaagacatgctttcgctggccactgcggtggttcaggcgtgcgggcttgcgaaggacgacgcggcaaagaacgggaagaaggatgtcatcgttttcctgtcaaagagcgcgactgcgcacatggtggatatgcttcgtgcggaagaggcggaagtgacagagaagcgagtcgccaaactctcgcgagaattcgcccgcctcgttgcacaggatcgctatgcgccggacatggcattgtcaggacgcatgctggaaccagccaagccccccaagagcaaaaagggtcgcaacgcggacacggacgaacaggaggacgagaaggccgacagcagcgccaaggacaagggggtctggaagggccttgatctagacatcgaggctgcgttgcaggtggcccatgggatatcaacccacgaagctcgtccggaagtggactacttcgtagctgcagatgacataccaggtgaggatgcgggtggtgcgcacattggcgaagccatgttcgcgtcggcctgcttctataaatacttctcgatacactgggaaacattggtggacaacttgaacgggaacagggagctggccgcccacaccgtcggggccttcattcgtggagccgcgctggcgaacccgaccgggaagcagaacagcttcgctgcccacaaccctccggacggcatcctcgtagaggtaaagcaaactcgctccacgccaatcagctacgcgaacgcattcgctgcaccggtgccgagcaagggaacgcgcgatattgtgtcgcaaagcatcgcacagctcggtcagtacgtgcatgacctggacaccgggtacggcaaggagcgcgaggacaagcggttctggttctcccccaatctccggtatccgctcacctatcagcacgagaagcaggagaccccctgtgctgacgaaaacgtaggatccctcgatggcctagtggctcttgtcgtgaaggaaatcgggtttgactggtcgcgcgttcagtccgtgacggtcgagtgaggagatgcgccgatgaatgcgaatacgctcctgctccgcctcgaaggtcctcttcaatcgtggggagaccagcaatcgagattcgtcgtccgaaggacttccgaagctccgaccaaatcggggatcgccgggctgctctgcgctgcaatgggcgtgtcgcgctccgatgctcggcaacggctcatcaagttgaacgctttgatgatgggcgtccgcatcgatcgtccaggcgtgcgctggtgggactaccacacggtgggggcgggaatgcagatgcaaagcgcggagggaatcggaaagaccaaacccggcccgattctgacgcgtagggaatacctctgcgacgcgagcttcgtggttgctttgcgtggcgattcctcactgatcgtttcgttgcacaaagctgttcagcatccggtgtggccggtgtatctcggccggaagtcgtgcgcggcatcgcttccactggtgggctgccatgacgatccggatgtgggcgggtttcctgacctggaatctgcgcttcgatctgttccctggcggagccgccacgcgggagaggccgtgcccgatgtagtcgaatgcgtgatcgaatggcggggtgccgcagcgggtgaggttgctccactagacggggaagtctggtacgatgtcgcagactcgtttgatgtgccagcacactccccaagaatggttgttcgcaagaagatgggcgtcggctccggcacggacatccgagtcggtgcggcacgccagagtcgccttccggcgccgctgcgcccccgcgccgattacgcgaatgctgagtatcgccggaagcgtcagagccgcctggacgcagatgggggcctgtgtgttttctgcaagtctccggcgacgacggttcagcatgtgacgtatcgccgcgccggcggcgatgaggagcaagatgatttacgctcgctctgccggttgtgtcacgacgcggtgacgatgatcgagtacgggatgggcatggggctcgaccggatcaaccccgaagacagacaatggcgcgaccagattatcgccaagcgtgaggagatcattcggtttcgttcgctggagactcgacgtcgacggcttagcgccgaggaggtcgaatgatcatgtatcactcctatctgctcattgatactggtgacaatccggaccgcccgaggcccgggcgtctctggttacgaaatgtctatcgagtacaccagcggctttgcatggctttcccgaatgatgccagaaagcgagaggatccagagtttctcaaaccgtacgatccgaacggctttgtccacgttcacggcagccgcacaaccgaccaggcgtttctcttccggattgacgcgcatgcggggggcagcgtggtcatcgtgacacagtctgccgtaaaaccggattgggcgtatgccttccagaacgcgatgtatcttctgcatgccccgccgtcggagccgcgtgaggcacaactcacgtttccagccggcacgctgttgggattccggctgctggccaacccgacgcgccggttgcgagagagttctcgtgacgccaagggagaacctatcgaaggacgatgggcgggaaaacgggttcccgtgccgacaggcaagctggatgattggctgacacggcgatcggagcgttgtggttttgccgtcgagactttgtgggaagctcggccgggatttgtttacttcagcaagtcggcgagccggggcgagggacagtgccttagatccgttcgatatgaggggaagcttcgcgtcagcaactctgcagcatttcgcgagacgcttatccggggcatcgggccgggcaaggcgttcgggttcgggttgctgtcggtcgcgccggtgcgcgaggggggctgaatggggcatgcgtgaagggtgcggctctttggcaagtgaatagtgtggtggccaatggggaggacaggccatggacgatctgcatcggttgcccaggtttggggacagcctggggtatctgtacgtcgagaacgcccggatcgatcagcacgagatgtcggtggccgtgcatgaccaggagggcttcaccccggtcccggccgcggccctggccgttctcatgctggggccggggacgcggatcacccacgccgcggtcaaggcgctggcggacaacaactgcctgattgcctgggtcggccaggagggcgtccgcatgtatgcccacagcacgggcggaacgcggagcgcacgccttttgctgcgtcaggcggcgttggcgctggacccggaccagcgactggccgtcgtgcgccggatgtacgaaaagcggttcggcgctcgtctcgagccggggctcacgctccagcagattcgcggcaaggaaggcgtgcgcgtccgtgaggcgtacgccaaggcgagcctggcgacaaacgtgccctggcagggccgcttctaccagcgcggcaactggtccgcggccgacccggtgaaccgggcgctgtccgcgggaaatgcgtgtctctacgggctgacgcatgcggcgattctctcggcggggtactcggcgggcatcgggttcattcacacgggcaagcaactctcgttcgtgtatgacgttgcggatttctacaaggtggagttgatcgttccggcggcctttgaggtggcctcgaccgttctgacggacgtggagcggaacatgcgaatcgcctgccgcgaccggttcgcacattcccggttgctgggccgcatgatcgaggacattcaggacgtgctcaacgtggaaggtcggcccgttcggattgatgagaactttgatgaggacggggcggcgcccggggcgctgtgggacccggatgggggaggcgaggaaggggacgggctggcgggaggccggaactatggtgatcctgattcttgagcgtgtgagcccgggcctgcggggagagctgacgcggtggatgatccagcccaggacgggggtgtttgtgggccggttctcggcgttggttcgcgacaagctgtgggatcgagtgcagaagtcgatcaaggccggggcagggatcatggtgtacagcacgaacacgccgcagggctatgccgtgcggacctgcgggcggccggatcgagacctcgtggacttcgagggtctgattctggcaaaaacgcggaaaagggagtagattttcagcgtattccccacgcacgtgggggtgaaccgcaagtgccctccgtacatgcgcagtgctacgtagtattccccacgcacgtgggggtgaaccgtttcggcggatcgtcgggccgggaccgtgcccagtattccccacgcacgtgggggtgaaccggattagcctctcacgatgatttggtcgcccacgtattccccacgcacgtgggggtgaaccgatcgccgccgccaggcgcggtcagacgtatcgggtattccccacgcacgtgggggtgaaccagctgagtctatggctggcgtctcatacgtgacgtattccccacgcacgtgggggtgaaccgccatcgcaccgaacctcacgcttcgaggcatggtattccccacgcacgtgggggtgaaccggtgtggccggtggccagcgccacgtcgcccgggtattccccacgcacgtgggggtgaaccgcaactgcttgaacagatcaaagggctgggcacgtattccccacgcacgtgggggtgaaccgccggcggacacgaccgagacgcggaacctgtacgtattccccacgcacgtgggggtgaaccgatggactgaatggaccggatggacggaatggacgtattccccacgcacgtgggggtgaaccgaagatggtgaataagcgcatcaagtcgcgcatcgtattccccacgcacgtgggggtgaaccgcggagcagcacggtctgacgtttgtgcaattcgtattccccacgcacgtgggggtgaaccgcacacctaaggatttgctagacatcacacactcgtattccccacgcacgtgggggtgaaccgcaaaaatcggacacgcctacgggtaggcgaacgtattccccacgcacgtgggggtgaaccggagtttatcatctcaggctttgagagccggctcgcacgtcggcggaaaggtgcgaacacatgattgacgaaccctccgatgcgcagatgcggtttcttgcaagcctgaagtacgacggggagctgccgcgcacaaagactgaggccagtttcctcatcgatggtcgaaaggccggtaaggactcggccaaactcgaaaaggaactggagcgacttcggcagaagacccagcgggaatggttcaaacgcgagcgtgattactgccgaatggaggttcgacaggcacgcgactcggaaggaatgatcgcgggctttcgaatccgtgttggaaggcgctgtgatgccgcgaagcagtatcatggtgcattcgtaccgattcaggttgcgatgaaacatccccaggtgctgcctccctacgagaggatctgtcaacactgggcgtgtgaatgcgaaatcgaggaagtgctggaatctgatcgccttgcaaccgacactccgatggtcatcaagccaggtcgaataacgacggttcgaaagtggcgtcggaaccgtcatccgtttttgacgttgctcgttctcgccgtgcttgcctattgcgtttaccaactgttgaagacgtgagctgaccgagaagcttaagtcactgcgttcatgcgcttcttgcatgtctaccggtgtaacaatctcgccgagaatccctgaacccgcttgaggcgcacccgcgcgaaggataagcagccgatagacaaccccaccgggccatcccggaggcgagcgggcggcggctgatcaccgtcaaaccgtcgagccagcaagtgatacgccgtgcagggctgcacacctgcacggcgttttttgttgcgccttcgccttccggatggctcggtgcggagagcatcgaagcccgaaacaccgttgaaatcggaggaacccatgtcgttcggacccgtaaccatcgccacgctcgacacggtggacatgcaggcgcccggggcgccggggctgtccgcccagcagatcctcaaccagctgggcgagttcgttctcacgccgccgaccacggacgccgacggctcgccgctgaccggtctgacctttgcccaggcggtggtcattcaggcggacgcggacgtggcggagttgttccgcaacgacttcgagggcgctatgcagttcaacggggccaaggtgttcgagatcgagttggccgagggcatgccggtgacccagccgttcgcgatcggcgagccgggcaagccgtactcggtcctggcccgggtggcggaccaccttcgtggggagtagcccggcgagcgtggtcacgctccacacgcggcggcggccggcgtggatgtggtggctgatcgggtgggcccgccggctgcacggactgaccggacgactggtcgcgtacctggaacggtgaagcgatggcagaggacctgaaagagacgattcgcgagactgcccagggccccaagcgggtgaccggcgactccggctccgtcgagcagcaggatctcggccagctcatcgaggcggaccggtatctcgcgtcgaaggacgcaggcaagaagggcctgaaggcaatccgtcgcacgaaggtcatccccccaggagcgagttgacgtgcggaagtggtggagacaacgcggacgcaaggcgacccccaagcacggctccgtgctcggccgggtcgtacggttcgtccgcggctggtacgacgcggcccggaccaccgacgagaaccgccggcactgggccgccgccgacaatctctccgcccgggcggccaacagcctggaggtccgccggaccctgcgggcccgggcccgatacgaggtcgccaacaacagctatgccaaggggatcgtgaagaccctggccaacttcgcggtagggaccggcccgcggctccagctgctgaccgacgacgagagggccaaccggctgatcgagcgggagttcatccgctgggcgaaggcggtcagcctggcccacaagcttcgcaccatgcggatggcccagtgcgagaccggcgaggtcttcgcgatccaggtcaccaatccgaacgtcgacgcaccggtcaagctcgatctcaaggtcatcgaggccgactacgtgaccacgccgtggtcggtgaagacgcggctcgatgacgagcggatggtcgacgggatcgagttcgacgcgtacggcaacccgtcgaagtattacgtgcttcggtaccacccgggcgacgggccgtcctggagcggctcgaagccggaccacgacgagctcgaggccaaggacgtgatccacctgttccgggtcgatcggccgggccaggtgcggggcatccccgagatcacgagctcggtttcgctcttcgcgatcatgcgtcggtacacgttggccgtgctcggcgcggcggagcaggcggcgctgcc

SEQ ID NO: 570 - DNA, 17274 bp, Artificial Sequence
  Synthetic Oligonucleotide
  misc_feature (7154)..(7213): n is a, c, g, or t
ccccacgtgcgtggggacgatactgaaaaaaacctgtatttacggtacccggacgagaaaaagcccctcgaagtcttctaccgagcgcgccgtttctccccaactccgaacacgaaaaccctgctcattgtcgctcgaatataccatcacacaaccgcctcccctagcttgcccgcaggctttttcccagagtttatcgcgcaccatggctgaaaccctccccacaaaaactcccgctttcggttccagaaaccatcgtgttaattcaccccgcaacccaggcggcacacgctcaaggatcagaacaaccatcgtttgcctccgtttcatcagtctccaacagataggcgcacccgccctccacttctcccatcacggggtcccacaaagagcccggggcggcggcgtcctggtcggacaggccatcactggtcgctcctttctttggcaacatcagcgctttctgaatgtcgggaatgattctctccagaagccttgttgacacaaacaggtcacggcacgagatgcgtacacgtcgttccagcccgtctttctcttccgctgccgctcgaaatgccactggaatagtaatttccgccttgtaaagatcggcgacatcataaacgaaggacagcatttttccggtgtggatgaaaccgagcgcgggtgagaatcccgccgagataatagccgcatggcagatgccgtaaagacacgaattagccgccgacaaagccctgttcaccgggtccgcatcaatccacttgtcacgccggtagctgcggcctgaccaaggcaccccggtttcccgggcggcctgggcataagcatcccggacacgaacgccttccatcccgcggatctggcgcagagtcagctccggatcgaacgtctcggcaaaccgcaactggtacaaacggtgcacgaccttcaaacgaaggtccgcgtccgcccaagcccgcgcctgatgcagaaagttcgctgcgctacgcgtctcgcccatgcccactgcgtagaaccggactccctcttcgccgcaccagaccaccagacaaccatggtccgccagcacagaaattgcggcatgggtgacggagacgccggggccaagcatgagcagcgccagattggcgcaggggacaggcactttgccggattcatcgtggatggcgatggcccgggcttcctggtcgacgcggcaatgctcgacatagaggtagctccagccgtcactgaacttgggcagaacgtgcaggtcctgaaccctcatgtcgactcccccgagtccgcagtatcggccggcgcgaccgaaagcaagccgaacccgaaggccttgccggaaccgatgccgcggaccagcgtctgccgaaaggcatcgggatcagtgacccgaaggaggccgccgaaaaggaccgaccgcagacgctgccccttgccgtttttgttcatatagatataccctggctgaagggtcgtggcgtctcgcttgataaagaaccctgctgattcggcccggcgggcaagccagtctataagccggtcggtcggaacgggaacgcgttttccgatagattctcttttcgcatccggtgaatgtttgctcaggcgtctggtcggatttgccgcgaggcggaatcgaaggcactgatctttcgagaagcatggctcaaatgatttcacctcagggggcgccgccagaagataattcgcattgtgaaaggcatagttccagttgggctctatggcggactgcacgatgatcaccgcccggccgttggggagagggtcgatgcggaaaagaaagcccgagtccatggcacgcttcacgtggacttgaccgttaccaaactcatccggtctgaatggtgtgagaaagtcctcatcctcggccttccgggacgcggacggaaaggccatacaaaggcgctgatggacatgatagtggtttctcagccacaaccgcccaggccgaggccggtcggggttgtcgcttacgtcgatcaacaggcaggaccggtacatggctattccacctcctcggtggcaagacgccgacgtcgagtctccagcgagcggaatttgagaatctcggcccgcttttgaatgatcagggcgcgccagcgggggtcctcaggattgatgcggtccagccccattccgaggccatattcgagcatggtaactgcatcatggcacagaccgcaaagcgaacgcaggtcatccagggtctcgttgcccccggcccttcggtaggtgacgtgctggacggtcatgcgcgggccgggcgacttacagaagacgcacaacccggcgtcggctttaattcgctcttcgcggcgcttccgatattccgctttcgtgtagtccgcgcgcgggcgcggcatggcgggggcagccccctgcagcgtctcgccgaccgtcggcgaaacggtaccgcgcaggacaaatctcggctcgtggaccggtggatcgaagcaaaccggcacgtcataccatacttccgcgtcatcgggagcaacgtcaccttctgaggcaggccgccattccacaagcgtttccaccatcccgttctgcagcgtcgcgtcggccttgtgcctcggacgccacgggatggcatccagtgcggcgttcaggtcgtcatggccggcgggattcgtccatgactcatcctcgcggggccttgcaagcaccgggacggagggcgggcaggacttgcggccgaggaaaaccggccacttgggcgatgcaatcgccgtggcgatatcatcgatcaacttcgcatcaccaccctggagcgccacgagaaagctcgcgtcggccaggtattcccggcgcgtgatgagcgtgccctgggctccggtcttcagaccgcccccagcggttgtcatgccaattcccgctcctaccgtttggtaatcccaccaccgcgtgccgtgccggtcgatgcgcacacccatcacaagcccgttcagctccgccaggcgttcccgcgccgcctcgcgcgacagtcccatggcgcagcagagcaggcccagtatgccggacttggtcggcgcgtccatagtccggcggatgacgaactttgacgtgtcgccccaggcctggagggggccctcaaggcggaggaagagtgtgttggcttcggtcattttgctgtctccgggggcgtcccggttgtctttatcttgttcatgatctctttgacgaaagctccgaactcaccgaactcgttggcgccgaccacggattgttcttgttcttgtgtctgcttggtcttgtcgatccaggtcagatgatggcgccgattcggcgagaaccagaagcgttcggcctcgatgccgtagcctgtagcgagatcgtggacgtactggccaaatctggcgatgctttcgccgatcaaaccgcgttcggacttatccggcaccggatcggcgaaggcgttggcgtagttgacgggggtggccgatttagtcttgacctcaaccagaactccatcaggcggattgaatgccgcgaatgcgtgttgtttgccggaggggttggccttggcggctgcttcaatgaaacactgtaccgtcctgcaggcgaggtcggcttcgtccgccaggttcttcttcagctgctcgaagtcgatgacgaagtgtttgtagaagcaggccgagttgaacatggcctcgtcgacgtgggccgcgccggcgtcctggccgggcacatcgtcggcagcggtgaagtagtccacctcgttcacgaccgcatgagtcgagatggcgtgtgccgcggacaacgcggcttcgacggtgaagttcaagtcgctgaaaacgctgttcttgacgacctcggtcatgcgcccattcagggcaatatcgggcacgagagggttctcagcgatgtatttcttgtatttcccgacaagatcctttgccttgtttgtttctctcagatccttcgccatcttcgaaactgttttcgtagagaggaaaagaagcatcttggaaagagccgcggcgttcgtcccctcgtcttctctttcttcaccttccccgtcctttttggtcgtcttcttagttttaggcttcacaccgcccaactctaaggcttcggcagcaatagcatcgagctttagaatggcttcgctctcaacgggttttacttggagaagcttcgccagcttttcgggtgtcaggtcgaagtcttcagaatgggcgatacgcgccagcaaactcgccaacctgcgtgtgcggacacctccagccttctccagagcagccgcaaactccggactgcggcggatgctgcgtttgagacattggctggagatgcgcgctcgggtaacgccgccgaagatgcaggacttgggcgcgcccaggtcatccctgttcagattggccgggctgtggttttggatcatgtgaatttcgatgagcatgttcatgccctccttttttataaactcgtaacgttgagataagcttctgcccagatgtcgcgaacatcgcgtccgcggcggtgctcctcgccccgctcccagatggagagatcatcgaggagttgcacccaatcgatacccttgacatcccgcgcatgcggcacgtgcccggcggcggcccgggcgaccactcccagcgcccaacgcaaatgcggctccagagacgacaggggcgagcaaagcagagcgtcgaatcgcgttcggaagcgcttgcggccgtcctcgtcgtgcggttcgcagcagcccaggacttcaggcaaagagggccccgcgcccgaatctggccggatgtgcgggacgcagaacgcgccgaaaagcttggcaatgagccacgaaggctcccggcgcggggtcgcttggctttccgcccgcagcggccaccagaggcccgtgaaaagatcgaaaccctggagcgttgcgtcgagcggctgtccggccagacggcgcagtcgggaacgctcgccttcctgcaagtccgaaagcctcttgatgtatttagcggtctggctcattttgagcctcccttcctgcgaccacgtttgggtttgccaggaacggatgcaggcgtacttgcgttcgacggatggtccggctcttcaaccagttctttgatcttcttgttcagcagggctttggcgtgctctttcgccgtgcgacggcgcaatggcgagcccggagtagtagccgaaacgacgtcttgaacaacagattgcagccaatccttcaaaaagttctctaattttagacgcgcatacaacttctgtttcaagctcgcctccagcgaaggcgataacgcatcgagcacagccttgcgttcaggatgctggcgatctggattcgaggtactagagcgcagaaccccactcaaattctccacagctttgcgcactgtctcaatcatcacacttcgacagtcgcgcggaaggcagacactggtcgcatcttggtagagacccttattcgccgccgggcctgtgatcgttgtgtacaccgttttactttcagtcgtatttgacgtaaattttgcggataaagcacgtcgccagaatcgggtatgcgttgcgattttcgcgcctggtgaaggaaagccaagcgttgttttttgtggctggccgcgcttgcctttttgtgacagtggccttgtggccgttgcgacgtcatcgctctcttcggaatcgtcgtcatatccactatcctgtgttttttcaacgagaattaagtgcgggtcatgtggccagaattttttgtcgttaccgctcgctttgaacggaggcttccaatttcccgtgaatgcatgtttgcgaataagatgggtcgtttcaccacaataggaacatggttctttttcacattctggatcagcaagccacagcttgcgcgatcgccaggcaaacaccgccacgacgtcaagttcttcttcctgaggcgggttattgcataaccaaggcgcctctcggtttgacggcctgttctcgggacaattgagagaaaatgtacgcaatagcgtagaatcgtgccttattaaataggcaggcgtaggtccgttaactgccgaagtatagcgaccaccgccgtaggcgttcgcccaggagcagaaccggatgatcccaagggcgcagcacgcagggcaaaatccatactctttgtcgcgcacatggcggaagtgagccatcttcgtttcagtaggaaattcgatcaacaaatcaccaatgggacgaaagccctcaccgtccaacttcgttggtttggcttttgagcccttctgtgtcttagccttctttcgttgatcgtcccatttcttttgcttcgctttcaacaggtcgtcgagaatggttttgtcctgatagaacctcttgccgtcgcccagcagattgaacgcggccttgtttatcttcagtttctccagccagttccccggtatgccggcgctcttctcgtccaacgccgcgagggaagacttcgcgtccttcttgcaccacatgagtacggccaacagaaagcgcaggagcgccaccctatccataggattgctggcggctatctgccgaatattgtgggcatcttccagtgctttgcagattccgacgcgatccgtcctcccactaccgtaaagaacaggtatccacttctcttcaagcagattgtaagccccctgtgttaccggaaatcccataccgttttcctccttggcatgttgctgtggatttcacgtgcccgcagaccacgctcggcgtaaagggaacgaacctggcgggcgtggtccaccgagcaggcaaccgcgatcagctgatggaatgtgacggtctcccggaggtgctgaagccactggatgctggcgtccacgatggaccggttacactcggacgcgatgttcatgaccctgattcgcttgatagtatccacgcaccatggcggtccggaacggataggcatagacccgctcgccgcgggccactttgtgatggccctcgtccaccaggatcaggtcaaagaaatcattcgagaaggcgggaagccatcggtcggcccggctggccagttgctgaatgttggtaatcacaatatttggacaccgcagtagtagttttaagtatctttcgcaaaagtggtagtgtcaagtatctttcgcaaaaattgaattcagcggatttgttccagaaccagaagnnnnnnnnnnnnnnnnnnnnnnnnnnnnnnnnnnnnnnnnnnnnnnnnnnnnnnnnnnnntcttttgccggtgggcggcaggaaaagcgtaataggtcagggtctcgccgattctctcttcgagggtcttcgccgcttttgataacgcaaagggccatcctcgttacgaggatggcccttttttgcgttggcttgcctttatatgggcgttgcccttgtgcctccgccgctccctatcgggtgatggaggtgcctgctccggtaaccctgggggttgccgcagaaggggcgagaaaactttccgtcatggaaaagagccccacgggagtcttgaggtagagatgttccaccacacgcccgtcgcggatctccacggggaaaaaacgcccctcgggagtcatccagtggtgcttgccgctgatggtgacgagtttgttgctcatgtgtctttcgtgccttgcctttcttctctgattccgacgttcgggaagtacggaacggggccttcggtacgactccggcgttcctggacagacgcacttcccatgctttcctgcaatacaaatgggccattccggtttcccgaaatggcctcatgtcttctggctcctcggcgaggacttgaacctcgaacctagtggttaacagccacccgctctgccgattgagctaccgaggaatatccaaaggcgtttcccgatgcttcgattgcatagatgactttttatggagaaacacgaaaaccctctggaaatccggtgtgtctcatttggttgagtctattttctggaggcggcacccggattcgaaccgggggataaaggatttgcagtcctctgccttaccacttggctatgccgcctcgggaagttcctggagcggaaaacgggattcgaacccgcgaccccaaccttggcaaggttgtgctctaccgctgagctatttccgcacctcaaaggaaaaatggtggcgagacccagagttgaactggggacacgcggattttcagtccgctgctctacctactgagctatctcgccgatcgggcgaaaagaatggcggggctgacgagacttgaactcgcgacctccgacgtgacaggccggcgctctaaccgtactgagctacaaccccgcatactgccgttgccataaaactcttgttggtgggcggaattgggttcgaaccaacgaccccctgcttgtaaggcaggtgctcttccgctgagctatccgcccccatgcccaccgacgcgaggcatagtatatcgagctgcggcagggatgtcaacacctttgcgacaaattttccgtccggtgttcctcgacgatgcgcttgtagagccgggccgaatccttgggtatgcggcgctgggtgagatagtccgtgtagtagagcccgaagcgcttggcgaagccgaaggtccactcgaagttgtcgtaaacggaccaggcataatatccccggacgtccacaccctgcttcaccgcctcgatcacggcgtcgagatggtccaccaggaatttctggcgctcttcgtcgtggatggcgcccccctcctgaacgtcgtcccaggcggaaccgttctcggtgatgtagaaggtttcgatggcgtactcgtcccgaaggcgcagaaggagttccgtgagccccgagggaacgatgcaccagcccatggcggtacgtggccccgccggggcgtccacgagacgcaggggaatcggcctcgtcgggtccgccacgacgtagctggggaagtagtagttcaggccgaagaagtcgggcttgccccgcacgggatcgaggtcgccttcccggatttcgggcatgctctcgggaacatggcggtagaggctttcgggatagcgcccccggaagaggggatcgagaaagagccggtcctcccagtccatgagcagttccgcagcaacgcgatcctcgggacggtccgtggcgggcagggcgagggtggtgttcatgacgatccccgcctttgctccgggtgcgtaggcccgaatgcggtccatggcgaggacgtgggcacggttgagcgtgtgggcggcatggtgagtgagccgaaggttttttctccccggagcctggctgccgttgtagtagccgttgaaacagatgcaatagggttcgttgaaggtcacgatcaggggaagccggtcaccgagacggcggagcaccgtctctgcgtagtcggcgaagtggtccgccacgtcccgctcgggccatccgccgcggtcctccagttcctggggaaggtcccagtggtagagggtgcacatgggaacgagccctcgctgaaggagaccgtccaccaggcggtcatagaaatcgagcccccgcggttcgaccgcgccgcatcccctggggaaaatgcgcggccaggccacggagaaacggtaggaagcgatacccagttccttcatgaggtccaggtcttcctcccagcgatggtagtgatcgcacgccacgtctccgttgtgagcctcgtagaccttgccgggggtgcggcaataggtgtcccagatggaacacccccgaccgttggcccagacggctccctcgatctggtaggccgcggtggccacgccccagagaaagtccttcggcagggccttcaggtccagcgaatggtgcgtcatggtcgtcctccttcgtttttcgatgggattctccccggtgctggggttttctccggcgacgctcagcgtcgcttgtgcttgctcatgtcgtagatcacggcaccgacgatgatgcatcccttgaccacctgctgcaggtagggggagacgccgagaaggatgaggccgttctccaccacggcgagaatcatgatgcccgcgaccatgccgctcacggtgccgaggccgccgctgtgactgatgccgcccacggtgaccgcggcgatggcgtcgagttcgtacatgttgccgtaggtggcgttgcccgcggcggtgcgggcggccatgagcatgccaccgaacgcggcgaggaaggccgcgatggtgtagaccgccacgaggttcagctccaccgagaccccggagacgcgggcggcgttctcgttgccgccgatggcgtagatgttcttgccgaaggcggtgtgattgagtatcacccagaccgctccggcggcgacgagaaagtagatcgccaaaaggggcacggggccgaccatggcacgccccagaatcatgaagtcctcccggagctggctcacgggaaagcccttggtgtacatgagcgccagcccccgggccacggtcatcgcccccagggttgcgatgaagggggggatcttcgtgtaggccacgaaggcgccgttgcaggcaccgatgacaactcccaccagcgaggcaaggaccaccgcgacgaacacggggggcatgccgaacttgctcacctcgggattctgggcgaaactggccgccactaccgacgcgagggccaccacggatccggaggaaagatcgattcctctggagatgatgaccatgccgacccctagggcgatgagtcccttgatggaccaggaggtgagcatgctcatggcgttgggcaccgtgaaaaatccttccgtcgcgatcgagaagaagagcaccagcaggacgagcacgagatagagggagtatttgttgagaatctgcacgagtctgtttttcatgaggattccccttttcgtcacaccgcggtggcgtatttcatgaccagttcctgagaggcgtccttccgctccagaatggcggtctgtctgccttcgtgcatgaccacgatacggtcgctcatgcccaggatctccggcagctccgaggagacgaggaggatggagttcccctccgcggcaagctcggagatgatcgcatggatttccgccttggctcccacgtcgatgccgcgggtgggttcgtcgaggatgaggatgtccggccgggtgaggagccaccgggccacgaggaccttctgctgattgcctccactcaggttctggatgcgggtctcgtagctcggagtgcgggtgcggagacgctcgttgtattctctggtgtcggtgcggatgcgggcgaaatcgagcagccgcagcggttttttcacgtaggaaagcagattggcgatgatggtgttgtccgtcacgcttcccacgccgatgatacctgtgctgcgtcgatcctcggtgagaaaggcgaaccccgcccgcttggcgtcccgtggactgcggatgcgggtctccccaccgtcgatgagaacgcgtcccgacgcgatgggacgaaggccgaagagggtctccatgagttcggtccgccctgctcccacaagccccgcgaagccgaggatctcgcccctgcggagatcgaaggtgacgttctcgaaggcacccggagaggaaagctcctccacccgaagacgcacgtccccgagagggacgtcctgcttggggaaaaggctcgtgagttcccgtcccaccatcatacgaatgagttcctcgatggtgagggaagccacctcccgctcccccacgaacttgccgtcccgaaggaccgtgacctcgtcgcagatgcgaaagatctcttccatcttatgggagatgtagatgatcgccacaccctgggaccgaagacgccggatgatcttgaagagctgggcgatctcggtttccgtgagggacgaggtgggttcgtccatgatgagcagctccgagttgtaggagactgccttggcaatctccatcatctgcattttcgccacggtgagattgcccgccctctcgcggggatcgaggttcagctccagatcctcgaagatggccctggtacgcacgtgcatcgcctcggcatccacgagggaaagcggcccgaagcgccgccttggaaacctgccgagccagatgttctccatgacggggcgctccgccacgggattgagttcctgatggatcatggcgattccctttgcgagcgccacggagggatgggggatgcgaagctcctctcccttgaagaggatacgccccgaatccgggcggtagaggccgagaagacacttcatcagggtggattttcccgcgccgttctcccccatcacggcgtggacatgtcccgggcggacacggaggctcacaccgtccagggcctggacgccaggaaatgccttggaaaggttctccacttccagagtgtagtcgctcacggctgacacctcctttccttcgctccgtcgtcacgctgacgcagacggcattgcaaatacgaagcggtgcgcggaggacgggcgaagccgtcccccgcacaccgagcaccgggcaactcgaagaattacaggtcttccttggtgaccttccggaagggaatgctcgtctccgggggaagctccttgccggccatcaggtcgagctggagaagcacaagggtgcgccccagcttgtccgcgtcctgcagaaccgtgcccatcatctcgcccttcttgacggaggcctgtccgtccggagtggcatccacaccgacgacgggcacgctttcgagcttgcccgcggcgcggagcgcctcgatgactcccagggccatttcgtcgttattgcagatcaccacgtcgaagttcttcgccacgatggtctgcattttgttctgtgcttcggcgcgggaccacatggcggtgtcctcgtagaccgcttcgagcttgtagcccagatcctcaagccccttcttcacgcccgcggttcgtttcaccgtggcctcgtggccgggctcacccatgaagagcacgtacttgagaccgcccttcttgtccacgcccttcgccttgaagtaggcatcgatcatctccgcctgaatgggacccacgacggattcgtcggaacccacgtagaaggtgtttttgccgtcgatgtacttgtcctcggggcgtttgttgaagaggatgagttttctccccttggccgcgtcgatgatggccggggcggaggtggcgtccacggggttgatgacgagcacctgggccccctgggcgacgaactgctctatctggctgagctgccggttctggtccttctgggcgtccgcgggaacggtgggaagcccctgtcccttggcctccgcctcgatggcgttccgcacaagggagatgaacatgtcgctgttgtcgtacagggaatagtagaccttctttgccgcgtcgtcggcggcgaacgccgacgcaccgagcagcaccgccacgagaagaccgactgcaacgatcagaaaagaacgtttcatttcggaaacaccctcctcacatgtcatcggaatttcccgaaccgtgctcccgcaccctctctgcgcactttcctgcgctcaacggctcttcgggagcggaagaaacgcttcgtcaacggagtttcgcgagtccctgcggaaccttcaggttattccgtcctctccgtcgcggatgtcccccctttcaacgcggctgcgtgcgacgtctccgcgtccgtgcagcacatcccatcgcaccgggccttccagacggccagaaagcgccgccatccccgcagtccctcctcgtcgggcttgaagacaccgcagtcctccagcccctccccgaaaatccgggccacgtcgcgccgaaggatcgtccaggcgccggcccggtccgcaacccgaccaacccgggcgagaaggtcctcagcccaggcacgatgcggaaaatcatcggccagggaagccgggggcaattccccgcgcagcagggaggccattctgtccaaccccgcctcgagacgaggcgggagaatcgccagtcccatgacttcgatgagtccgatgttttccttcttgatgtggtgtttgtccgcatggacatgaaagatgccgtcagggtgcgtttcgtcgcagcggttgttccgcagcaccaggtccagctcgaacgcctcattcctgcgccttccgatgacggtgatcgtgttgtggcgctcccgcttgccatgccacagcccctcggcgagaatcccccgctccgggtcctcatagtcacgccaggtccggagcaatgagcttcccagtcgaacaagttcctccgagtcgtgcccccgaagccgcagggtggagagaggccagtggagaatttccgcagtggtctccccaagacgccactgttccaggacggaggccgtctcgatgggaaagtgccagacaccaccctggaagtgatcatggctgaggatggatccgcccacgataggaagatccgcgttggagccgaggaacatgtgcggaaaacgctggaggaaggcgagaatacgctcgaaggtggcctcgtcgatacgcatggggcgatgttcttccgagaggaggatacagtgctgaggatagtagacgtagggtgagaactgcaaaaaccatcgctctcccgccagatccaggggaatcagccgatggttgctccgctcgggaaaaccgggacgccctgcatagcccacgttctccacgcagaggacacaccgggggtaacctcccgcggcagatcgttcccccgcggcacggatgtcccggggatctttttccggcttggagcggttgatggtgatctgcagttcaccgtagcgcgtgggcgcggtccatgtgagatcccgagcggccagatccgcacggacgtaacgcgtattctgggaaaagcggtagaaccagtccaccgcagcccgggctccctccagatcaaagcagcgccggaaggcctccaccacttccgacggacggggagtgaggtaccccatgacgcggctcacgaacttctccgacggtagatccagatgatgcagctttcgttcgagggcgaaccggcgaaggagttcgatgctctccagggtttccgagcccgacggatctgccgtatcgtctccgtcgggctcgtcgagaccgaagagggagaaaagggcattcgtcgtggccaggtcgtccagctcgcccagaagaccgcaggacttccccgcggccaccagagcgcggatggcccgcgtcgcgtcggcggtggaaacggcctcggaagtgttccgaagggagtcgattccgtcctcgacactcacgaagcacttacccccaccgttttccgtgccatcgccaggccgtttccacgatggcatccagagctgtgtagcgaggttcccatcccagctccccccggatgcgcaccgaagaagccaccaggcgtgccgggtctccggggcggcgcgctcccttttccacggggatgctctttcccgtgacgcggcggcaggcttcgagcacctccagaacagagaatcccctgccgtttccgagattgtagacactgctccttcggcccgaacgaagggcgttcagggccaggagatgtgcttccacaaggtccatgacgtgcacataatcccggatgcaggttccgtcaggggtgtcgtagtcgtcgccgaagatggtgacggagggacgtcgccccatggccgcatcgagaaccagggggatgaggtgtgtctccgggtcgtgggcttcgccgatgctcccgtccacagcagccccgcaagcgttgaaatagcgcagcgcgctccagcggagatcgtgggcgactgaagcccagtggagcaggcgctccaccgccagtttcgtctcaccgtagggattcgtaggacgcttgggtgcgtcctccggaatgggcaccagttcaggctcgccgtacactgccgccgaggaagaaaagacaaggttttccacaccatggcgcaccatggcctgaagaagccgcaacacaccctggagattgttgtcataataggcgagcggatcgcgcatgctctccccaacctgaatgaacgcggcgaaatgaaacaccgcgtccacgcagtgttcgcggaagaggcgtcccagcaacgtcgcatcccgcacgtcgccgtgcacgaacggaacggaggggggcagaaagtcccgatgccccgtggaaagatcgtccagaacgagaacctcttcgcctcgctccagaaggaaacggaccatgtgactcccgatatagcctgcaccgccacagacgagtaccgccatggtgcattcctcctgacgtgaccggaaacagataaagcagagagccccgaaagggcaactctcccgggaaaatgtcaacaaaaacgatattccttccgctgccctacccaggaaaattctctttttcttaagaataacaccgcgaaagatctcggatcgtcactctttttcaaaacaaaatcccatcttcatatcataaaaacccaaatcactcgctcacgctttcatgatcggcaaaagcgtaacgtcctcttcaaaatctgtcaaggatacgggttgggcgtagcggaagcggaacgttctcggaggaaggggaatgtttctttatttggagaaaacgtcacttttcgggacacggcaaacttgagcaaccttccgaaagtgggcacgaggagatcaaggctggagacagtctgtgtcgggaaagagaaaaaatatcgcggaaaccccaggccgaacgacgacgacgctcacggaagtttgaaggcgacacccctcgccacattgaacgaaaagaagcgctggccggactttccggcagattcgatgcttccgccatccagaccggccagtgggaaaaacggcttttcaagaaaaatcgggctcggctggtgtaataaactccagcgccgtcgtctgagatggcacaagccctttccgatcgcgagcactccccaaaatcggcccgagaaaacgccgcactccactgtgcaagaagccgaaacgcttcgatccgcgtccttttttccctactccgcctcgtttttcacaaccccacaccactgatcgatgacaacccccctgggtcaagtgccacccggaagtcggacaggatcatccttcgacaggattcttcgtcgtttttccacaccatccgggttttccggtccccgccccggctcagcgatatcctcacttgaagaggagatcgggaagccaggtgacgatcttcgggaagataatgcacagggcaaggcagaccagctgggtcgccacgaagggcacgatggagcggtaaatgtcgttcatggtgacttccttgggagcgatccccttcatcatgaacagcatggt

SEQ ID NO: 571 - DNA, 17081 bp, Artificial Sequence
  Synthetic Oligonucleotide
ggacgtttgggcgcggacccagaggaggttcgatggttcacccccacgggcgtggggaaaaggctcgacagaaagccacacgtcgcccgggagccggttcacccccacgggcgtggggaaaagggatcggggaaatcgagggtttccccgaaccaggttcacccccacgggcgtggggaaaagggctcgtggatcgcgagcgacgatcggcggatgggttcacccccacgggcgtggggaaaaggcccgcacggcgtcacggctacccaggacccgcggttcacccccacgggcgtggggaaaaggctaaagttattttcagtagaatcgcatccattatacctgattcttccggataaggtcatttttcgttgggctgtcgcgagaggacgataccgtcgaagtcgatgaaatcgcgcctggtgttaccgaaagaacggatggtataaccctgttcgttggcgtcgggataaatgaaaatcacgccgccgttacggatttttttacagcagcgttcccagagtttttcacggacgagggcggagatttcggcgacgaatacgccgggatggggttcgatggcccaccgggagacttcgccccgcaaggcgggtggcgcggagacgaggatgatgaccgtcatggtgtagtttctcccgggggagggggcggggttgacgacccggtatcagaggggggctgttgttccatgagttcgggatcatagttctgggcggcggggcattcgccctcgtcgggatcccacagggccaggggagcgtcggcaatgtcggcggcggggtctcctttccgggacatgccgagggcggcccggatgtcggggatgacccggctcagcagcctggtctgatagaaccattgccggcaggtcatgcggaccacgcgttcgagttccgagggattctgcgcgccgacctggaaggcgatgggaatagtatactctgtcttgtaaagatcggcgacgtcatagacgaaggagagcatgttgccgacgtggatgaaaccgagggcgggcgagaagccccccgcaagaatagcggcatgacagagtccatataaacacgagttggcgacagagagggcccggtttatcggatccgcatcattccagttgtcgaccttatagttacgccccgtccagttcacgccggtctgctgtgcccaggactcgtacacccgacggacgcggcgtccttccatggcgcgcaactgggccatggagatgcccggcggcacaggatcggggaaacgcacgccgtacaggcgcacggctacctcgaaacgggtctgtggattggcccacagggtcgcctggtgatacaggttccgcgcgtgacgggccttggagtgtccgaaggcgtagcagcgcacggcatcctctcccgtccacgcaaccaggacgccatgttcaatcagaaggctcatggcggcatgggttacgctgactcccggcccgaacaggagcaggttgatgccggcgcagggcacggcggttttcccactggcgtcgatcaggacgatggcgtgctcgtcccgttcgacgatgacgtgttccaggtaagcgtatgaccaggaatcggtgaagcggggcagggcccgcaggtcatcggaaggcgccattcgtacctgttcctttcccgatacgttacgtaccgtccacgtacgggccggacggccagttaccccaaggcatgcatcctgctcgaggcactaaccggatgagccggcgggggcgggacggatcccgcccccgccggggagaggtttcacggtttcgcgatggtgagtagtccacaaccgaaggcccgggctggcccgattcccgaggcgatggtggcgtaaaatgcccgcggatccgttacttccagcaggccttcatagcgcgcgcagaacaactggggaatacaggccctgcctggctgttccgatccgttggcattcgcgaaacccgcgcggttcacgtagtagtaatttacctggatattcagagcttccgggccgggcacgaccttgaagcctccggtctccccccgccggatcagccagtcgggcaactgttcccgtggtacaggcacgcgcgtgccattgcgggtgcgacggtcgcgtcgccaaggcccggagagatccccggggggctcgaggatcacgctgtccgggttttccctgcgttgcgccgccgtgagggtgccgacctttctcgtggcattggccatgagccggaagcggtagcgttgtccggactggaacaccgggttccaggatcgcacttcagggggggctgccagcaggtaatccgcgttatgaaaggcgtaatcccagtctggctcgatggcggactgcaccagaatgaccggattaccgccaggctggggatcgatccggaagagaaaacccgcctgccccgaccggggtatatgcaggtgttcgccgaagtcttccggccggaagggctggagaaactggggatcggtggttttgcgcgccggcgcggggaaagccatgctcagccgctgatgcacccggtacacgttacgcagccagtttcttcccgggcggatccggtccggatccttcccggcgtcgatcagcaaggtagacaggtacatgcccggatcctcctattccttgaccttttcgcccagcaggcgcgcgcgggtttcccgggatcggaaccggataatctctcttcggcgctgaatgaccaggtcgcgccagaagggatcttccggattaatccggtccatgcccatgttatggccgtactcgatcatcgtgcacgcgtcgtgacagagcctgcacagggagcgtaactcgtcgacccgttcgttaccccctgcgtggcggtaggtgatgtgctgtaccgtggtggccggggccttgcagaagacgcacaggccatggtcctgctcgaggcgccttgcccggatattccggtattcggcgttggtgtagtccgcccttggcctggggggtgatttaggaagttcatcttcggttttgttggtcagtcttacctgtccctcccctgttccacattccagaaacctgcgcgcgacgacccgcgacgtataggcgggcgcggggggaatgaagtgcacgggcacgtcgtgggcggtgtccaggtcacaaggctcaaacgccacgttacccaggggccagtccgtgtacacggtaagcacatccggttttttctcgaaagcgtaacgctgttcccacggcacggagagcagggcctcgatcgggttggctgtggttcgcaacgatccctggtctttcaggaagaggggtaccgaggggacgcaggactttcggccaaggtacaggggccacacaggctcgagcagggcgtcatgtaactgccggatgagcgagggctctccccacagggccaccaggaacgaggcatcgccaaggtactcgcgaagggtcagcatcgtttcgccatgacggagcccgccttccgcggatcgccgggagatgccgcccgcgccgaccgtgtgatagtcgagccagcggctaccggggcgatccacccggacggccatcttgagactggccatgggtttcatgacttccggggtggcctcggaccggggaatgccccgggcggcgcacagcaggccaatcacgccagacttggtgggcgcgggggccacgcgccgaatcgcgaagcgggactccgcgagcccccacgcctggaaaggtccctcgaggcggatcagcagggtgttgtgctcggccatggctcaggcctcccccaccggcgaatggttcactaccgccgcctgcgcctgggcccaggtcaggccgggatcaatggcgggaacgagggcgtttaccaggtcgttgaggctgctgaacgaggcattgtcgtcgaccaccggggtcccgttgtactggaggggataccgcaggttcggcgagaaccagaagcgtttctctggtgctccgtagcctgtatccaggtcttgcacgtgcatggccagccgggcaatggattcggcgacgaggtcttcgcggtcctccacgtcgacgggttgcacgaaggcgttggcatagttgacggggtacttgcgcaactccacgagaatgcccagcggcgggttgtgcgcggcgaaactgttctgcttgcccgtggggttcaccagcgcggcgccccgcagaaacgccccgaccgtgtgggcggccagttcgcggttgtcccggagattcttgagcagttgcggccaggagatagagaagtacttgtaataacaggcggaggcaaacaaggcctcgtccacgtatcccgcgccgcggtcctcggccccgggcacgtcatcggcagccacgtagtagtcgatctccttgcgcgcggtgtgcgtggagagggcgtgggcagcctgcagggcggcttcgaccgtgttgttcaggtctttccaggcccccgagtcagccttggcttcgagcatgcggccaaacaaggccatgtcgggcacggcggtgtttttactgatgatttcagccactttccgggccttctcatccttgctgcccgaagtttccgccaggaccttcgccatttcgcggatggcttccctcgtggtgtacacgagcatcttgccttcttcctgggattcggcgtcttcagcctcttccccggccttgttttttttgcctcccctggtcctctgctcgaggccgcaggcgttcagcacttcggagatgtccgcatcccttttccccaggcgctccagttcctgccggagcaactggctcaggcgccgggtgcggacgccgccgagcagggcgctgaactcgtcactcaagcggatggaccgcttgaggcactggctcgaaatccgcgaacgcagcacgccgccaaagtagcaggttttgggcgcgccgaggtcatcgcggttcaggttggccggggcgtggttctggatgaggtggatctggatcagcatggcttgttctcccttggttctggccggttgggctcggttcatgatccggtttcttcaactggcaaggtttcttcttcctccgggttggcgtcacgggcctccccgggcaaggtgttcgcgaattcctgggcccagaaaagccggacggaatggcgatgccagaccgacaggtgatcgatgagcttgttccagtcgataccgggattgtcgagggcatcggccacggtggcaagggcccattccaactcaggctcgattcgttccacgggggtgttcagcaagagatcgaaacgatccatgatcgattcgcggatttcgtttccccgtttcgcattctcgcgggcctgttgcacgaccgcgcgggcgagttgacggggcaggcggtttccgttttgctggggcaggggcgtccagccgtaaagtttgcacaccagccaggcgacatgccggcgaggcgtatccttgtggtgctgccgtatgggccaccagagtcccgtgaacaggtcaaaagcgatggcatcgcgatcgatgccggtgcccgcgctgctacgcaacagcgagatgatcccattcttgcgatctacgaggcgggaaacgaatttcttcacgcccgcggaggcttcgcgggtgtactccttcatgtccagaaaggggcgagactgcaggtcgcgctggctgatcacgtcacgaacggaaaccccagggaaaaagacaggcgccatggaccgctcgggaaccctgtacagcgcggcgggttgctgttccagcagttcgcgccagtcggcaatgcgccccacctccgatggataaccggcctgtaccagcgcgaattttgccaggcccgattttttgacctgaccggccctttttttcttggcctcttcatcccttgcctgggcctggacgattgcacactggaagtcatacaggtgttttttccgttcttggttccattttgtcaacaggatcttcagggttggggtggatgcctccggattcacgtcgtccggaattgtccctggtgctccaaggtcgatccggatggcccgcgcgtcctggaactttgcctggttggtgttgaaatcgaccaggagccatttccggtggtcgcgccacggcgcgatatgagagatggcatcgtgaattttgagcaggttgtcctgccattgccgggaaagagcgtccggatattttgacagattgaacaagtcgatggtctgcagatttccgatcgcatgcggatctgtccactgatacccctcgtttacatcgctcttttcacgcccctcaaaggccatctgctgaatgcccaccttgaccaggtcaccggtaaacacgcaccgggcaccgttctccgcgggtatgggaagcagccagacccggcgaggtaaccacgtcagaccagtcagtaatggcacttctccctgaagtgtttgaagggggatttcccaagccggagaacctgcttgccgatcacgtaaaaccgcccaggagagccgcaacgtcccggctagcgaaaaagcctcgggcagcaggtacacggggggcgtcttgttgataccataactttttccttgtccgcccacggtagtgaagacaggcaagcgaaccaggccaatggcacaagccgccggcgacagccagttttcaccgtctgccacgtggaaaaaatggggatagttgcgtccggacggtatctcatgaatgaggttcatcacgggatgatatttctttggcgaacgaagattttgatcctgaaagaatcggggggcgtcatccgcgagcagttcgaagaaccttgcgttgtcgcgcgctttatcaaaccagttgcccggaaagggcgcgtcgagggtggtgagcagatcatccggtgggttgccgcgacaccagtacaggacggccagcaacagtcgggtaatggcgaaagtgtccaggggattgcccgtatcgacccgccaggcaaggtgggcatccttcatggcttgcagtattccgacgcgctgacaggttccatcccgatacacgagcggaatccagggatcatcgagcaggttgaaacgaaatgtttcactcatggcgttttctccttctgccgatttcaggccgggactttacacgcaaggcgataccaagcgggtatgttaacaaacggaaggataaaatgaccgagagccatggccaataatccggcttgccgggaatgctgatcatacgtcgtgtcctgacctcccaaagaggtatgagtgcgtctttatgttgatcatacctccgtaaaattccggtgtacggaaacataaggcggattcaaaaaaattttttgtcctattgttcgacagatgtccctgaacagcaagcctggttccctgaaagcatctccgggttacctgaactggtatactctggcccatgggtgacacgccgcgggtacatgtactggtcatcaactggaacgggcgggagcacctcgaagcgtgctttgacagcctgctggcgtcggattacccggatttcgaggccgttctggtggataacgggagcacggacggttcggtgacgtttttccgggaacgatggggtggggatccgcggtgtgccttgctggcactggaccgaaaccgggggtggagcggcggtaacaacgcgggcctgcgtcgggccatggatgccggcgcgcggtacgccctgctgctgaataacgatacccgcattgcgccggacgcgttgtcgcgcgccgtggaccgggccgaatcggatccacgcatgggcgcggtagccctgaaaatggtactgttcgaccagccatgggtggtgaacagcctggggatcgccatgagccgggcgggggcgggctgggatatcggcgcgggacggctggacggcatggtgcttccacctgaagaggtggcaggcgcgtgcggaggggcctgcctgctgcggctggacgccctggaacgggtggggctgtttcccgaacggttcggcatttacctggacgacctggacctgtgcctgcgcctgtgggatgacggctggcgggtggtcacctgccccgaagccgtggtagaacataagttcagtgcgtcgatgggccatgggccaggcgcgcggcggaaatattttcttgcaacccggaatcggctcttgctgctggcgcgcaacacgccggtttcggcactgcccggtgcggcatgggcgacgctcgcggcggaactccgctcgttgggcgcggccgcgcgggatggggactggtggaaatggctggcccatggccgggcatggtacgacgtccttctcgcgacaagggagacgatcgcgcaccggcgagccatggatcgcctggggttggatcgcgcccggcatggacggttgacgcgccgggaacccctttttggccccgaggtggtcctaccagtccgggggttttatcccctgcgcccgccggtgacgggatcagcccgggcgatcagtcgcgccgcgtggctggaagatccaccggcagggctgcggatccggctggaagccccgttaaggggtgtttttccgggtcctgtgacgatctggcaggatgacacgccatccgcggtgctggccaggccgggcgagacgtacgctctccaggagtccgctaagcggatccgactcgaggcgtccggcatggcacgggccgaggaatccgggctgccatgggacacgggcgcgtgggtgacgctggagcctgacccggtggcgcgatttctcgaggcgtagtcatggacggagtgggaaagaccattcttccggcaaggagttgggatagatgacaaaggtgaaactcgcgctggcgggcctgctcctggcaggcatgctgggtgtcgcggtagtgctgggaattctggtcgcgcggtggtcggtgccggatgacctgccccaggctccgggtggcgtgccggttgcagagtcgggaacgaccccggccggcggcaaaccggtggtggaagcgaatccagacgcgcccctcttgtgcctgagcattcccgggttttcggcagagacctggcccatcgcggccgaagagatccggctggccgctgccgcgggagttcaccagtacctgttaccggtctccctgcgctgggaaggcgcgccggagccgcccgaccccgtggaacgggtcaaccaggtgatcgtactggatccggaagcgacctttctgctgacggtggacgtgaacccgccgccggagtggctgagcgcgaatcccgccgaggcgatggtgggtacggccgatcccctcgctttgccgtcggcggcgtctcaggcatggatcaacgcggccaaggacggcctgaccgccctgcttggcgcggtggaaggcagcgcggtcagttcccggatcctgggctacgcgctgtgtgggctgctggatcaccagtggcgcctgccagctggatttgaccggtcggaagtcaaccgccagggtttccgggactggctggtgcgccagtaccagaccgagacgcgcgtcgcccaggtgtggcacatgccggaattcgacgtgagcagcgttagcattcccgcccccccgggtcccgggccggacgaaggcgtgttcatggtgtttccccaggatcgcccgctgagcgatttcctgcgatacagttcagattcggtagcggacgccctggccgccctggtggcccatacccgcgcggtctcgttgatcgcgccgctgattctcgccccgtacgggtataccctcgaagcatcggacgccgcgtcgggacatttcgccctgggcgccctgctccacagcgacttgagcggcatcatcgcacccctggcccagggggatcgcggcctggggggcgcggggcacctcgcggccccggcccagagtctcaccgaccgcggcatgcgctacgtcgtggtggatgatatccgctcgggcatggaacggaacgccgaaaccggcgcgttcgagcgggataaggggatccggctggaagatgtgctggacgtgcggcgtcgaaacttcgcgcaggcccttgtttatggattcggcctgacctggtcggatccgctggcccgtggctggcttgtcgatcccgaccagtggcaggagctgggacggcttgccgggatctaccagcgggtacgcccccggacggaacctccgccagcggaacctcttcccggggtcacgctggtcgtcagcgaacgcgcggcgttcgtgacgcgcgccggtacctccctttacgcccggaccgtggcggcagcccgggatgccgtgtaccgcagtggcgcgcccgcccggaccgttctgctgcaggacttgtttgaggatgtcaacacgccgaccccagtatacctgttcgccaatgcttttcgtctcacccagtcggaacgccgggcgctgcgggcgcgcctagcccgggaaggtgcctgcgcgatctggctgtacgcgccgggatatttcgatgaacagggttctgctgtggcgggtatcacggagatcacgggtatccgggtcgtggacgcggggccggggggcacggccgcccgttatgtgcttgacggaacctatctcaagcgggacgcgacctggggcgacgcgacaccctgggctccccgcttcgcggtggaagacccggacgcggacgcgttggcccattacgtggatgggggaaaggtttgcgtggccgtcaagccccagccagacggatggacctccgtgctcatcgtcacgccggagattaccgtatccctgctggccgaactgctgagcatcctggaacagcccatgctcgttcaggcggaagacggaaccagtttcgataccgtgttcgccgcgggtgacctgctggctattcacgccggcgcgtcgggacggcggatcgtgaacctgggccgtttcgccgatacccgcgacctgctggatgacgcgttcagctggagccggaaggattcgtttcccttgcaggtgcgcctgggtgagacgcggctgcttcaatcgcgcgaggaagcggcggggcaaccatgaaagtgaccatcatcgactacggggccgggaacctgggatccgtcacccgggccttcgaatcgctcggaacggaggtgatcctcggcagggatcccgtttcgctggctggggcggacgcgctggttttacccggcgtgggggccttcgccgaggcgatgatgtttctggatcggggcggatggctggggccgttgcgtgaagccgtgctggagcgccgggttcccgtactgggcatctgcctgggcatgcaactcatggctacccggggagaagaaggaggaaacacgccgggcctgaactggctggacgggggcgtggtccgacggctgtgtcctccacccgaaagcggcgcgcgcctgccgcatatcggctggaacgaccttatcgatcgcggggaacacccgattttcgccgggattcctgccggagccacattttatttcgcccattcctatcacgtggacgccttgccggaagatcgcgtcctctgccggagttcacatggggtatctttcgcggcggccgtggcacgggaccatatcctgggggtccagtttcaccctgaaaagagttacgtcaacggcttgcgtctgctccggaactttctggaattcgccgggaggaggacgtatgcataagacgcgggtcattcccgtcctgctgctcggcgcgcgcggcctggaaaagggcgtgggattccgcaaccgggtatacgtgggctgtccccgaaacgcggcccgggtgttcaacgcgcaccgggtggatgaactggtgctggtggacatcgtggctacccccaactgccgccccacgcgggtggactatgtccaggaaatcgcccgtgaaaccacgatgccgttcgccgcgggcgggggcgtgcgatcgctggatgacatgcgtcgcctgctggaagcgggcgctgaccgggtggtgctcaacaccgccgccgtggagaatccctgcctcatagaatcgggcgcgtcccgcttcggcagccagtgcatgctggtctccattgacgcgctgcgtcatccagacgggcgttacgaggtattcacggcgtgcggaacccggcccgccggcattgatcccgtggaagcggcccggatcgccgaagccgcgggcgcgggggaactgctggttacagcgatccaccgcgacggcaccatgagcggttacgatgtagatctcgtgcgcagggtggttgacgcggtgaacattccggtgattgcgggtgggggcgcggggtctgtggagcatatcgcggaggtggtgctccggggaggcgcggctgcggcggcctgcggggcgtttgtcgtgttctacgggaagcgacgcaccgtgctgattacctatccatcggtcagggacttgcgcgcggtgctgccggaggaacgggtacggaaccgggatcttgtgccgccgccggatatgaccgcggcgcggttgtgatttgcgcggcaccgcgcaaaatctgcgcggcccggcaagccagggaccggaaatcacctgaaaagtcgctgttttcacgaagttgactccggcacggtaattgccccctgttctctggaagccatttcgggacgagatggcgcgaccagaaggagcgcgaccatgaagacacgtaaaacattgtggatccttggaatagggggtgccgtcttgttggcggccgggttgatggtgacggcgtgggcccagcaggcgccaagcccggccgattccggagcgccggctcctccccgggagaacgtggatcagggcactccaccgcccccacccccgccgccttggcatggcatgggtgccggtcggggtacccggggttgccccccgggatgcccggattacgcggacgcggatggagacggccgttgtgacaacttccgggacgagaacggcgacggctggtgtgacaaccgcccggctggtccgccagtccggggattccgaggccagggctggggttctgatggcacgcctccacccccgccgccttggcatggcacgggtgccggccgtggggtgcgaggatgcccgccgggatgtccgggttacgcggacgcggatggagacggccgttgtgataacttccgggacgagaacggcaacggctggtgtgacaaccgccctgctggtccgccggcccggggattccggggccagggctggggtcctgatggcacgccttcaccgccaccggcgtggcatggtaccggtgccggccgtggggcgcggggatgcccgccgggatgcccgggttacgcggacgcggatggagacggccgttgcgacaacttccgggacgagaacggcgacggctggagtgacaaccgcccggctggtccgccggcccgggggttccggggtccaggccggggctatggcggtccctggggacgtggccggttctgagtggcacgcggccgaacggcatcgggcgcgggcggtccatggaggccgtccgcgccggtctataggttcgaatggttccgggcgtggataatgggaagatgaggtacgggttggtatgaacacggcttggcgacgcgcgcttccgtggcttgtggtaacgttgctgctgcaggccatggtgctgttcatggcggccgggatcacccgctaccgcttgcggcaggccgcgtttatccagcaggcccgggtcgaaatcctgctggaccttgccgagcagggggtacgggcccacatgcggcctggcccatcgctgattgtgccgggcgtggagacggtattcgaggcgttgcatagcctgccggaagtggctggcttacggctggttgatgccgcggggactacgttattgtccacgggcgtgcctgagacgccagggcctcacccttcgcccgacctggagcggtttacccgcgacatcacagatttgcccgcggcgggcatgcctggacgtggcgcgccccggggaccggggcatggtccaagatggatggaatccagggggccggatactccctggcgtcctttaccaccgggaccgttgatcgttgaactctggctggaccggggcgaggataactacgtgtggcaggtacgtcgggatggctggctgatcgcccttgggggtatgctggcagccgccgtggccgtgttggctgttgccgcgtcgcgccgccagcgacggatgcgtcaggatctggtccaggcccaggaggaagtggcgcgtcaggcccgcctggcccggctgggcgcgggactcgcccacgagatcaagaatccccttggcgtggcccgtggactggcgcaatccattctggacagcgcgcccctgggatctcccctggcggagaaggccgcggccctgatggatgaaaccgatcgcgccgcccgccggatcaatcttttcctccgatatgcccgcccccccgagccccggcctgaacccgtgaacctcggggaactgggccagaccctggaacgcctgttacgggatgaagcggcgcggcaacaggtgcggttaaccgttcagttggaggggggcgtgctggcggatgccgacctgttgcgacgggcgttgatgaaccttcttttgaacgcgctgaaagcgtgtggaaagccgggagattcgattatcctgaaggtggagccggaaacccgggacacggtggcgctcgcggtggtggatactgggacgggcattgatcctgaagacctgccgagggtgacggagcccttttttggtaaatttgaacagggtaccggcctggggttaagtatcgtccaggaaatcgcccgcgcccatggttggcgcctctcgattcgatctgtgcccggacagggcaccgaggtccggttgtgcggcgtaaagcgggtttcgttacccatgaacgcgatggaacccccggagcgcggggaatcgtgatcggaaaaggtgaaatgaccataccccccgtgatcggggtcgtagacgacgaaccggcgcagcgtcggttactggaggaaaccctccagcgagccgggtggcgcgtgctgtgtggggaagacggcaggcaggccgtggaactcgctccccgatgtgatctcatgctgctggacgtgcgcatgcccggcatgagtggcctggaggcgctggacaagatccggcaactgccgcggccgccggtggtcgtcttgctgacggcctatatcgacgtgcgggatgccgtggccgccatcaaaatgggcgcggcggactacctggagaaacccgtcgacctggacgaactgctcacggtgatcgaggattgccttggccttggtcctcgcgaccaggatgccctcgaccttccccccgggatcgtggccgaaagcgagaccctgcgtaatctgtttcgccaggccttccgggtggcccccacgtctgccgccgtcctgctcaccggcgaaagcggcacgggcaaggaaatcttcgcccggctgatccatgcccgaagcaaccgggccagcggtcccatggtcacggtgaacatgggggcggtgcctgagcaactggccgaaagcgagttgttcggccacgagaaaggggcgtttaccggcgcggataccagccgcgcgggcaggttcgaagaggccgacggcggcacgctgttcctggatgaaattggggaactgcccctgtccctgcagccgaaactgttgcgcgtgctggagacgggtgaattccggcggattgggggcaccacggaccggcgggcgaatgtccgggtgatcgccgccaccaaccgggacctggagcgggaagttacggcgggccggtttcgggaagacctgttttaccggctcaacgtgttccctttgcggattccgcctttgcgcgaacggcgagaagacattattcccctcgcggaactgttcctggggccctggaaaaagaggttatcccccgcggcggcccgtctcctggcggcctggtcctggccgggcaacgcgcgcgaactgcgcaacgtggtggaacgggcggccattctggccgatggcgacatgatcttacccgaggacctgcccgatgccctgcggaacgcgccccgttcggacaggcccgatgccccggggcggccccttatggaagaagcccagcggcgcgcgatccgggaagccctggaaaaaaccgggggaaaccggacgaaggccgcccagctgctgggtatcagccgacgcagcctgatttacaagttgcgcgcctatggcctgtaggggggggcgggtgattctccccgccgcgcggccgccagcgcgatcgccgtggccaccgacacgttgaggctttcaacccccggccacaggggaatccgcgccaggaaatcgcagcgttcccgcaccagcctgcgcagtccgcgcccctctccccccgcgaccagcaggacccgtccggaaaggtccgcggaccagaggtcccgatccccggccatgtcgaggcctgtcgaccagaagcccgcgtcccgcaggcgacccagggcgtcaggaagattcttcaccgtcaccagcggaacgtattccaccccccccgcggcggctttgacggccgccggggacaacggcgcctgccgtcgttcggtgaacaacacccccgccgcgccgaatgccgcggccgagcggatgatcgccccgaaattccggggatcctcgataccgtccagggccaccgcgacctgccggggggcgcgcaggccgtccagccaggcttccagcgacacccggggaaccggggcggcttccagcaggacgccctggtgcgcgccgttggctgagagccggttcagcgcgtccttggatacccgctctaccggcaccccggtccggtctgccaggcggaggatgtcttccacgtcccggctgtccgcgagggcgcgcagccggtagatctgccgcttgccggccgccaggcaggcccggacggcctgctttccgtacaccgtttccgtgatcactgccgtggttctcctgagacgcgaacgcgcatcagaaacttatcataccttgccgccgcctctggtcgacgcgtcccgtcaccacccatcatggtgccataatgtggtggatggcgtggcgcgccggtaacccggcccgcctggcgtggtata

SEQ ID NO: 572 - DNA, 17076 bp, Artificial Sequence
  Synthetic Oligonucleotide
gggaacacttacagcaatccgaaccaaccacgaatgttgacggttcacccccacgcaggtggggaacacctctcgacgctgaacagcgtgtggggtatcgccggttcacccccacgcaggtggggaacacacttcgaaagtagacgctttgaggccattgaacaggcttcaagtatggatcacggatgcttggtcatcaatttcaatccttcccattctgtcactatcctttccgcggcaccccaaaactcaattccaaagccttgttcgcaatgcttgctgtaaatcatgatacaagttccaccggcacaaccagacctggccttgtcccacagcttttcccttatcatggccgatacctgaccgacaaatactccagccttgatttcgaggagccagcgtgtaatttctcctctcaggccagagggaactttttcaagcaccagaaccatcatcatggcctccaggatcatccagaccccatgacaagccgccggggctcactttatcatctgggttccaaagcccgcctggcacggctggatcgacatcagcaaggtctggctcatcgtccgaagtttccagaataccgaaaagggcgtgaatgtcggccactatcttctttagcagaccaaattgatagaactggtcacggcaggcaatgcgtgtccttctgtccaggttatcgacccctgcggctgtggctatgaaagccgcgggcacggaggtttccattttataaagatcggcaatgtcataaacaaatgacagttgtttgccagtatgaacgaaacccagggcaggtgaatagccagcggccactatcgcggcgtggcagatgccatagagacaggaattggcaacggacagggctctgttgatggggtcggttttattccagttgctcctgtcgtaattcctcgcactcatgggcacatcgaattcttttgaaagtctgaaataggtatcccgtactctcgctccctcttttccccttatctgttcaagagagagggttgggtccagtttttccttgaacctcaattcatacattctgcgaactatccgcagatgcgtatctcgatttgaccaggcggcagcctgacgcataaggttggcggaactacgggtggtccctgtcccggatgagtaaaagcggactccctgttcccccacccaagccaccaaacagccgcattctgctaaaacaaggatggccgcatgggtgatggatacgcctggccccagcatcagcagggccagtccagcgcagggaacaggagtggagcccatggcatcgtgaaaggcgattgcctgttgttctttgtctattttggcatgctccacatagagataggtgaagcggtcccgcatttttggcattaggtgaaggtctctgttacgcatcacttgccggaaccacggaaaggaggccgaagcccattcctttggcgctgccgatacctttttccaaggcttcccggaacagaaaggcatcatccactgtcagataaccttccagcagggcggaacggtatctcaggggacggtattcgttctcacgccggggcgaatttccccggggctccggtttggaaccgtatacccagcccaggcttaccagttcggtctccccgggcgtgaagcccagtctgccagccttggcggcaaaccattgcgccaccgcatcctttgggttggaatttgtgtcccaggtaagggcgacccgtttgtgcagaacccttcccgttttttcctttcctccgggtccttcccgcaactcgtcgattttgcgtttgacactggcattcacgaggatgcggaagcgcagctgctgacctgctgagaactggggatcgtattccttaacctggggaggggctgccaaaaatcccgtggcattctggaaagcccagtcccaatccggcggcagggacgactgcaccaaaaccatcgccctttgattttctccatcggtgttgttgtccacccgaaagaggaactggcgcttttcaaaatctgcggggtcaaagggctgcagaaacctcgggtctccttccttgcgcttgcgcatggggaaagccatgctgagccgccggtggacattatagatattgttcagccacaagcgcccgggccttggccggtcagggttgccgcctgtgtcgatgagcagttgggatagatacatcatccgttctcctccttcggatcgagtttgcgcctgcgctgctccagcgagcggaatttgattatttcctcgcgtttggccaagatgcgctcacgccaggcggggtcacagggatctatgcggtccatggtcatgccgctgccatattccagcatggtgcaggcatcgtggcagaggcggcagagggcgcgcaagtcctccggcttctcgctgcctccggcgcgtcggtaattcacgtgctgcacagtagtggcgggtgccttgcagaacatgcaggcggcattgtccatcaccaaacgctcagcgcggacccttttgtattcaggattgtcgtaatttgcccggttgcggggcggttgccaggctttgccggaaagcacggtctctgcctcgaagttgcggtccaatggcaggttacagcggatcaccagccggggcaagtggtggggaggctcaaaggacaccggcacgtcgtaatgcgcttcggcgttcggcggagcgtgcacgtcatcatgggccggaacccagtcgagcacacagggaacactgtcaggtatcggttcgcctttttccctcagttgcgccgggatcgaccgcaaagcctctttcagactggcataaaaccctggcgggtgttcatccaccggacgggaggggggacaggattttcgccccagataaagcgtccagactggttttttcagcgcttcagccagttgtgccacgatatccggttcaccctggagcgcaaccaggaagctggcatcagccaaatactcgcgtcgggagagcaaagccccgggtttggatttgatcttgtccgcgcccaggtttttggccagggcagtgccaaccagaactaggccgttgggcattttcaggtcagaaatgcgcagcttctgctccgctcccacagtatggtaatcccaccagcggatgcccgggcggtctatccgcacccccatgcgcaatttggcaatttcacccagccaatactgtccggcttcggcccggctgattcccagggcagcgcagagcaggcctgccactccggatttggtgggcgcgtcggctgtcctgcgcacggcgaatttggcctcattgcttccccaggcctgaaggggagcctccaatctcaggaacagggtattaggcggagaagacatttcaactctctactttctcgttttttacatcatcccattcaaaacccaacatctcaactgcttcgcgaacaagttctagcaggttgcaaactggctttatgtccagcgtgccctgttgaggctttaggggataacgtccattgggcgagaaccacagagcgttgcctttcatctgtccagggaagaaaccggcacttatatccttcacatagttggccagttggccaatgctttgttctaccaagtcagaatccttaacgattcccaccggtcgcacaaaggcatttgcatagctgacaggtgtctcttttatttctaccaatattccatcgggaaggttatgtgcggcaaagctgttctgctttccgctgggattagtgagtgcagcggcctggataaaggctccgacagtatgagctgccaacttttcattaccctggaggttgattatcaaggtattccaatcaattgagtaatatttgtagaaacaggccgaagcaaacatcgcctcgtctatgaatccagcacctgtgtcgtcgccaggctcgtcatcagctgctacatagtaatctatttctgggcgggcgatgtgggttgaaatggcgtgcgacacctgcagggctgcttcaacagtggtattttcccacttgaccttgtctgtgttcttgtccttggtatcgggctcgagcattcttccgcacagagcgatgtcaggggaatgtattgcccccgatattacatctgccgctttcttggctttctctgcaacactcaggccttcgctggtgacaatttgagcaagggcatcgatcttgttccgggtcatgaacaccagcatcttactatgtccgttttcgtgtttcaaaccggctttgttcagaacttcctctgcctgattcctgcagtcctgtcctgtagcttttgtaatcaactcggccaaccgacgggtacggatacccccgagcaagtttttgaattcatcgctcatcctgatgctccgctttaggcactggctggagatgcgggaccgcaacaccccaccgaaataacaggtcttgggcgcgcccaggtcgtcccggttcaggttggccgggctgtggttttggatcatgtgtatttcaatcaacatttgattcctccttgctgattattaaatgctgaaataaatgtgtctgaccatatcgctctgtttgattcccgttcccaagcggagaggtcatcgatgagggcaacccagtccagactggcaatgtcatgtctttttaaaatcgcgagcacttgcgccagcggttcctccagttggttcaactcgagcgtgagcaagcggtcgaacctggctaaaacacgtgggaactctttttcttctttaagtccacggcatattctgcccatgagccaaggcaggctggcgcctttcttttgctcaaagcggaattccgcgaaaagcttggtgactagccagaccaccttccgcctgggggttttggggcttatactgcggagtggccaccacaggccggaaaacaggtcgaaacccggcagggattcatccagacggcgacccctgagctttctgagcaagcccaggtcgccctctttgagttcgcccaggctccgaacaaatttcacggtgctctcattcattatcgcctccggatgaaggttttttaattgattttggttttaggggccagggcttgcgccgagccagttgttctcgttcaagcttggcggcaaccgtaatttccggcactagagaaacggcaaaacgcttcatgaagaatccgtaatcttcatccgcttcctgccagacattgccgctgttttccaccatctcgcccgaatggacgtcaacccgatgctctacgtgcgggatgatgtccgccacggcggtgattcccacggattccttgtaatcgccccggcggtcttgtttcctcatcctgtgcagggagtaggctctttcggatatctggtccagcagttcctcggagcttgtttttccggatagggcaatggtcttttcccaaacgtccacacatttggcttgaacgcttgtgaagcccactaaaaacagcgtggcggtccgagacatgcctttcgcccgtaagaagccgaccaggggtttatgccaatccctgttagcgaaagtgtatttgtccccggacatcagagccacctgggcagtcaggccattattgtcatcccggtaaatcgcgtgagggtcgttccagacaaggttcggaggcactttcaccgcctcattgttgcaggcatagaccagaggctcatgctcttctccgcaggcgctgcattttgctccgtctgacaccgggccaagcaggaataccttgcggggcagccaggtgaggccagtcagcaaggctacatccttctcgttttgggatccaaacgggttcagccaggcaggaacacccaaccgggaagtgggttcccaattcaggaatatcgattccgacagactatcaccctgccagatggcatagaagggaggagttctgttgatgccggctccgattccgctgccgcctacggtggtaaagagtggcaggcgcagcagaccggtaacgcagcaagctgggcaaatgccatcgatgaaatcggtcacatggcggaagtgccagaaattgtttgccgtgggaagctcgtggataaggtccgtgctggggcgtattctggatgttcctggggattggtagaatctggggccatcaccgaacaattcgaaatattcttggttttgttcaagccagtccgtccatgcctgaggcagtggcttatctgataccggcgcttgttttgtattggcaaaacaccaatagcccagggcgaggaggaaacggaaaacggacatgcggtccatcggattgccgtaagccaaacgcagtgtgtgtgcttttcgcaggacctcagccaggccgagcctggcagaatgcccgtcaagctgtagcacactgatccagggtttgtctgtcaaattataatacattgaagctcctgtcgcatggggagggttgatagcttgttgatcctttacagaggccgttccacaggctaacatcattatgccccatagctattatacaccaaatttaccaaggaataatttgtcaagtccaaaatagggctctaatttcaaacttccttaaggccggcaaggtcagattcacaaattcacaaccggtaaatatggcttgtgaatccgtgtgttattgtggcacagtgagttgggggacaaattcacaaaatacgcttatctcttatatccagccggaccaggggagaatgccggtttgcagtggctcatgccgcaaacaagagatgaagggaaggtagagatgatataatatcaatatataataatatataatactattatatattatatatactatttctatatgtattatagactggtagcgtggatacatcatatcctgtttacaatcggcttccgcggatgtataagagaccccttttttgtgaattagcctcataattacccgtctatcagcaggttgcaaattcacaagccatatttaccggttgtgaatttgtgaatttgccttccaacgttggtgagcctggagtgcagcgagcttgcgagtatggactacaggagatgttgctggcgtccatgctcgtgcctcgctcgacgccagcgtcaggaaggtcgatgtccccgtcggccaatcgttctgggaccttcgggctccaaacatatggattacttgcccgattgggaagtaagtcctttattttaggttatctaccacagttggtagcgtaactggaaaagcaattcgtatgaattcgcgcaatttgtggacttcctcccattttgatacccactatcaatagaagccccatttgccccatcccatacacatctaaaatacttcccgctgagttcccattggccgggcgggaatttaaggggaggtttacgggatgttagtgggaaggggcaaacggcctgtccgtgggcgaaaaaggctttgggaaaggaatccgcagttattgtggcagattcggaacgattcttgcatctactatatgcataatcataaattttattcccctgggaggatttgaacatggtgaaaaagcagatcgtactgttcgcggcggtgctgctcatcctttgcggatgctcgcggcgcaatcccgcctgggaggaccaggacgtcctcagcctgctcaagcaggtgcaggtggtcggcaatcccgtggacctgtcttttgacaacgagagcatttttgtggcccaggaccagggcggcatttccgtgatcgatgccacggattactctcagcattggtggacggatatctatccccccagcgcggacgccaccctggtgaacatccgcaatatctcggcagtcggcgagcacaaactgctcttcctgggcgagtatgtgagcgcggacaaaatccgtattgtcgattactccgatcccgattcgctcaggctgatagattccatcaccggcggcactgacggcctgcaatcgatttctttcagcgccattgaggcccctgtggatgacaatatcgtccagggctttttcggagccggacgcaacctgatgtacgttcgctacaacggcggactctatctgggcacagattacgtgatcaccactcccgccaccgcttcgggaatggacgccacggacaactacatctatgtggccgccgaacagcgcggattggtcatttacgaccgcgccaccaaagagaaggtgagcgaaatcgcgctccccggccaggccctgcaggtgaaggtcgcggggaattatgcctacgtcgccagccgccagggcggcctgaacgtggtgaacatcggtgcgcccgccgaacccttgctggtgcataccttcgacaccaccggctacgctaccagcatcgacattatgggcagtctggccgccgttagctcaggcagtggcggcatctacctctttgacatcagcaatcccagcagtcccatcctgaagcagaaccttcgatccgccggctacaccaacaacgccaaattcaacaagggaaaactggtcgtagcctcccgggaccagggtgtcctgatctatgccatcaaatgaacaaagtaaaagaaaacctttatgcaaaaaacgcaaccataacctggagcctcaactccaggtttttgatttgacgatacaaggatgatacaatgaaaaggatcctgtcactcaccatgttggcgctgctctgccttgccgctctgaacgccgaaacagcaagcccgttctcggtcgcgcggtctaccggcagccagcttaaactcgcggtttccgtgcccgccctcagcttttccgccggcgaagacggaggccaaagcgtccgggaaatccgcatggaaggcgcgcttggcacctgcgaacccggccagccggaacttcccgtgttcagcaccatggtggccatcccgccccggggcagcttcaccctttcctacagtcacggcggggtggaatacagccagcttgacgagcccaaaatatgcagggaaggctgggacggcgtggcggtcccttccggcgggcttttcccctccagcctggcaacggcctcagaacccgccatcctgcgtgatttccgcgtggttcagatcaacgtttatccctgccaatacgatcccgtcaccaggcgcctggccactttcagggatatcgaggtaaccttggatttcactgccgaacccggcctcaacgaactgcccgattatacgggctacagccaggctttcaggaagatatacgaggcccaaatcgccaatttcgccgattaccgcaatcttgagaccgcgccttcccacgcccgcatcctgctgatccacggcaacaacagcgaccctgtgttcctgaccaaactgaatgaatttgccacctggaaacgccaaaagggctatgccgtgaacgtggtgagcacctcccagaccggcggggccagcaccaccagcatcaagaactatatccaaagccagtacaacaatctggaaacccgcccggatttcattatcctgctgggcgataccagcggcaactacccgatcccggcctggtttgagtcctacagcggccgcaacggtgaaggcgattatccctatacccacctggccggcagcgacctcctgggcgacgcgttcatcggccgcatttccgtgcaggaccttacccagctcatcaccatcctgaacaaggtttacacctacgaaaagaacataaacaacgctcccgatgccgccgcctggctgaaccgcatgctgctcatcggcgaccgctcctactccggcatatccacggtttacaatagccagtacatccacgagatgagccatgaagtcaatcccgattacacttacatcgaaaactacaccggcggtttcccctccaccatcaacaacggcatcaaccagggcgtgagctttttcaactaccgcggctatatcaacatgagcggctggagccccagcaattccctaaataacggtccccggctgcctcacgccgtcatgctgacctgcggaaccggcagttatgcctcccaggaaaccacctctgaagccttcatccgtctgggcaccgaagccgttcccagaggcgccctcaccgccatcggcatggccaccatcgccaccaaaacgatgttgaacaacgccctcgcgaccggcattttcgacggcatattcctctacgggatgcgcagcatgggcgaggccctgctcaacggccgcctctatctgcacaacatgtacggccagaccaataccagccatgccaacagttctgcccactggtgcaacctgatgggcgatcccaccgtggaaaccttcattggcataccccaaagcctggtcatatcagccccggactccatcccccgcgggaccccttttgtggacatccaggtttccgatccatctttgacccccgtggaaggggtgagcgttaccatctataacgatggttatggcgatgtggtggccaagggtttcacggacgaaagcggaatggttaccctcctggtgcccaatttcgtgaccggcgacctgctgatcaccgcctccaaacacgatcacaagccttcccagcagaccctgctgatcgacgcggccggctctttggtctatctctccaaaaccatcgcggatgacggcagttccggctcctccggcaatggcgacagcttcatcaacgccggggagaccatcgccctgagcgtggagctccacaacaccaccaccgccgccatcgacggcatcaccggtgtgctcagcacggccgatcagttggtgaccgtcacccaggccaacagcgcctggcccgccatcacggcggaacagactgcccagaacagcgtccccttcctcatcagctttgaccggaacatccccgctttccacaattgccgcttcaccctggaactcaccgacagcgccgccaacagctatcaggtgttattctacctgggcggcttcaacgccgacctcagcgtgatcaaccacagcgtgagcgccggcggcgacaacgtgctggacccctccgaaaacggcatcctcaccctcgcggtgaaaaactcctccgtctttggcgtcaacgacatttacggtgaactcaccgccctcaacgacctggtggaggtaacggacaacctctcctatttcggcagcatcccggcaggcatgaatgcctcttccattgaaggctatggcctcttcgcccgacccctgctgatacccgggatgatgatcccattcaggctaaggctctacaatgccgacggattcgagcagacctcccacttttcactgcccatcggcacagtggcgcaaaacacgcccctgggtcccgacgaatacggctatttcatctacgacgtctcggacaccgcctatccggactgccccagctacgaatggattgagatagtgcccagcctcggaggcagcggcacccaaatcaccggactccacgaccctggcgtctccgacgacgaaggtgaccagaatgacagcgatgtcctcgagaccatcgacctgcctttcactttccgtttctacggagtggactatgaccaaatcacggtctgcgtgaacggtttcatcgcctttggcgtaaccaacgacggcgaattccgcaatggcaggatgcctggcggacagggcccctcgccgatggtcgcgcctttctgggacgacctcgtgatcctctccggaggcggaatctaccagtggttcgactccaacgaacacaggttcatcatccagtacaacaacctcaaaaacggctacaaccgcaccagcgaggaaaccttccaggtgatcttctacgatccgctttactatccctccagcctgggcgacggcatcatcaagatccagtacaaggtcttcaacaacgtggatatcggcagcagcggctatagccccacccacggcaaatacgccacggtgggcatccgcgaccacaccaacctccgcggcctggaatacacttttgccaaccagtatccgcctgccgcgcagccgcttgacaacggaaaggccctgctcatcaccacggtgcccgtgctgcatcaaaacgcctatctggtggtgggggaactcatccttaacgacgccaacggcaattcctggctggagccgggcgaaaccgccgagatcgggctcaagctgaacaacctcggcatcaacgccgccaccaacgtaaatattttcgtttccagccagagccagttcctcaccatcgccaatccccaaagcgcctgtcccgacatccccggcagcggccacgcttttaatgtggtgcctttcacggtcaccgcctcgcccgactgtactgatggcctcgtgatcccgctccagtttgtggtgagcatcgacggcaacgagtggacttatcccctcaacctcaccatcaggaagccgaccattgtggtcaacgacatctatatcagcgatctgcagggcaatgtgaacggactggccgatcccggcgaaaccttcaacctgatcgtgaactatctgaacaacggatttgtggacgcctacaacctcaccagcaacatcatgtgcctcagtgaagacgtcaccctggtgaattcggagcagctcatccccaccatccccgccggcggcatgagccaggccgtttacgaggtaagcctttcgcccaatgtggtcgtgggcaacaacctcactttctacctcacctatctgggcgaggcggtggatgcccagaacgatactgtcctgctcaatgtgggaaccacaggcatgtccgaggattttgaggacgacaacggcgcatttgaagcccagcccgccaccaacggctgggagtggggcacggattcgactgccggtgcccactccggaaccaaggtctggggcacccgcatcaaccagcagtattcgaacaacgcaaattggaccctcacttcgccgcccgtcttcatcggcagcaatttcgtgctggagttttaccacaagtttgacaccgagcagaactacgacggcggcaacgtgaagatttccaccaacaacggcgtgacctggaccctgctcactccggagaacggatacacccaccaaaacctgtccgcactcaatggtccgggatattccggcaacagcggcggctggacccaggcccgcttctccctggctgcctatcccaatcagaccgtgaggttccgctggacctttgcctcggacggctcggtccagaggcagggctggtatctggatgacgttcagaccacaggcttcatcccctttgccggcaaggtgagcggcacggtgcaaaccacacgcccggatgacgattattccaccctcttcgtgcaaaacgaccaggccatcagcatccgtccaaactccgcaggggcctacaccctctatctgccggagggcgagcacaacctgaccgcctccggccccggacaccagtcccagagcgtgtttcccgtgaatctgagcgtgagcgcccccagcttcacgcaggattatctgctcacctggttcgcgccggccacggatctggaatacagcgtggccaatgattcgctttcccttttctgggcggctccagccgctccgccttctccacagctaagctacaaggtcttccgcaagcagcattccggtccctttgaactggtggccatcgttacggatgtcgcctggggcgaaatcccggccattaacggcgaataccgctattacgtgctggcctgctacgacgccggggaaagcgtggccacgaatatcatcagcgtcgcctggccccctgtggatgcagacgatccgcacaccccgccgctgatctcgtgcctctaccaaaactatccgaaccccttcaaccccagcaccactgtcatgttcgacctcgcggaggcaaccccggtcaccctgtccgtttacaacgtgaagggccagcttgtgcgccgtctgctgcaggcccccctcggcgcaggcacccacaggatactctgggacggcaccgacgaatcacgccgccccgtatcctccggaatttacttcttccgcatcgaatccccagcgctcacagcctcgcgcaaggcggtgctgctgaagtgattctctccttatagagtggataaggccggagttttcgctccggccttttttggttctctttgaaggtgggtgggttgcgaacagcaccgaaagtgaggtgatgccctggagtccagcgaacgcagtgagcatggactacaggaagtgttgttgctgccgtcgatgctcgttcctcgttcgacgccagcgtgtggcttgctgactggccgttaaggctctatgctggatttgtgatacgcctcccgcacgatacccgtatttgatgcgagaatcatacgaaaggcgtggaagggggataaacgcaggggctcagggcctggctaaggggacattgcggcaggcaaaatgttccaccgccatccgggttttattctcttgtgtctgaaactgcctgtgtctgtcagtccatgtatttctggatgttggccttgcgcagttgctgctccatccagacgtcgaaccagttgtcaggaaggctggcggcaaaaacggcctggacctgggcctcgttcactatgaggctggcatcgcgggagacggaaatcacgcggggcagccagacgaagccatccatgataaaggcttcctggagcaggttttgctggtggcggcgaaggatgccgtggaatatgacggaagtgtgtttgccaagggcctgggaggcgggggagaggccttcaatgttgcggatggtggaattggcagggacggggtcctgtccggagattatcctttgggagatttgcagggcgagttgttcgcgtttgtcgtgagcaaggaaatccctgatatcagcttccacagaggacaggggaaggtggtcgtcgagtgcagcagcgttgagttccactataacccacttgctggtggaatctgaatagagggcgtcgaaaacatgaccggagggctgaccgggcaactgggcgcggatggcttccacgattcgggcatccggataccagaggctgtcgggattggccttgtgcactttatagcggggcaggtccatttcctcgcaagcggtggcgtggcctttcaggcgggcaagcttaaccgcgagttcggcttcgggacgcagggcttcgatcctggaagccgagggacggtagggcagccagagggaattgaagctgcacatactcttggtgcgtttttccaactggtggagcgtggtgccgctggcagtttgcagaggccgtccccaggcgccttcctccagttcgctgagttgcttgtaaacaatgggatcgagggatgcaacgctgagaaatccggagtttttgaaaaccaggctggcggcgaggggatggttgccctccaacagggcggagactggcgttccggcgctgagctcctgatagagggaatcggcgtagaggttagcgtggtggatgtcagtgcgggaaggcaggacctccacggtggcgcaggacaggctgacaaagggtttcaggaggtaatccgccagatttttctgataatgggcgcgcacttcatcctgcgaaacataggggtcgatgccggccagttccagcagggtgaattccacgtccgcgctgctctggaggatgccggtgatgagctggcgctcttttttgtccaaaagtttccggacgatgagttcctgcttcagcttcatgatgggcaccttccaatccaggaaatcctggcgcagtatggcgaggttttccggcgagtcgtaaagcagcgactggtggtatatcttggggtcgaagacgccatcggtcatgaagaggggggagctgaggatgtaggaggggatgtttttggagagggtgtccaccacttcggagggggtggcgctgattttgtatttggcgaaccattgcctgaggatcacgcccctggcggcgtctgtccaggtttgctgcttgatcagttccctttcttcgcgggagggggcgcggttgttgagccactgaaagttggcgtaatggccgcggtaggcatcgttgaaagattcagcggtgacgggctggccgttgatgcgtccggccaggttgccctgattggcgccgcagcaggccaacagcaaagccagcgccagcagtatggcgaagaggggggcgagcttggtcataatctgtcctgtaggtcttttagtttttgccaggcctcgatgggggtgaggctgtcgaggtcgaggtccttgatctcatccacgatggggtcgatttccgagactttatccgccagcacctcaaagagctctatctgggggctggtgcggttcagtttgcggcggatggaggcggtgaggccctggggcgatatttcgtggtcctcaaggttgcgcaggatttcccgggcacggcggataacgcggtccgggatgccagccagccgggccacctggatgccgtaactctggtcagcgccgccacgctcaatcttgcgcagaaagatcatctggtcattgtattccttcaccaccacattgtaattgcggatgtccggatagatgttttccagttccgtgagctcgtgatagtgggtggcgaagagggtgaggctgtgtttgtatttctggatgtattcgatgatggaccaggcgaggctgaggccgtcgaaagtggaggttccgcggccgatctcgtccagcaggatgagtgagttttcggttgcggtgtggaggatgtttgccgtttctatcatctccaccaaaaaggtgctctggccctgggcgaggttgtcggaagcgcccactcgggtgaaaacgcggtcgaaaatgggcatggaaagctgtttggccggcacgaaactgccgatctgggccatgatgaccagaagtcccacctgacgcagataggttgattttcccgccatgttcggtccggtgatgatggcgatggtggtatctgggtaatccagggaagtgtcgttgggaatgaattcctggtcctcgatgagctgttcgataactggatggcggccggcttcaatggtgagggtgcgctgctcggtgaaaacgggacagcagtagttgttttgccaagccagccaggccaggctgctcaacacgtctgtgagggcgagggtggcgctga

SEQ ID NO: 573 - DNA, 17032 bp, Artificial Sequence
  Synthetic Oligonucleotide
ggtgctcgaccccttgccccacgggtaaacgaacaccctgccggtcacggtccgccccgagcagtcgtgccggcggtcgatcacctcgccggtcctggcgtccaggccgccccataggctgatgggcctggccgagacaaccgcctcgccggcggccgatccggcgacgacggcgcgtccccgcatcgttcttttcttcggggccgtcccgctggttttgctcatcccggccgcctccgtatcactcgccccgccacggctgaacgcacgcaatcgcccacggacccgaacgccactttcacgcccagtgagcccggcgaatagtacgcgcacttgcccgagttggtcatcagcaccttggcgtcgcggcggatcatgggcgtgtggaatacgcacgtgtcccgcgtgatccgcgcgccgaaggcctcgaactccgccagccagttggtccgctcgaccagcgccagcgactgctggcaggtcagcagggcgacgtccaccccgtcggccgccctggcgggcgcaacctcgcggatcgcctcgaccagcgagcggaactcggcgaacgaaagatgcgggcagcccaggacaaccacgtcgagcttggcgccttgctcggccccggccaggtcgtcccaggatcggtaccagtcatcagggccgatgtccacgacgcgctcgggcttgcggtgctgcaaggccgcctcggcggtcggggcctcgggcgtcaggccgacggcatgaaagagcgccaccgaccccgccgacgccgcggccgcgccgaacgccttcaactgatcgtccgtcgcggcggcaggcatgccctcaatcacggggatcttctcgccgaccatcgcgccgatcaggtggccaagcacggggtaaaagacttcctccgccagcagggccggccagaaccccaccagccgcagcagccactgcccgcgtcggttttccgtcaggtgcaggccacactttggcactcggccggtgatggcggcgcagatgtccaggtagtccgcgtagcggttggtccgcgcgcctaaaacgctgttggcgtagcagatcgcgttggactcgccccatgcgatctgctggccgaaacgcggcgtgaggtagccctggtagggcgcacacgaccacgtggggacgcagcccatgtcggtgtaggcttttgcctggcggagggccttggcggcgaactgctcgtcggagacgaactgccgccagtcctggaggtccagcgggcccatgttgagggttgtcggcacgaggacctttccgccggcggcggcgagcttctcggcgaactccaggcccgcgtcgctcatgagcccgcagccgtcgatgtgcgcctgcgaaacgtccatcaactcgtccgcgccgtacacctcggccatgcgaacgatgatcgacatcgccatccggcacgcctggccgcaccggccgtcgagcatccgcctgtcgtcttcgctcagggcaatcgtcatacggttcttcccgcggccttcgcccgcgcctggccggcctgccgcgcgcggcgcaagcggccattttccccaattcccgcccgcctggcaagtgtttgtgggggccgctcttgttttgcatcgcggcgcggcgggcgtataatgtccgccttgttggctgagcctccgtgcaggtgggccttgctcgtatcgcaggcgctggcgggcatggtcagggctttgcccgctatgtgctgggagcttagagccaagaccatctttgggaccagagagcgaccatgacgacttcttcgttgcaggcgttgcaggatcgtttcggcaggaacgtggtctttcagatgaacgtgcgtctgaccgacggcggcgacaagctcggggaggtcatctcggccgtcaccgcggccggggcgcacatcgggcaggtcaacctcggcaaggttctcaaggcgtcgatgatctacgagatccgcgtctttgccgccggcgacgagcagatggccgccgtgggcaagtccgtcggcgcgatcgccggcatcgaggtcgtcgacgtgctggacctggcgatggagagccaccgcggcgggtcctgcgagatgcgaagccgcgtgcccataacctccaacaccgacctgcggatcgtctacacgcccggcgtggcgcgggtctgcaaggccatcgaggccgaccccgccaaggcgcgcgagctgaccaacatcgccaacaaggtcgccatcgtcaccgacggcacggccatactcggcctgggcgacatcggctgcctggccgggctgccggtaatggaaggcaagtcggcgatcttctgggagttcgcccgcatctcggccgagccgatcctgatcgacacccgcgaccccaaggagttcatcaacgtctgcgagcggattgcctgcacgtttggggccatccaggtcgaggacgtcgcggccccgcagtgcttcgagatcacccgcacgctcgacgagcgcctgccgataccggtcttccacgacgaccagcacggcacggccaccatagtcctggccgggctatacagcgcgcttcgcaagaccggcaggcgaatgaaggacatcacctgcgcgattgccggcgccggtgcggccgggaccgccattgccgacctgctcatgcgagccggcgtgccggacgtggtcctggccgactccaagggcatcgtccatcgcgggcgcaaggagggcatgaacagcgaaaaggccgccctggccgagcggaccaacccgcggaacatcaccggttcaatcgccgaggccatgaaggggcgggaactgttcatcggcgtgtccaggccgaacctggtcacgcgggacatggtccgctcgatggccaaggacccgatcgtctttgcgctggccaacccggtcagcgagatcagcgtcgccgacgcctacaaggccggcgcggccatcgccgccgacgggcggatgatgaacaacgcccttgcctacccgggcatattccgcggcgcgctggactcggccgcccggtcgatcaccatcgagatgatgatggcggcgtccgaggccctggcgaacatagtgcccgagggcgaactgcttcccgagatgatggaccccgccacgcaccaggccgtcgccgcggccgtgcgcggagcggtgtgaaagaagaaaaagaagaagaagcaaccacagagacacagagccgcggagagtaagagaagaatcaaccacagagtcacagagagtaacagaagaagcaagctgttgttgtttcttgccctctgtgcctctgtggtcaatgatcggacacttgctcaacggagcaacgaatgaaagcactgatcgtctacggcggctgggccgggcacgagcccgggccggtcagcgagatcatcgccaaggccctgcgggaccacgggtttgaggtgtcgctgtcggacacgctcgacagcttcaaccggctcgatgccctgctggagctggacctcatcgtgccgcactggacggccggaaagatcaccaacgagcagagccgcaacctccgcagcgccgtcgagcggggcgtcggcctggcgggctgtcacggcggtatgggcgacgccttccgcgacaaccccgactatcagttcatggtcggcgggcagtgggtggctcatccgggcgaccggctgacgtacacggttcacatcctggaccacgccgaccccatcacggcggacctcaagagcttcagcaccaccagcgagcagtactacatgcacgtggacccgtcgaaccacgtgctggcgacgaccacgttcgagtgcaacggctgcaccatgccggtcgtgtggaagcgcatgtggggcaagggacgggtcttctacagttcgctgggtcactgcgccaaggagttcgccagcgtgcccgaggtcctgactctgctggagcgcggcatggtctgggccgcccaaggccgggccgcggcgaggtgagttcatggacacgacgcaaacggcaacggcaaagctgtcgcggcacgacctggacattctccgccgcctgggccagcgcaaggcgcagatcgccgccgacggcgccaacgccgagcggcgggcggcgtggtacgcccacgacgcgggcgagccgtcggcccggcctatggtcctggcggagatcttcggcgtgcgagacccgcacccgcccgtcggcgacgccgacctccgctgccgcgacgaatgggcgcgccggatcgaacgctcgctgcttcagcagatataccagttcgacgtgctcaaggacgaccacgtcgtcgagccctggatacagaccaactggaaggtcacggtcagcgattacggcgtgcaggccgtcgtgcacacttccgacgccgacgtgacgctcggcgcgcggaactgggacccgcccatcaaggacatcgacgccgacttcgccaagctccatccgcggacgtacagcgtggaccgcgacgccaccgccgccgaggccgcccgcctcgccgaggtcttcaagggcgtcctgccggtcaggatccgcggcaagttctggtggtccatgggcctgacctggccggcgatagatctcatcggcctggaaaacctcatgctgctgatgtacgacaacccccagggcctgcacaggctcatgggcctgctccgcgacgaccacctggcgtacgcacagtggatcgagggccaggggctgctgacgctcgacaacgagaacgattacatcggctccggctcgatgggctacacgcgcgacctgccggccggcgattgccgccagggcggcccggtgcgcctcaaagatctgtgggtcctttccgagagccaggaaaccgtcggcgtcgggccggaactgttcgagcagttcatcttcccataccagctaagccttgtcgagcggttcggcaagtgctactacggctgctgcgagccggtgaacaaccgctggcacatcctcagccggctgcccaacctcgcccgcgtcagcgtctcgccctgggcggacgaggacttcatggccgaggcgtgcgggcagcgccgcgtctactcccgcaagcccaacccgacgcagatatctaccgggcggttcgacgaggccgccatccgggccgacctgcgccgcacgctggaggccaccggccgacatgcctgccggacggagatcatcatgaaggacgtccacaccctccacgacgagcccggccggctcgcacgctgggtcgcgctggcaaggcaggagatcgaccgctggggcgccggcgcagccagagtgtagagagtagaaagtagagagtagaaagtagaaagtagagaggagagaggagagaggagaaaagcagagaggagagaggagagaggagacctgccggcaatcggtccccaggagaaatccttattgtcgatcggatcggcccgtctgcgggtgccatggttcggcgtgctacgagcatgcgtcgcgttccaccatctcgcacaggacgtggtagatcacctgatgggcctgctgtattgccggggtgtgtgtttccggcacggcaagcaggacgtcggcaagcgcggcgcacgccccgccgcccgccccggtgagtgcgattgtaaccatgccgagctcgcgcgcctttcgaagtccggccacgacgttgggcgagttgcccgacgtgctgatggcgatcgccacgtccccggcccggccgagggcctcgatctgccgcgcgaagacagcctcgtagccgtagtcgttggcaaggctcgtgagcaccgcggcgtcggcggtaagcgccacggcgcgcagggcccgccgctccttcaggaaccggccgacaagctcgccggcgacgtgttgtgcgtcggccgcggacccgccgttgccgaacagcagcacgccgccgccgccgcggcagctctcgactatcagttcgacggccttggcgatccgcccggcaagggcgcgccccgcgtcctgaatggtccgggcggcggcgtcgaaacggtcacgaatctcgtcgtctgtcatctgagacgatctcctttcgcaggcgcaggagctccctgaacgccctgaggatcacgctgagtttcgcccccgtctgccggccggcaacgcggggacggtggctgacgggcacttccgccagcgtaaagcccgcgcgcacggcgcgggcgagaatctccgcgtcgatcagcgcgccggtggacttcatgtcgatgcggtcgaatatctcccggcgatagagcttgaacgcgctgtcgacgtcccggcagcggacgctcagcagccgcgtcacgagccggctccacagccaggcgttgagccggcggatcaggctgtcccgccggtgccggcggaagccgctgacgatgtcgtaacgcccaatcaggtccagcagcgcgggcagctcggctatgtcgaactggccgtcgccgtcggtgtagaagaccagctccttcgtcgccgcgcgaaacccgctgacaagggccgcgccgtaaccgcggttgaccgggtgatgcacgccacggatccgcgggtccccggcggcgagatcgtcaatgatcgccccggtgcggtcccggctgccgtcgtcgacgaggattacctcaaaatcgtcgctgacggtcggcagaaatgccatcgcctcgccgaccacgcggcggacgttgtcctgctcgttgtagcacgggtagaagacgctcagtgcgtacttccgccgcggcgatttgtcctctgccgtcacgcggtttctccggggccggtgcgggccttcgggcccttctcgcccagccagaataccaacccgggcaccgagagcaacatcggagtcagccgcgccagaagcgccaaggcaagcacggccgaagagtccgcgccgcccgcgaagaacaggacgtacatgccctccacaagccccagcccgccgatgctgacgggaatggccgcgagaatgtaaattaccggcacgaataggaagtagagcgatatgccggccggcaggtccagggccaggcccaggcaggcgactccgccggccagcagaagatgcacgccgagcgtcatagccccgacgacggcggcgtccctcgggcagcgcggcaggcgctgaagcgtggcaacggccaggcggaagttctccgccttcggcaggcgggctatgaggcgatccagccccgccagccgcccgacgcgccggctgaagagcaccagtccggcggcaatgatgaccgcaagggtcgccagtatcgccccggcagccctgtgggtctgtgggctccgccaggtcgccagcgccatcaccccggccagcgcggacatgcccgccaggccgacgaaacggtcaagcaggaccgtcgccaccgccaccgttcgcgcggtggtccggcgggtgaccaggtacgcgcggatcacgtcgccgccggtggcgccgggcaaaaagaagttgaagaagtgcccgacgtacatcagccggatcgtggcccagaggcccacgcccagcgactcgcggcgcatcaggtaccaccagcggacgcccatgagggtgagctgaccggcaaggatgaccgcggcgagtatgtaaaagcccgggcgaagccgacccagcacccgcgacatgccggggtgaaccacctgcccgccggtgtcgcggaactccgccgtcctgtccgcggagaaccaggccgcctcccggcccggcaaggccacgagaatctgcccgccgcgctgctcaagcacgcgcagggaccgcccgtcgcggtcgagaacataatcgtgccacgacacgccggacgccacccaccagaccagcccggccgtaacggccagcttggccaaaaacgccgccgctttgccaacacgcataaccaccgtcggaatctcccgggctccaaaggcccatcatccttatatcggcacttggggagattcgccgtacaggtctccaagagcatacatgaaagccgtggcatgggcgtcccgcccatgagtggcatgggcgtctcggccatgagtggcatgggcgtcccgcccatgagtggcatgggcgtcccgcccgtggcatccctggacacccgcgatccccttcgtcaacgcgccgcgggcgcaagcaggttgcgggcgtgggcgatggtggcgtcggtggcgcgcgtgccggccatcatctcggccagttcccggacgcgatcctcgccggtgagcactcggaccttggcgatggtctggcgggcgccgtcggcctcgacgacttccttgcggatctggaggtggtggtcggcgcaggcggcgatctgggacaggtgggttatgcagatgatctggcatgagcagtcttgctgatcggcctgggcgggcgaggcgccgccggcctgtgtcgcgccgccggcgggcgaggcgccctcggctcgcggcccggccttgccgtgcgcgccgcattcggcgccgggactttcagcctgccgccgccccgcgatcttccgccggccctcggcctgccgcttgtggcctgggcgctggccgtgagcgagggcacgcatcttccggccgatggtcgcgccgaggcggtcgcctatgttcgcgtcgatctcgtcgaagaccagcacgctcacttggtccttgtcggcgagaatcgtcttgagggccagcatgatccgcgagatctccccgccgctggcgatcttgcgaagcgggagcgtctcctggccggggttcgtgcggacgaggaactccatctcgtccaggcccgtcgagtcgatggccgggtcgtcgggggcgcgagaagccaggctgacctcgaacgtcgcctcgtgcatctccaggtcgcggaactgggcctcgacgagcggctttagcctcgcggccgccttgcggcgaagggcgcttaggcgctggcccgtcgcggccagggcctcgcccagattggcgatccggcggtcgagctcgccgagggcctgggcgtcggcgtcgagccgctcgacctccagggcggtctggcggcggtagtccagcacggcggccacggcatcgccgcccggctcggccgagcgggcgtacttgtggatcatcttgttgagcacgtccagccgctcctcgacggcggccaactccgacggatccgcctccagcgactcctggtatcggtccagcgcgcgggccgcgtcgccaagcagttcgcccgcctgctcgatctgagccgagaggttggtcaggcccgcgtccgtccgcaccagttcctggccgcagcgccgaaccgcgccgagacgatccagcaccgtgtcgtcgccgtcgcgaagggcgccgagcatctgggccgagaggtcctgaaggtgcgcggcgttgcgcagcacgttgtagcggtcgcggacccgctcgtactggccgacgcgcagaccggcggagtcgatctcctcgatctggaagcggtagagctccagcgcctcgagccgcttgtcctcggactggcgcagctcggccaggcggcgctggcagtcgcgaagctcgcccagcgtctgggcgaactggcgccgcgtgtcggccgcgtcggcgaaggagtcgaggatggcgacctggttggccggcttgagcaggaactgctggtcgtgctggccgtgaatgtccacgagcaactggcccgcctggcggagcatgccggccgtcgcgggcaggccgttgaccgacacgctcgaccgcccgcccgacgagacccggcgggtgatgagtatcggctcgccggcggacaggggctgatcgaggatctcccccagccgccgggccaggtcgccgccggcaacctcgaatagcccgctgacgcgggcctcggaacatcccggccggacgaacgtcgcggcgtcctgcccgccgtcgcgaaggcccagcagaagctccagcgcgcccaggatgaggctcttgcccgcgccggtctggcccgtaaagacgttcagcccgccgcccaggtcgatgtcgatgttctcgatgatcgccagattcgatatgtgcagttctcgaagcatgactacatgttcggtatttgtacgggaaagtcaacaggaaaaacgcttgtggtcaagaaagtcctggggcctgggattggcctggaattggcggccggcggcatgagcgaatcccggcagcgccactcctgggaacgccaatctcctgattggcgccgcctggcggtgtgaagaaagaagaaggccgatcgggagattggcgttcccggccctttcccggcccacgcgctcccggcggcacagttggcgttctggccggcgttctcggcaatcgcttcgccgtgggccaggatcgattacactgcttggatatatacttcacattattgccggcgtcaagtaaaatcctggatattcgtggaccggggtattcgggctgcacggtgtcccgcgtggcccgcggcatgcgccgccagcttgtccggagagcgaaacgcaaacgccgccccagaaagctcctggtcgagaccgggctcggcaatggatcgtacaagcggttcttgaaaggaaagcacgcatgaacttcaacctcctggaagaagggttcatccccgtcttatggtctgacggcaaagtggggcgggtgggaatacggcgtgctttggcggaggcaggcggcattcgccaaatcgcggcatcaaatccgatggataacgtcgcactgctgcggttcctgctggcggtgctttactggtgccaaggcccgccgccgagtcagggcgagaaggacaaaatcctcgctggagccggatttccgccaggttggttcggcaaacttgaccagcagaaggactgtttcaacttgcttggggagggaaagcggttttatcaggacaagaccgccaagcggtgcaggccaacaacggaactgctccaggaacttccgaccggcaacaacttccgacacttccggaggtcggacaatccacgggacggactgtgtcccgcttgttgtgcgttaggcctcatgaggcttcctctattctctgtcagcggattgccggacttgaaagcgggcataaacggaaccccgccaatctacgtcattccacttggagagacgttgctcggcacactctgcctaaactggacccgccgggaatcgctcggaagccccacgtgggagtgttcccaggagcacaccgcacccgacgcggcgatccctcttctggccgggcttacggcactggccaggcgcgtctggcttcacgagccgaccgaaccgggcccgtgcagtggatgcggcagccagcagcaatcgctaatacgaacgtgcgaattccaaagtgcaggagcgaagcagagcaagtcctgggatgaccctcacgtcgtttacgtgcagaaggcgaattcgacgggcgacgtggaaaggcgttccatgaccgctcccgatctgacaaagtcttccttccgccttgacaggccctgggccacattgatggcggcactcctgtcatcggacaaacatcggtgcgtttccggcacgacgaggttaatggtagtcgggtttgccaccgaccaggcgaagaacatagacgtatgggaacgcatttgcactctgccaccttgcgcatcaggtcaatcttccgatcctgcgggcgaagcgatcacaatctggaacgagcaaggcagaaagattccgtggcgaatgaagccgaagaactcggagtctgacggttcccaattcgttagcgccgttgccagcatccgtccgcacgtggaggcccgcgtctcatccaatttggcggacctcctttcccagccggaaaaagcctggccgaaagccgtcgatgaatatcggcaaattctgcccgccgtcgctgggtcgctcgcgccggggttcacggttaaggcgacaaggaggcgaggcgagatcgcgcgtgctttgccggatatgacgccaaaggcccatgccgagccgaagaagcccaaaacaaagaagggggccacgaaatgaatcccacacccaccgaggaattcattcgcacgctgcaagccctaaagcccggcgacctcggccggctgcggaatctgaccgatcttgctctagacgaatcggtggacgggttcgacctgttcgccgggctctggtggccgctcaggcagaagaaccagaaagccccccgtcggcaagtcgcctggctcatcgccaagttgtatgccttccggcctctggctcaaaccagcggggcaacgctcgcgcttctgcttggcggagtacatattcacatccaggataagcaaacgaaaggccgccaccagcagcgattcgatgaattgctactgcttccgctagctcaaatcgaaccggccttgcgatggggcctgacgcagattgcggacaacggcaaagggctggattgggtccggctcaccgatgatctgtccatatgggaacgggaacagacacgcctgaaatggtccggggaattcctgggccttatctgatcaaaaccgtaccagaaggagaacaccatgctgatcgagattcatgccattcagaaccacagcccggccaacctcaaccgcgacgacctgggcgcgccgaagacctgctacttcggcggagtaatgcgatcccgcatttccagccagtgcctcaagcggagcatccgcaccagcgagcaattcaagctgctctgcgggggaatacgcaccaggcagcttgccagactaatcgcggaaagcgtgaccggcaaggccgatgtcaagaaacgcgccgcgaagatactcgacaagtgcgggatcaaatccaaggacgacaagaagagcgacatgctcgtctataccacgcatgaggcgatcggcgccatagccaagctcctgtcggaaaacgacgacccgaccgatcaacttgccgagcaatgcgggaagctcatatcgcaactcgtcgccgttcccgatatggcgctcagcggcagaatgcttgaaaccggcgttctggccgaaaccacagtcgatgcgtccttgcaggttgcccatgcaatctcgacccacgaggcccgcccggaagtcgattactacgtcgccgcggacgatatacccggtgacgatgccggcgccggctttgtggatgaggccatgttcgcttccgcctgcttctacaagtacttctcgatccactgggaacagttgctggagaacctccacggattccagggcaacaaagagcacctggccgcccacaccgtcggcgcattcctccgcggcgcggccctgaccactcccaccggcaagcagaacagtttcgccgcccacaacccgccggaaggaatgctcgtcgaaatcaggcagaaccccatcagctacgccaacgccttcgccaacccagtgccgtgtaaaggtccacgagacatggtccgagagagcatcgccggactcggacaatacgtccacgacctggacattggctatggcaagcccgacagtcggttctggttctcccccaatctgcggcacgccttgaaggccacggaagacaagaaggagatcgccctgaccaacaacaatctcaagtcccttgacgaacttgtcgtcgcggtcgtgcgggctatcgggttcgattgggccgaggtgcagaccgtcacaatgaagtaaggaggtcgcgacgatgaacgcaaatactctcctgcttcggctcgaagggccgctgcaatcctggggcggccacgagtcgaagttcgtcattcgaaggaccgctgacgcgcccaccaagtccgggattgttggcctgctttgcgccgcgatgggaatctcccggacggatgcccggcaaaggcttgctgccctcaatgccctgctaatgggcgtccgcgtcgatcgtcccggcgttcgatggtgggactaccataccgtcggagcgcgcatggaaatgcccaccgccgagggcaagaccaagcccggcgccatgctcacccgccgggaatacctctgcgacgccagtttccttgtcgcacttcagggcgatcccggcttgctgcgagacgcaaaagaaaagctggtctaccctaaatggccgatgtttctcggccgaagaagctgcccgccgtcgctgccgcttgtcgggcgcatagacgaaccggacacgggcgatttcccggaccttacgtccgcactgcgctctgtcccctggcgcccgcgacttgccggcgacgagcggcccgagtttctcgaatgcgttctggaatggcggccctccgccgacgagcccgaagccccggccgtcgccgaagtctggtacgacgtggcccagtccttcgacgttccggggcaccacccgcggttcgttgtccggacccagttgaccgtcggcgacggtaaggatattgccattcaccccaaaccgcgccaaacccgcactcccgcgccgccgcgcccgcgagcggattacggtaacagcgagtataggaagcgccgccaagaacgcctcgattccgaccacggcttgtgcgtcttctgcaaggccccggccggtaccgttcagcacatcacctaccgccgcgccggcgggggtgaaacaccagaggacctgcgcgcgctttgccgcctctgccacgacgcagtgacgatgatcgagtacggcctgggcatgggcctggaccgcatcaacccggaattgcccgagtggcgggacaagatcatcgccaagcgtgatgagatcgtcgccttccgctccatggagacccgccgtcggcggcttgcgcccgaggaggtcgagtaatgtttatctcaacgctactcatcaatgttggcgataaccccgatcgcccacgccccggccggctgtggctccgcaatctctaccgcgtccatcaacgcctctgcatggcgtttccagacaaggacagggatcgcaagcaacgtgaccccgaaatgcttcaaccctacaacccagacgatttcggggacggccaggtccatgttccgcgacacaacaacgccggcttcctgttccgcgtcgatcctcagcccggcggaatggctgtcattctggttctgtcagcaatcgagcccgactgggactacgccttcggactcaagccgggattacttgacgaccgcgggcggcctgtcggcaacgccgggcatctgctggccgggccgccggaaaagccccggcccctgaaactgaccatcgagtccggcaaacggttccgattccggctccgggcaaacccaaccatgaaggtccacaagctgcacgcgagctcgcgccgcacaacgccgctgacaaagaacgggcggcgcgtgccggttcctgctaccaaggagggccttctcggctggctttgcaagcagggcgcccgcacaggcttccgtgtcgaaggcgaaccgctgatccaacccgggtacgtatatgtcagcaaggacggcaagccgggtcaagggcatcgccttcgctccgtgatttacgaaggcattctcgaagtcacggactccgacgcattcgccaaggcccttgccgccggcatcggcccggccaagggctacggcttcggcctgctttccgtcgcgcccctgcgcgactgagtgaacccgcccggcgatgaggccgcggcgcgttctttgacaagtaaacagggtgcaggaaggttcaaactcaacacgccggccccaaatgccgataacagcaacgggaaatgggtggcctatgcagaaccttcaggaattgccgcgtttcggcgacaagctcagctacctctacgtcgagcatgccgtcatcgaccagcacgagaaatccatcgccgtccaccgtgccgaccaggtgacgcccgtcccggccgcggcgctggccctgcttatcctcggacccggcaccaccatcacccacgccgcagtcaaggccctggccgatgacaactgccaggtcgtctgggttggcgagcacgccgtcaggttctatgcccacggcctgggcgggtcgcgccacagccgaaacctcctgcgccaggcacgactggtcagcaacgacgtcacccgcctccaggtcgtcatccgaatgtacgcctttagattcaccgaacgcctcgaccccggcctgacgctccagcagatcaggggaaaggaaggcatccgagtccgccaggcatacgccgaggcttcacgcgaaaccggcgttgtctgggccgggcgaaattaccagcggaacgagtggtccgccgccgaccccgtcaaccgggccctctcgtccgctaacgcctgcctctacggcctcgtccacgccgccatcatttccggcggctacagccccgcgatgggattcgtccataccggcaagcagttgtcattcgtttacgacgtggccgacctctacaaggccgacctgaccatcccgctggccttccgcgcagttgcggccgggacaaccgatatcgaacggaacgtccgaatcgcctgccgagaggcattccgcaccggccgactcatcgagcaaatcctgccggacatcgaggaagtcctgaaagtcccggacgccggcgaggacgagttcgccgacgaccccgccaagccgggcgaatactggacgcccaggtgcctcaccgaggacatgcccatcagccgggtgctcaaactggaccccgacaccctgccaaagcgcaaaggaacaactcgccatgatagtgatgatagtggaacgggcgacaccgtctctgcggggtgaactgacccgatggctcatccagcccaagacgggcgtcttcatcggccgcctgcccgcccgcgtccgcgacctgctttggcagcgggtccaaaaagccctggcaaaacgcggcgccgccgtgatggcctactccagcaacaccgaacaggggtttaccctacaaacgctcggccggaccagcaaactcgtcgaagacttcgatggcctttttcttgcttcaacgcgcgcaagtccttaaaatacgttcaacttgccagtgtcttccccacgcacgtgggggtgaaccgtccacgacgtaggaagaagaaggaagaaggtcgtcttccccacgcacgtgggggtgaaccagggagtactcggcatgaatcccgccggctaccgtct

SEQ ID NO: 574 - DNA, 16933 bp, Artificial Sequence
  Synthetic Oligonucleotide
atatttttgaactttgaatctatcggctccctgaaagcttgccgcccgtgcgataaaagatataaaaagccaagtacgttttgcttaaacagtacacctcccggaccaatccttgaaagatggctgtgtcttacccttcactcatgggaacagcctcgttacaaatcctgcagaaaaggattcaattcgcgctcttcgcccagtgtggtcgaaggaccgtggcctgggaagaccggcgtttcatccgcaaaacacaacagcttactgcggatggaggcgaggatttggtgataatccccaccccagagatcggtccggccaatactgcctttgaagagtgtgtctccgctgaaaattttctgcccttctccagatgaaagcaatgagatgctgccaggggaatgacccggcgtcgagagtacctccagggaagatgatcctactcgcagtacatctccctcctttaaaaagtcttttaattgcactgtgccgggcaactcgacgcccaaccaggcggcctgagccgcgagattctggtagagaggaaggtctgccgcatgcatcaggactggcgcacccgttgcttcctgaagcttctgaaggccacccacgtgatcgatgtgggcatgagtggccacaatgtatttcacttgaagctggtgctgctgaaggatcgcgcggacgcgatcaatttcatctcccggatcaatgacaatagcctcgtgagtggcctcgtcacccagaatcgagcaattgcaagccagcataccaacaggaagaatgtggtgaatcatcaagaatacctgtctttacaaaaagacttctttcgcccgagctgaaacagaatcagagatccctggggatgctatggtccgctgcccgggcggaaatgcccccactattttatttccaacgaacgatcactgcggcaaagaatccgtccatccggccgccgcctggccaagtataaaaatagcctgaatccctgaaaagcggggacagatggggaaactcttgtcctaattctgtagcactgagcgcacggaacccttgagatttacccaccacactggaaacgacatcttcattttcttccggttcaagcgaacacgtcgaataaaccaaccttccacttaaggcgagagccgcaagtccctgctgtaagattgagcgttgtatcgcggcaagccggggaatatcctccggttggagtcgccacttgatttcaggattgcgtgccagcgtgccggtacctgaacaagggacgtcaacaagaattcggtcaaaggttggggtgagtggaagaggttgggcagcgtcgagcagcacccgatgtaattgaacgccttccggccaccggcgtgaaagagttttccgaagcgcgcgcattcgccgcaggctgcggtcgcaggccacaatagaaccctgacccatctcatcggctatttgccaggttttgattccgggagcggcgcaaaggtccaaggcccggtttcctcgttgcggagccaggagttcagggaccagttgcgacgcttcgtcctgaattaccacgcgaccttcacgccaggctcgggttttgatgaccctaccggattccacccacaatgcccgcttcccgaagtttccaaggtgcgtctggatgtgatcagccagaagttcatcacgcattttttgccggtcagagcagggacccgtaacgcgaaggtgggtgagcgggatcgcctggctagccgtaatcaaggcacgtgcggcttcactgccgaagtttttctcccagcgcttatgaagccaagcaggaatcgagcggcgtgcgctttcaagatattcctcattcgcagcgtcgggcgggtcacttgcgttgaaggatgctttctcgcatcgccgcaatactgcattgaccaaccccgcggccgacttcttgcgggcagctttcactaattcgaccgattcattcactgcagcggagcggggaatggaactcaaaagacggatttggtatacacccatacggagcgcctcaagaacttcgcggtcaaagtattggatcggttttccagagagtttctcgatcgtgaaatcgagatcacctcgccagcggaggactcccatgaccagatctgtaaccaacctccggtctacttcttttagacgcgaaatggccggtcggtgcaacaagtccactgcgtaatttcgcttttcatccaactgacaaagaatctggaaagcggctagacgagcggatgagatgggcatgtagggtgtggtctatcgtacggataacagaaattccccgcgcctcataaaagactccagcaagggatctgtaaggggccgagggcggagattaggactatttacctttaaataactacgaaattgtggtatgagtaaaaggccgaattgcagacaacccgactcggatcaacaaaaattataggggctgtctccaatgggatcgcgtttggcgcgaatttgactcacttcgtgaaaggagaattatcatgaatcagactcacaattctgtagaagcttccatccgcaaggccttcgagctcctcattcaaattcgagggcatcggcaagctgaccgtctgctggctcttgccaacggttacctgcgcacgctcttgcattccacccccgagagcaccccgatcatggtttccatccgcgcggtcaggatccgcgagccttaagcacgcgagcggctgcggattacagactcattcagcctgaatcgcgggggcgccgctcgcaacttctgacggttgggctctttcggccttcaattgggcaacctggcgctgaagctcagacgccagatcctccagaatgcgtagttgctccgagcggcgctcaatggcgctttccagccgcgctatttgctggcggagccgggcattttcccgttgcagcatttgggaaccggtgtcgggaagtcctcgcttcacaccggcattccgcacgcgcgcttcgggcgcaccggcaacccgctcctgaatctgccggataacagcatccacctccttgcgttcggccccgggagggcagatgctgcgcaagagaaggagccgcgccaaatcaggctggttgcgcccacgttcccaatgttgaatagcccctttggtggcgttcaatcgccgcgataaaccttcctggctaaggcccaggcgctgccgtacccggcggattactttcggaatgtcaagcgttgtggccataaaattcctcccatgcgaaatagtacttgacaagagctatggtactaggctagactttgaaatgttcccgcttccatagctgtcgtctgatcttcagaagtcggctggaagaagagaacgacgctttttccgcaggttttgaacgctccacgagtataccagcggggcggcctcctgcggcgcgccttgtgacttgccatgccttgtgcatggctttttctggtatatgttagttactctttgtataataatcacgaatataacgccttcaaagagcactggttgcgtggtcccttgccactcaggaatgtggcttggtgcgccgataactgcacggcatggttcattgttcattcttctctcaattcgggcacaaaatatcgttagacaaacggctcgcaagctacaccgattcctgtttatagattacaggcccccgctcatctgctggaggatgttcaagagttcattctgttctcgagcctgccgatctttcaggcgcctcctcagcaagaacttccagagggtcaaagctgccgcatggagattccgccttcgatcacagctagcctacatcacaagacctctcgggtcaagagaggatttatttctagcctacactagggtgggtaccggctggcagccatgccgctgcaagggcttgttttcaaggcaaagtgaacgctgctcgcagcgcttgatctcgtgctcgcccctctcaagagttcgccttataagaaatcaagaagggcagcttcaatctttgaatcatatcccctcgcgcactcttagtttcagatcccctcgcaaattcaaaacatggatcagccgctgtgcggagaggagattagacgatgcaacctgtcactcatgcccccggcatgttgaatcaatccgggatgttaaaaacaaccacccacccgatccccgcgtcactcgtccttgcgccacccggggaactccggtggaagccctccaacccgggagaggcggaaatagccgtcccacttccctcaaatccgcgatgcgcagaaaggggctgcgtttttcccgctgctcctgatacggcagggatgtgccttcatcattaccggcaaatccaggaaccgatcctatttgcctctcaccaacccacacgagcagttgtggaacgcgggaggtttggcatcccagagcatgaagttgacacatcccgactgagagaccgccgtcggctggcagccttgcgggaggcttttttggaagatgaatttactcgttaagcgagccctgtgaactgaggtgaaagatggcagcacctttacaatcctggacacaaaatgtcacttctccctctgctgggaggacgactggcgggagcagccacgcccccttgctcacagcttccagcgcatggcttgctcttcagggtcgaaccgggatcccgattggccgcgccacattctatcgatggcttagcaacggaaaaatcttctccgttcggattgggaccaagatgtatattccactttccgtgatcgaggagattgtccggcgctgccagtcgggcgacggactatagtgtctgcttcttgctcgttcctttgaagctaagtttaacgcgtcagcagatgttcaagagctgattgcaattccggaaatcggaatgggtagccggaggctttcagacgggcagggtcagcgcgctggctggccagaagcacttcatcggccatttccccaaaggcaagtcgcgtcgcaaacgccggcattctcagcaaggtgggacgcttcagaatcctgcccagcgtctcaatgaattcgctgtttcttaccggatggggagaagccagaatcaccgggccgctcagttcagtgttagcgaggcaatgctgaatggctccgatagcatcatccagcgcaatccaactcatgtattgccttccgcttccaatccgcccacccaatccttttcggaaaaccggaagcattcgagcgagcgctccaccttccgcgcttaacaccatactatttctcagaatgacggtgcgaatacctttttcagcggctggcgctgcggcttcttcccattcgcggcagacttgcgctaaaaatcccgacccggccggcgtttcttcccgcagaatctcatctccacgattcccgtaatatccaattgcagacgcgcttaccagtgtcttcggaggatttgaaagcctggtgagagactcacagagcaatcgggttcctgccacgcgactttcccggattctggccttttgttccggggtccatcgacgcgcggcgatattttcacctgcaagatgaattacggcatcaatttcctggtcagaaagcgcaggaggaaggttagactcgggatcccacaggatggcgtcgtgagccacgtgggttctcgaacgtaccaggcgaacggtctgatgcccggcggctgtaagctctctgagtagcgctgagccaatcagtccgcttgaccctgtgatgaggactcgcatggaaccccgaaatgagggtgttatagcgtcatcatagcacaggcctggcaatggaattttaccttgcgctacctcagaacaaatggacgcggttggcaaggagaacgtatgaattggggggtatctggacaccgtttatcgatccgccgctttggtcaaaaaacagaagaccccgaacttgcaactggggggaagggatgaggccggcaagcccattcacattaataaattgggtttgcggattagtgatgacgtaaatattctgcccctgaaaaagcgtaaaacatgggatgaaacggaaggcaccgctcacgttatcagctcctgccgtgaggagggaagagaagttacccgaaaccgtttgaagcggaatgtaaatattactggcgtcaacggttgaagggggtgttgttgccggaggagtcgctgccaccggagcggtatatgttccatgcaccacaagttgctggccgacatttagaaatgttgaatccggggtaaggtttggaaaattaacggccggagcggaaaaatggaagccggttgaagtggagacgttgacgatgacgggcggggtatccagggggactgagttcccggttccggcagaggtattcggttcctgatcgtgaacatagagctgaaattgggtgagatttcccgaagaatctttagtgacagagatcacatagcccagaaaagctgttcggtcgttatcaagatcggtttgatcttcgattaccacggtattggcaataaaatttccctgagaatccacgtaaccattgatttccacaaagttcccggtcgtaatctgattaagcgccgcggcgccgatcagttgagagttcttagtcagattgacggtgatagcggggccagcgccttccagggatgaagtgacgttaaatcccggcaaagtttggaccacgaaactgccaataaaatttgagttagtgcttgtgttattgacgctgaggatgtagccatggaaatcatccagagtaccaaatccctgcccccctgaagctgtcagcgtcgtggcattcaccaccggcgttaccttgacggtcagggatcctggagacccggtgacattcacctggccctgagtcgtcaactcaattgattgaggcaggttgaaatcgatgttcatggcggcggcctgacaaggcgtcgtggaggtggacgagcaggccttgatcaccagtggcggattgatcgtaaagttaacgttttccgaactgagggttggagtgattacgtcaatggggggattcacagcagggtcgaaaagcgccatgctggaagcgctgaactgaacctggcctccagtataagttcccggagagacggagacgacatcggcgagggcggcggtgtcctttagagctgcaaagtccaggggaatgaaggtattggccgccagaacggaaacagaaccaccccctccctgtggagtcagcgtcagtgaagcaatatttgttcggaaagagaggaggttacacagcggaacgtcaccggcaaaaatgatcagagtccctttctcgttgcttgtggatgcagggtttgagctgcacccttctgttccaaaagcgagagctgttaggatcaagccccaaaggagtaagtgtctaaacattctcctcctcacgaaatcattcggtgaacgcttttctgcgctcagccgccgcttcttccggcgcggcttgctgcctcattgcgagtcggggtccatcaacgctagtgcaaaatggatttagcgggtgcgtaagcttgatgcaataagcttgcttctgctacagctttctcttgacgtccccttcgttcccttgcctgaacgtgaactttatgagattcgacaaaacacttaaaaaaattcagaataacacacgttttttcagcgatgccagcttttcgatcacgcttgaaaatatcattcctctcctgtacactcacagcatcagtcatttcaaaaatcatcaactttgacaaattcagaccgccttgggacctagaggaaagggtagggtcgctatggccagtggaaaaatttttattaattatcgccgggatgacagccgggcagattcaggccgattgtatgatcgcctcaaggctcgttatccgaatcatgtctttcgcgatattgggtcccttgaaccgggtgtcgagtggcaggaagctatcgagaaggtgttgggttcaagcgatgcagtcgtggtggtgatcggcaaaagctggctgacggtgacgaattcggcgggcacccgacgacttgacgacccgaaggatacggttcgtcaggagatcttgactgctctccggcgaggcgtgcgggtgtttccagtgctggtgggtggagcccgcatgccgtcggaagaagagcttccagcagaccttcaatcgcttgcgcggcgcaacgctctcgaaattaccgagcaagactgggatgaaggcttcgagaaactcgcagaggcgcttgaccacgccttgggcgtacggggaaggacgccgaaacagcggcgccgcttcaggccgggtgtggctgccgttgcgcttcttggcgcgacaatcattgcagccgtcgtggtcacgatttatcactcagcgcagaactcgcccgtgtccgtcgtgcgcgaagacgccggccctcagaaagacgccatgcctaatgctgctgacagggcgccaacaaacggagcgggagcggagtcgaatgctggcatacgctcattgaaaacctctgtcgctccgccgcgagaacaggctagccgcacatcgtcagggccaaccaaggcttccgcaccagcgcgaataacctctgctccggtatctcccccgccggctgaaatcagctctgctcattttgttggcaactggcgggcaatagtgacaggttccggtcagcaactcatcgagagcgttgatctctacccggatttcagctttggtgtcacactgaaccgttcgtctgccgccgttggaggatggcaatacaacgccgcagatgacgttctgaatttttcaaatggcacaaattttctcaacaacggagttaagtttgcctgcaaattgaaaggcactgacggaacacacgccaactttggcgggccttgccttgacctgatgcagatgagctggaatgtggcgctgactcgtgagggaaatctttccgaggtggtttacaacgtgccgaaggttgacctttcggccctgacgatggctgaaaaagccgcctttaccgaagcgttatcgcaaggcttctgcacttgcggttgcgggatgacgatccttaattgtctgcgcaatgaccgcacctgcctggtaagccccaacctggcgcgcgcggaactggtggtgttgatgcaatacaggcgccgatgagggggtagccttgagcctgaactatcagcaagactcccttttacgacggatcaggcatcctttgtctttgtggcctgctcctgccccgccgcccacttggcgtgctcctgcgaaaccaacgactcaattctttccgccaagagtgtatggggattgatggcagcagcgtaaggaccagccccggctaaatagagatatttttcgtgcttcagggattcgcaagtggaacggtaagtgatccagttgtaatgatattgattgagttggagcacgccttccaaaattgcgatcagcgccccaaggcttcccgccacccacggcaatttgaaaccagaaaataacggaaccaggcccgccgcaccaatctcaatcaccttcatccacttgaaagtgcgctggttgaaattactcttgtgatcgtaccaaccaatttgatcttcgaggcgttcaagcgtcgggtcagcatcaggcatgtctcacctcgtctatcggagtgcctaagattctagcctaatctgcgtcaaggtctacactcagaatattcttgctggccgcataaggcattggaacaggcttgattggaacccgaaaataggttggcggagggagagggattcgaacccccgagcccctttcggggctaacggttttcaagaccgccggtttcaaccactcacccatccctccgggaagtccacttcaacggtatgaagcaatcggctttattttagcagaacaagcgccggctgaagaaccggttgcggagccttttgccccggggtcgaacttgggggagcgtgctcgcatgaaattcaccaaacatcagtattctcggccgaaggatggcttgttcgttaaagccttccacaaaaaaccccctgcatttctcgaaaaattttcgtaaaatgtgaagccttccggtgaacctccggcaaagaggaggggggcatgagctacaacctacttgaggaagattggattccagttctatggaagactggaaagctcactcgcgtcaacctcattcaggtgctcactgaagcacactgcatccgccagattgccgccaccaatcccatggaccgcgtggccaccctgcgttttctgctcgcactgctttattggtgcgtaggggatccaccgcgcgatccaacctcgggtggcaccttttccgaagcatggtttaccaaactctatgaaaacaaggaatgcttcaatttgctgggagacggaatccggttctatcagtaccgtccaggctcgggaaaagacaaaaagctttccgtcaactatctcattcatgaagtgccgacggggtccaatgtacggcatttccggcattccgcggacggagttaacggcctttgtcgggcgtgttgtgccacagggttgttgcggctacctgtattcaccacccaaggggggaaaggaaaatcaccaggcatcaatggcaaaccccccgtctacgtcatacctctcggacgatccctgtgtgagaccttgtggctctcttggcgaccacagtcgaatttgggtacgcctgcatgggagaagcctgacatggcactgcccaagactggcgaagtccccctcctgaccgggctcacatggctgccgcgacgcgtttggctggacgaccccatggaacccgaagtcccttgtatttgttgcgggcgaaaagagcttctgattcggcagtgcatatttgccggcatcggtagcggcaaggcggatggccgagtttggaacgacccgcacgtcgttcgtgacaaaaatgtggtgatgacaccaagtaatgcccttgccgattccgataaagcggctgacgattgggcaaagataactgcggcgatcctcatcgataccaagcacacttccagacgccgattctgggttgttggtttcgcaagtaaacaggacaagtacctggaagcgaaggaatttgagattttccttcaacctaccacggaaagtgctcagattcaagatgccatcaaggagatcgagagatggcaaagagaagcagcggggctggcaaaaagagttgtcagagtggtgaagaacaagaaatcctcgcgaaaacatgttgagatcgacgccctggtaaaagccattcggcctcatatcgaagccagtgcctctgtgaaattgaaccgcctcatttccgacggccacccggcatgggagggggcggccaactactatgaagggatgatggttgccatctctagatcaatttctccggattttacggccacagcgctacgacagcggcaggaaattgcgcgcgttaaaccagacatgcggttaaaaacagagaaggcagggaatctgaccgcaagagaggcgataagtgactccaacagaacagtacatcaaacgcctgacacacctgaagaccggtgacctcggattgctgcgcacccacgcggggcaggagctcgatgagaaggtagagggcttcgacctgtttacgggcctatggtggccgctgcgtcaaaggaactcgcgggcaccccgccgtgacgtggcatggctcgtcgccaagctctatgccttccggccactcgagtattcggcggaagagacgctagctttccttcttgggcaatgccaaccagaagttggcaagcgggagaagttcatccagcggtttgataggatgctgactctgcccatccgcaaaatcgaacctgcgttgcaatgggcgcttgacgtgctcaattcaaagggcatgggactcgactggataaaactcacggatgatctttcggtttgggaacgagaatccacccgtctcgaatgggcaaaggaatttttgaagtctctaggaggaggataaatgctgatccagattcacgctattcaaaatcacgctccggccaatttgaaccgagatgacttgggcgcgcccaaagcctgctatttcggcggtgtgctgcgctcgcgcatctccagccaatgcctcaagcgcagcatccgtagaagcgacgagttcaggcagttgctaggcggtgttcgtacgcggcaattagcgaaattgatagctgacaagattcccgagaaagatgtgaggaagcgtgcggagaagattcttgaaatatgcggattcaagccctggagatcggaaggcgagtccgaaaattctgagaagagcaaaatgcttgtctatactaccaaacaggctgttgaagagatggcgaacctcctccgaaacagcgatggaaaggctgagagtgaactggcggaggggttcgccggacttattgcggagcgcacggcagttccggacatggccttgtcgggccgcatgctggagccggacaaatcttctacggtttgggagaagcgtgatactaaggtggaagcagcacttcaagtggcccatgcaatctccacccatgaggcccgccccgaggtggattactacgtcgctgccgatgacatccccggcgaggacgcgggtgccggctttgtggacgaggctatgtttgcctcggcctgtttttacaaatatttctcaatccactgggagcaattggtgaaaaacctcatggggtttggggaagaacatgaaaagctggccgcacatacggtgggcgcattcattcggggggctgcgatggtgaaccccactggaaaacagaacagtttcgccgcgcataatcctcccgatggcatgctggttgagatcagggacacccctctcagctacgccaacgcttttgcgaaacccgcggttgctcagggtgaacgtgacctcatcgcccagagcatcgcgcagcttggccaatacatccacgacatggacaccgggtacggtaagccaacggagcgattctggttctcgcctaattcccgccatcctctgctggcttacatcgaggaagaacaagatggaaaaaagaaacgacgtgagattgcgcttaccgacaataatctcagttcgctcgatatcttaattcaaaaggtcatcgagaaaatcggccacaattggcatgaggttcagaaaattactgtgaacgcagaggtggtttgatgagggccaacaccttatttcttcgcttggagggtcttcttcaagcctggggagaccaccagtcaaagtttgtcatccgacggacggcggaagctccgaccaagtctggcgttgtcgggatgctgtgcgccgccctgggggttagcagatgtaaagcctctaatgaatggcttcgaaagctgggctcgctttgtatgggggcgcgcattgatgcgccgggtgtccgctggtgggactatcagacggtcggagccaaggtcggaatacccagggcagatggtgctggcgctaagagaacggccgcgacgggggaaattgaaactctcatcacgcgtcgcgaatatctctgcgacgcatccttcctgatcgctttgcagggtgaggccgacctgatagcgcagttggagaccgcagtaggagcgcccaagtggacgctctatcttggtagaaaatgctgccctccgtcacgccctttgctggaaaaacccgcaagcggtgagtttcccgatttactctcagcccttaagtcgattccttggcgcaaacggatgaaggaggatcaaccgcccaaaacggttgactgcctgctcgattggcagcccacggcagatcagcctgaagcgcctgatgatgccttcgtctggtatgatgtgccccgcacctttgaaccaccctcgcacgaaccccgattcgtgctccggcgtcaattgccagtggccatcgagggcggcgtgggcgtcgcaggccagccggcgcagaccgaaactccgccgccgccccgcccgcgggccgattacaccaactccgcctacaggaacaagcgcctggagcggcttgcccgcgaccagcagctttgcgttttttgcaaggcgccagccacaacggtacaacacatcacctatcggcgcgccggaggcaatgaaagcttggaagatctgcgttcgctctgccgtttgtgtcatgacgccgtgaccatgatcgagtatggtttaaacatgggtctggatcggatcaatcccgaagagccacgttggcgcgaccagattattgccaagcggaacgagatcatcgccttccgctcgctcgaaacgcgtcggcgacgcctcgctccagaggaggtggaatagccatgtggatttcgtgtctcctgatcgacgtcggtgacaatcccgaccgcccccgccccgggcgccaatggctgcgaaacctctatcgcgttcaccagcgcctttgcatggcgtttccctccgaccgcagaaagcagtacgacccagagtttttaaagccctaccagccagaggattttgggaacggccatgttcatgttgagcgcgggccgaccgctggctttctcttccgccttgatcccgaggaacgatgttgccgcgaagcatcacaggctcggcattccggcagtcgggtggtaattctggtacagtctgcaccaaaacctgactgggaatacgcctttcacaacgcctgttatctgctggccgccccgccggaagtaaagccattcaacccgtgctacacaacgggtcagcggcttcgattccgcctccttgcgaatcctacccgccgcctcacggaacactcgcttggagccgacggacagctcgtcaagaaatgggcgaatacggataagaaagggatgcgcgtgcctgtgccgacggatcaactcctcgattggatcaatcggcgagctgaaaaggcggggttttctatcgagaaggattccatcaatgttttgccgggttatgtgttcgccaacaaaagaggggacaggcatggaattcgcctgcgctctgtccgttatgacgggcttctcagcgttaccgagcccgcactgtttcggcaagcgattatacaaggcatcgggccaggcaaagctttcggcttcgggctgctttcggtagcgccgtgttgtaccggaggtctatgaccgccatttttgacctcctgccccgtttgattctttacagtggagaccacaccatcgccacacttaccactaccgggcccttcctcagcgaagagggtaattccccgccttggttaaggaggggataaggggtggttggtgtaaagaacgggctgagagaggacgccagccgcctcgatcatcgatggggcgcagctacaaaaacatgaaagacctccatctgttgcccaaagtccgcgatagttccagtttcctttacgtcgagcattgcaagatcgaccaggagggcaaagcgatcgccattcacgacgcgaagggccgagtgccagtaccctgcgcgtcattgctggtgctgatgctcggtcccggcaccagcatcacgcacgcggctgtgcgatctcttgctgacaatggctgcaccatcctctggacgggcgaagagggcgtccgaacctacgctcagggcatgggagaaacgcgctcttccgaacgcctgctgcatcagtcacgcctctgctctgcgcccgaattgcgcttcatagtggttaaaaggctttacaagatgcgtttcccggagaagctggacccctccctgaccatccagcaattgcgcggcatggagggtgtccgggtgcgcgacgcatacttccgcgccagccgcgaggcgggcattccgtggtccggccgatcctacaaaaccgataactggcaggccgccgatgccgtcaatcgcgccctttcggtggccaacagttgcctctacggcgtctgccacgccgccattgtttccgtcggttattcaccggccttgggatttattcacaccggaaagatgctctcctttgtctacgatgttgccgacctgtataaaaccgaagtcaccattcccctcgcctttcgggccgcagccgaaggaatgggctttcaggaaagccacgtaagaaggaaatgtcgcgacgcgtttgtggaaagccgcttattacagagaattatccccgatatcgaccgcgctctcgattggggttcttcggaaggtgggcagggggatgccagactggatgcccaaccagcggctccagggtggctctgggatcccgaagtgggggcggtggagggaggcatcaaccgcggagatgatgctgaaggaggtgacaagccacggtcgtgatggtgctcgaaaatgcccctcccagcgtgcgcggggaactgacacgatggatgctggaattgcatgctggcgtttttgtgggaaacatttccgcgctggtgcgggaaaagctctggcaggaagtctgccgcaaattggcgggtggggctggaattctggtctacaatgctgccaacgagcaggggtttgatatccgcttttggggatcgccctctcggcgggtcgaaaacttcgagggacttcttctagttcgcgggccataagccctttaaatcgcagcgtcgtccccacgcgtgtgggggtgaaccgttcatcggcgcccggccaatcaagattacgcggtcgtccccacgcgtgtgggggtgaaccatgatctgaatcgcttccgtaatcggccttcttgtcgtccccacgcgtgtgggggtgaaccgccccgcggacggccaacgaagggcgtgagacagtcgtccccacgcgtgtgggggtgaaccgcttcgccgttccgcgagactgcaggcttggatgtcgtccccacgcgtgtgggggtgaaccgcttaaccctatcccctatcccaaacccttcccgtcgtccccacgcgtgtgggggtgaaccgacaactcgcgcgataacagccagttacggaccgtcgtccccacgcgtgtgggggtgaaccgtcc

SEQ ID NO: 575 - DNA, 16700 bp, Artificial Sequence
  Synthetic Oligonucleotide
gacgagctgggcgtcgatttcattgaagccggtcaccccgccgtcaccgaggatatcgcgaaagccgtcaccctcatttcggccggggggatgaagtcgaaaatcgccgcgcattcgcgttcgatgagatcggacatcgataaagcgctcgaatgccgcgcggatttcatcggaatattttactgtgtatccgaccggcggcttcaggattattccacgaatcttgtttcggccgtggataaaatcacaagcgtcatccgatatgccaaggaaaaaaggccgtccctcatcatcaggtatacccccgaagacacggtcaggtcgaaatatgaaaacgttttttccgcggccaaggcggccgtctcggcgggggccgatattatcagcgtggcggatacgacgggctacatgattcccggcaccgaacggagcatgtacgagttcatttcgaggttgaaagacgatctcgggaaggacggcttggctccgttcctggaggtgcactgccataacgaccgcggcctggccgcggcgaattccctcgacgcgatcagggcgggggcccatatcgtggacgcggcggttctcggcctcggcgagcgggccggcatcacggacctcgggacgcttcttgcggttctgtcgtttgatttcggccttgagggaaaatggaacacaaagatcctgccggagatttacgcgacggtttcaagatattcgaatgttcccgtgccggtcaaccttcccgccaccggaaagaacgccttcacccattgcgccggagtgcacacccaggcggccattaagaatccgcttcattatgaaagcctcgatcccggccgcttcggccgcgcttcaacgatcgccctcgatcacatgtcggggatttcctctctccagtacaacctcgaaaaaatcggcgagcccgccgacgacagggaatggctgaacgccgtccttcagaaagtgaaggaggtggggaaaaaaggaagaaccgtggatcttgaagaactgaaaatgatcgtgaaatatcagaaagaattatccggaggaatcgaaaatgagaatcgggtttcttcattcgcttatcagaaaggatgaaaagctcttattggatgaattctcgaaacggcgcggcctcgacgtcgtccttctcgacgaccgggacctcgtttataccctcgggggaaaaaaccatcgcttcgacgtcgtcgttgaacgatgcctcagccattcgaaggcgctttacgcaatccggcttttcgaggcggcgggaatcaaatgcgtgaatgcttacgcggtcgcggcgacgtgcggcgacaaactaatgacatcgatcgccctggcggaagccggaatcacccagccggaggtcaagatcgcgttcacccgtgaatcggccctcaaagccatcgaggacatggggtatccggtcgtcctgaagccggcggtcggttcctggggaaggcttctgtcgaaagtgaacgaccgggacgcggccgaagccctgctcgagcacaaagcggtcctcggctcttaccatcattcgatcttctacatccagaaatatgtcgaaaaaaacggaagagacatccggagcttcgtggtcggcggaacatgcgtcgccgccatccaccggagttctccgcattggatcaccaacacggcaaggggcggagcggcgacgaattgccccgtgacgccggagctcgcggacctttccgtccgggccgccgcggccgtgggcgggggcattgtcgcgatcgatgtattcgaaagcgactcgggctacttgatcaacgaagtgaaccatacgatggaattcaaaaacagccttgaacctacgggggtgaacatcccggcgttgatcgccgattatgtcatcgagcggggacgggggaactgacgatgggaaccataagggccgcgatcgtgggggcttcgggatacgccggcggcgagcttttgaggcttcttctttttcacgagaacgtcgaagtcgtccgcgcgacgtcggaaaggaacgcgggtctgccggtgacgaggcgtcatcccaatcttcggaagatcaccggcctctgtttttcctcatcgagcgaactgaacgagtgcgatctgattttcttgtgcctgccgcacggagaagggatcaagaacatcgaccattttatgaatcaggccccgaaaatcatcgatttaagcgccgatttcaggctgaagaggagtgaggacagggtgaaatggtacggctcgggccatccgcggcccgagcttgtgaatcagttcgtgtatggaatccccgagcttcaccgggaggagatgaaaaaagcgagctatatttccagcgccggttgcaacgccacggtttcgatccttgctctctatcctctcttcaaacagggcgcagtcgaaaagggaaaaacggtgatcgaggtgaaggccggctcaagcgaaggcggccgctccccaagcgaatactcgcaccatcccgaaagaagcggctgcgtgcgtacttatcaacccacgtcccatcggcacaaggctgaaatcattcaggagctggggcttggagaaaacgatgtccatttttcggcgacgtcgatcgacatggtcaggggaattctcgccacgtgccacgtctttttagaggaaaagctcggggaaaaggaaatctggaagatcttcagagagcactacgccggcgaaccgtttatccggatcgtcaaggagagaagcggcggttaccggtatccggagccgaaaattctcgccggcaccaatttctgcgacatcggatttgaacaagacccggattcaaaccggctggtggtgatcagcgcgatcgacaacctcatgaaaggagcggccgggcaggccgtccaggcgatgaacatcatgtgcggatttcccgagaaccggggactcgaattctgcggacttcacccggcgtgaccatgtgcaggatcctggttgtaaaatccgacaaggaattcgagatttcccgccacctggaacggtttgcggctctttgccggagaagcaaggaataccagggccacggctggggcttagcggttccggacggcggacggtggaaggtttacaagagcctcgcgccggtctgggagcaaaaaatgcgcggcttcggccggagccggcttctcatggtccacgcccgaagcgcgttcaggaatgaaaacataaaccttgagtataacatgccgtttgattcgggccgcctggcgttcgctttcaatggagagctccggggcgtccgaatcggcggccggggcgtcagcggggcggaaaagatatttcattttgtcaaacggctcggcgacaccgggcttccgcggcccctgaaaagcggcggagacatcatcgccgaacgaaccgcttatgtccgggcgatgaacatggtttcctgcgacatgagcaaaatcgccgtttattcccgtttcagcgaagacgaagagtatttctcgatgaggatcaaaagggaaaacggcacgtttcttttatgttcagaaaagtatccggatgacgaggaatcgtgttgggaaagggttcccaaccattcttaccttgaagcctagaaatgatcatttttaaaaatcggcggagggaaggacatcaaccgggaggggatcgcgaagggactgagcctggttcacgaaccgtttctcatcgtccacggggccaacggcctgcgggacgagctggcgctgaagacgggatacgacatcaagaggatcacgtccgtctcgggctattcaagcgtcttttccgaccccgggctgatcgacttgatgatgatggcctacgccgggctggcgaacaaaaggtgggttgagactcttcagcggcacgggatcaacgcggtcgggcttacgggcctggacggccggctgatcgccgggaaaaggaacgccggcatcaggatgagaaaagattccaaaatcctgatggtgagggattattccggaaaaccgtccgggatcaacgccggtcttctcaagatgctcctcgaccggggctatgtgccggtcctcaccgtgccgatcatcgacgagaacggctatgccgtgaattctgaaaacgacgacatcacggcgtttctggcggaagagctgaaggcggatcaaatcgtcatgttcatcgaggaaaagggttatctccgggatccgtccgaccccgattcggcgatggaaaggatatccaaaagcgagctggctttttttgtcgaaaacgcctccgggaggatcaaaaggaagcttcatgcccttttgaaaatcgccggccgggagggggcccgggccgtgatttccgacggaaggggcgaaaacccggtttgggacgctctcaacaatcgagggaccgtgatctcatgaccggtttaagggaagccgaaaagatttattccttccccgtttaccccaaacgggatttagtgctggtcaaaggggaaaacgcggcggtttttgacgagaacggcagggagtatatcgattgcgtcgcggggaacggctcgctcaacgtcggccattccaacccggccgttgtcaaggcggtgaaagaccaggcggaaaaaatcatctcctgcgcgaatatattttataacgacgcccgcgcggcttttcttgaaaaattgatttccgtcatgcccgcagggcttcgcaaggccttcctctgcaattccggcgccgaggcggtcgaggcggcggtcaagttctcgaggctcgcgaccaaaaggaaaaaattcgtctcgaccgtaaacggatttcatggaaggacgctgggcgcgctgtcggcgacccataacagcaagtaccgggaggatttcctcccccttctcgacggcttttccttcgtcccgtacaacgatttcgaaaaaatggaacgcgccgtcgacctggaaaccgccggggtgatcgtcgagacggtgcagggggagggaggggtttatccgggacgtccggattatttcgcgcggctccgccggctgtgcacggagcgaggcgctcttttgatcatcgacgaagtccagacgggcttctgtcgaacgggaaagttcttcggctttgaacacttcggcgttgctcccgacattctctgcctggcgaaatcgatcgccggcggccttccgatgggagccgtcgcggcctcggatcaaatcgaggtcggtatcgggaagcacggcagcacgttcggcggcaatcctctttgctgcgcggccggaacggccgccatcgagttcatgctcgaaaataagctttggcttgaagccgaaagaaaaggctcgtacctgatggaaagactgcgcctcatcaaatcctccaaaatcagggaagtaagagggctcggcctcatgatcggcatcgagctcaaggaaaaagcgaagctttatgtgctggaccttctggaaagggggctcctcgtcctcccttcaggtctcaacatcatcaggcttctcccgccgctgacgattcctcgcgacgatatcgacagggtgattgagcggatcgccgcctctctcggggataaagaaaaagcttcccgcttgattgaatgccgccggatcgatcgacccccggccggaatcagagcttcagggcccgctccatcttctcgagattcgtccgaagctcgaaggggatcgtccggccgaagccgttgaaaaacttcttgatctcgcccgcttcccccttccattcggacggcttgatctcgaacagccggtccattttggagcgggggatcggcaggccttccatgttgaaatcattcatgtcggggaccaggccgatgggcgtttcccgcgccccgaccttgccgtccacccggtcgatgatccacttgaggacccgcatgttgtccccgaagccgggccagacgaacttgccgttctcgtccacccggaaccaattgacggcgaagatcttcggcggattgcgcatcaaggccccggtgttcatccagtggcggaaatagtcgcccatgttgtagccgcagaaggggagcatggcgaacgggtcgcggcgaaggacgccgaccgccccggccgcggcggccgtggtttccgagccggtccgggctcccatgaagacgccgtgcgtccagtcgaaggcctcgaccaccaggggcatgaggtgggagcggcggccgccgatgaggatggccgaaatgggaacgccccggggattgtcgaattccggcgacaacgtcgggcaattgtagagcgagaccgtaaaccggctgttgggatgggcgatcttgtccttcgagccggggatccaggggcggccctgccagtcctccacgcgcggcggaaggccgtcgaggccttcccaccagggctcgttcgcgtcgacgtcccgcccgacgttggtgtagagcgtcgggtagaaattccggcccttgagggtccggatcatgttcggattggtcttcatcgacgtgcccggggcgacgccgaagaagcccgcttcgggattgatggcgtagaggcggccgtcgggcccgacgttcatccaggcgatgtcgtcgccgatggtgaagacgcggtattcggggagggccgactggagcatggccaggttggtcttcccgcaggccgagggcatggccgcggtgatatacgtcacccggcctttcatgtcctcgatccccatgacgaccatgtgctcggccagccagccctgccgcaggccgaggtaggaggccacccggagggcgaagcatttcttgcccagcagggcattgccgccgtaccccgagccgatgctccaaaccaggctctcccgggggaaatgcatgatgtagcggcggttggggctgaagtcgccgaccgaatggctgcccttgacgaatcgctccgacgtcccgattctcttcaggacatgggttcccatccgggtcatgatccgcatcgagacggcgacgtaggagatgtcggtgacctggaggcaggccttggcgtagggcgagtcgggatggcccatcatgtaagggaggacgtacatcgtccggccgcgcatcgccccgtcggccagcttggtcagcatcgccttggccttgtcgggggccatccagttgttgttgggaccggactggtccttttcggggtggcagacgaaggtcagttgctcggtccgggcgacgtcggtcgggtggctgtgatggagataggcgtcgggccagttcgcctggttgagggcggtgaaaacgggctgcggcccgatttttcctcgcggaggccgatctcgatcagacgatgggcctccgcctcggacccgtcgcaccagtagacccgcttgggcttgtagatccgttcctgttcctcaacccatcgctcgaccggagtggacatgtccctcctcggcaagaaagagggaacaaaatatcacgggcgcggccgcgaagtcaaaacgaaattctccgccgggcatccaagcccgagtccgggttcgaggaagcctcatccggccccctggcggaaagggaagggggcggcgtgcttttcatgaccgggggaggaatcgtcggcccggaggatggacggggaaggaggccggctcgaaaggccggtttttcgatgaaaagacccgggtcggctagcggacgaggatcgttcaccgttattcgagggccaggtcgaccgccgccttgcagtggagggctgtcgtgtcgaacacgggaacggacgcgtcggccggcttgatcaggagggggatctcggtgcacccgagaatcacgccctcggccccgcgatcccggaggccgtcgatgatccgctggtaggtcttccttgatgcgtcgtggatctttcccaggccgagctcgttatagatgatgtcatgtacggaggtcttttcggcttcgctcgggacgaggacgcgcaagccgtgcattttctccagccggccgcggtaaaaatccatttccatggtgtagcgggttccgagcaggccgaccgatttcaacccttggcgccggatttcggccgcggtcgcgtcggcgatgtgaaccagggggattccgatcgccgcggccacggcctcggccgtccggtgcatcgtgttggcgcagattaggagaaggtccgccccggccgcctcgacggtccgggcggcctcgatcatgagggcggtcaagcgctcccaatcgccggcgatctggaggttttcgatttcctcgaaatcgaccgagcgcatgacgatcgaggcggagtgggcgccgttcagccgccgatggacgtcctcgttgaggaagcggtaataatcgaccgtcgaatgccaggtcatgcccccgatgaggccgatggttttcatgagcttctcctttggccgatgtccggagaggcccgcggcgggccgggcgatgcgacgcgcgaagcgccgggcagggcgccgcggagggagggcgatcccccaaggccgaggcgtgccgagccgggaaaggcttgcgacggcgccgcgggcccgcggagaaggcttttccggcctcccgggcttttccggaaaggaaaaatagcagaaatctccgataaatggaaacagcgcggctttgaagacgcggcgggggcgccgaatccccggatccaatcccgcttacgccggcggttgtcatcggccgatccgacatcgtgtctccggcggtcctccccgcgccggccccgcccgatcccccttgcctttaccgagtggtcatgttaaattattccggcttgctccccggtagctcaatcggcagagcggttggctgtaagctcaattgcagcttccacgagaaatcgtggttgaaaaatcgggtgaactcagggaagcccgccctccgcggcgcggagagggtaatcctgagccaagccccgccggtgcggcggggaaggtgcagagactagagcgaaagctcgtacctgggcttatccgcccggggaagcgcccgacaccctcgtccctctttcgagagagaacgggtgaagagatagtccaagcccggaggaaactccggggcccttgtaaccaataggttgcaggttcgagtcctgcccggggagccaaaaccgcctttcttctatttttttatttttcacatagcagtttttttattttttttagttagcattttccttttttctggtttacaattcccttgatatgtcaatcgggggaaagcatgtctacaaagatcgaaggccttattgcatattccggccgaaaagtggccggattcaaccggattcagtggttgctttcctccgaaatcgctggccgttttcgcccggaatatgcctttcgagatcgcccgggggcgggtgctggcgatctcgcgccgaaccttgagattcggcggggcatcttcgccgccttcgatgtcgccggacgtgagtgtttctggacctctacgcgcgttctgaccgacgtgaatcatggcccctttccggcggtcccggacggtcgggacgcaaatatctacgactgcgaaaactcccacatcgtggtcaccagcatccagcaactggccagtcgggcagaccgtcggcttcccgctttcccggatgatttcttcgacctgacacttgtcgacgaggggcaccgcaacatggccaggagttgggagcgggtctttgagcggttccttaatgctgaggtcgtcagcctcacggccacacgcttcagaggagacggacgcgagattgccggtgagcgggtctatgcctacctattcgggacttccatggtgcagggatacatcaagcaaatctcggttgtgaacgtcgcacctgaggagatctccttcacctatcgaggagatgccagacggcacacgcttgatgaggttcttcaactgcgggatgaggaatggttcagccatggagtggccctcgctccggagtgcaaccggtccatcgtggacgccagcatccagtggcttcaacatctttgggaaaccggcacattctatcaattgatcgcggttacctgttcggtggattactccctccaggtgctgtccctttatgcagagcgcggtttgcaggttcgtgaaatccacagcaacatgccaaggaggaaaatcatatgggccttccagtaacacaaggggcgtacaacctgcttgaagagaagtggatacctgttctttacagtaatgggaagacggatcgcgtcgggatctgccaggtgctgaccgatgcatgcgaaatccggcagatagccgccagtaatcccatggacagggtggccctcttgcgctttctgttggccgtgctcatgtggtgcaaagaggacgcgaagtcttcccttgcggcgttggacgagaagaactccggcataccggagaactggctgggtagactgaaggaacacaaggccgcgttcaatctattgggggatggtaagaggttctatcaggatctcaatgcggcaacgccggatgtcggtgcctccaacttaatgcacgagttcccttccgggtctaagatcgctcactttcgtcacatacgcgacgacagcgacgggctgtgtttaggatgttgcgctctggcactcgtgcgctggtcggtccttgcgagcgcggggaccgctggtgccagacagagcatgactgcgagcttgaatggaaacacgccttcgtatacgtttcatgctggaccgaaccttttcattactctcagacgcgaattgcaaaggttgatgcctgtcgaaaaagaccgccccgtctgggatggcgctgacgaaaaaactccaatcggccctttgaaggcattcacatggcgctctaggtgtgtccggctggcgccaccctctgaaaacggagagcgcaatcttcgtgaaggccgctgctcttattgtgaaaagcagtcagatcgaatcgtatataccatacgcttccgaccaggctggaagcgcaattccagcgagccatggcgcgacgatccacatctactcagactggatgtgcatgataaacagattgttccctcttggccgagccccaacgatgcgttggaacaccatgcggaaacgtggagttcagtcatgcaggggattctgaaccggacaacggatcagaatggaacgaagtatgaaacagtccttgtcgcagccgtacaagcgctttacaaacacatcgcatcacattcccttttcatggccgcccttgaccaggaacgcaagaatgccgtccgtgcggaactcgactgggcgcgccgagcgacatgggccacagtaagcgcgcgtacaggtaaagggaagacgaaggagaaagtatggggggaacctccgaaagggcatgcgattgttgagagtttgcatgggcaaaaatccctggggcacgagatacgttcgagtctgtgtgcgctcagtagccaaacgcatgtcgatatggagaattgcttcagggaactattgttacaatacgacgttaaggagtggcgacaatcggttaaagagattctcatccgggtcattgagcaagtcgtccgttccactattactggctcgctgctgcaacggcgggaggccttggcgcgggcaagatcggccctggagtcgacactcaataagacagaacatggtgacgcgctatcggaggcggccatgcctagcaaaccgaaacgtggccgcaagaagagaggcacaaaatgagccagaccgctgaatacatcaagaggctttcagacttgcaggaaggtgagcgttcgcggctgcgccgtctggccggacggccgctcgacgcaacgctccagggtttcgacctcttcacgggcctctggtggccgctgcgggcgaaaagcccggcgactccgcgccgggagccgtcatggctcgttgccaagcttttcggcgcgttccgcgtcccgcacatcaggcccgattcaggtgcggggccgtctttgcccaaaattttgggccgctgcgaaccctgcgacccaccggagttcaagtcccgcaatcgtttccgaaagcgttttgatgccttgctctgctcgcccctgtcagcccttgagccaaacctacgttgggcgctgggagaggtcgcccaggtcgtcgccggacacgtgccgcacgtgcgggatgtgaagggcatcgactgggaacaactcctcgacgatctctccatctgggaacggggcgaggtgcactgccgtggacgcgatgttcgcgacatttgggccgaaacatatctcaacgctgtcaaaaaagaaaggaggatattaaaatgatcattgaaatccacatgatccagaaccacagtccggcgaatttgaaccgggacgacttgggtgcgccaaagacctgcatcttcggcggtgttacccgggcacgcatctccagccagtgtctcaagcgaagcatccggcgtagtccggaattcgcagccgctttagaaaaggatggcggcgttcgtacacggcggctgattgagttgatcgcaaaggcggcggcgggcgagggtaatcaaccgaatgagcaacatttaaaagccattcggaaggtctttacagacggaggggtcggcctgagggatgagaacacttttgaaatactcttctttctgcctcaatccgccatcaacaaaatgggcgaggctgtgcgcgacgaaaacagcgacctgggcaggaaattcgccgagatcatcggcgagttcgtcaagacccccgacatcgcactttgtggccgcatgacggagttcgatgcaaaggggccgtttcaggacctcaaaggccagtttaccgttgaggctgcgctctccgccgctcacgccatctcgactcacgcaatcgtgaacgaggtagactacttcaccgctgccgacgatgtgccaggccaggacgccggcgcggcccacgtcaacgaggccatgttcaattcggcgtgtttttacaaacatttcgtgattgactggagccagttgcacgcgaatctgaacaacgataccgcacttgcaaggaccaccgtgaagtgcttccttgaagcagccgccaaggccaacccctccggcaaacagcacgccttcgcggcattcaatccgccagacggagttctggtcgaagtcaaaaccaagtcggccacgcccgtcagctacgccaacgccttcgccgatccggtgccggaaaagtccgaacgaggattggtcggcgaaagtatcgcccggctcggcaagtatacccacgatctcgttgtaggttacagcatcgaggctgagcgtttctggttctcgccgaatctgcgccatcgtcttacctggatcgacaagagcaagaaggaacacgagcaagaacaatccgtggtcggttccgacgagttcggtgagttcgatcagttcgtcgataaggtcatggacaagatggagacaaccgggacgcctgcagaggcggcgaaatgaccgaggccaacacactcttcctccgccttgaaggcccactccaggcctggggcgacacgtcaaagttcgttatccggcggacaatggatgcgccgacaaagtccggcgtgctaggcctgctctgctgcgccatgggcctgccgcgccaggcggcgcgggaacgcctgtcggagctgaacaggcttgcgatgggtgtgcgcatcgaccgacccggcacgcggtggtgggattaccacacggtaggagcgggaatcggcattataacagctgacgggaagggaattaagcggacgccttccaccggcgagattgaaacccttatcacgcgccgggagtacctggccgacgcgagctttctcgtggcgctccagggtgatgcgaagttgatccatgatattgccgcggcgattgcgtcgccaaagtggccggttttccttggccgcaagtcctgcccgccgtccgtcccggtgcttgcaaggcccagtgagggtgagttgtggacgaatcccgccggttatgacggcctgaacgccgcgctgggcgccatgccgtggcacccgcggtacaagactgacgttgcgccgaagaacagggcggtggaaacgcttgtggagtggcggtccgccccggattgtgatgtcgcccccgacgacgcggaagtgtggtatgacgtgccggtttgcttcgatccaccggtccacgaggcgcgatttgtcctgcgtggcacagtcccagttgaagtgggggatccgatccagacttccacgccagcaccgccgcgtccgcgcgcggactacaagaatacagaatatcggaagcgtcgcgaagaacgaattaaagccgacaccgggttgtgcgtcttctgcaagtcgcccggcccgcgcatgaccgtccagcacgtcacctaccgaagagccggtggcaacgagaccctggaggacctgcgttcgctttgcggtctgtgccatgatgccgtcaccatgcttgaatatggcctcggcatggaacttgaccgcatcaatcctgaggaaccacgctggcgcgaccgaatcattcaaaagcgagccgagattctcaaataccgctcgctggaaacccgacgccgacgcctcgtctccgaagaggtggaatagctatgtacctctcctgtctcttgatcaacgtaggggacgatcccgatcggcatcggcctggacggttgtggctcaggaaccgttatcatgtccatcagcgcctttgcatggcctttccatccgatccacggaaaaagcgcgatcctgaattccttataccttacgatcaggacgattttcccgagcaacgacacttggctgaccggaagaagaacgaagttgagtacgatgccctgaaacaagtccactccccgcgcaacgacgaagccggctttctttttcgcatcgatcctctctgtaacggccgagtgatgatcatcgtgcagtctgccatagagcccgactgggactatgcctttcacaatgcggattatcttctggctgcgccgcctgaggtgaaatcgtttgaccccgtcttctcgaaaggccagcgtcttcgattccgcctcctggcgaatccgactcaaaaaaaggcgacgttgccgaaacggcgctggaacacgatgtcgcaagaggaacagaacaaagagaaaacgcggcacgggaaacgtgtgccagtcccgagtagccaggaaatcgatgactggcgcggaaaacaccagggggaagacccccgaacgtttgttcatgagaaactccacgaatggttggcgaattggcggctgatgcgaaacgggcggacaatcgattctgcagggtttgccatcgatccgaatttcaccatcgttcagccgggttacgtctatatcaataaggaaggcaaaggccaagggaagcgcctccactcggcgcgttacgaggggattctcacagtggacaatccggagctcttcaaggaaacgctaattcgcggcatcggatccggcaaagcttttggatttggcttgctttcggttgctcctgccaatgcatcgggtgaaggggggaggacgtgcgagtaaaggacctgcacgttctgccaaagttcagcgacggatggagttatctttatgtcgagcattgtcgcatcgatcaggaagcctgggccgttgccatccacgatgaatcaggtaaggtacctgtcccctgcgccaatttggctcttctcatgcttggacccggtgtctcaattacgcatgccgcgatttcggttctggcggatcatggctgcctcgttgcctggtgcggcgaagaaggtgtccggttctacgcagtaggcatgggcgagactcggagtgccgcgaactttctacatcaggcgcgagtctgggcagatataaacctccgtttgatggttgtatatcggttataccagttgagatttgctgagaaactagatccagacctaacccttcgtcagattcgcggaatggaaggcgttcgtgtcagagaagcatacgctaaagctgccgcggagaccggagtgccgtggtcaggccgcagttaccggcgcgacaaatggactgttgctgatccggtgaacagggctttatctgcggccaattcgtgtctttacggcatctgccatgcggctatcgtctcagcgggattttcgtcggctattggtttcatccacacgggaaaaatgttgtcgtttatttatgatgtcgcggatctttacaaagcggaaatcacgattccagcggcatttcgtgcggcagcagaagagaaaggtagcttggaaagacgagtacggattttttgccgcgacctgtttgtttcgacccggttgttggagagaataattccggacgtcaagaaggtgttgatgttgccagaaaaaactctgactaatgacgcctcattcgaccaagattccgcagctccgggtgctttgtgggacaatattacagaaagagaggagggtggccgcgactattcgttggtagttgaagaaacggaggctaccaatggtggttctgattcttgaacgcgtatcatccggtttgcggggcgaattaacgcgttggctaatggaaccaaaagctggagtcttcgttgggaaaatctcggccatggtgcgcgataaactatgggaaaaatcatgttctcaagcgaaatcaggcagttgcgcgatgatttattcaagtaacaacgaacagggttttaaatttcggagttggggcgatatgactcgttctgtcgaagactttgaagggctttttctcgtccggataccgtaaacaaagccttttttca

SEQ ID NO: 576 - DNA, 16700 bp, Artificial Sequence; identical to SEQ ID NO: 575
  Synthetic Oligonucleotide

SEQ ID NO: 577 - DNA, 16647 bp, Artificial Sequence
  Synthetic Oligonucleotide
tgccatcctcaccacctccatctaccagcctattatgctggtagaacgatgagccaagcaagaaccccatgaaactacccacatccgtgacgcacacccgatccgcgagcttgcggttgtcccgtttggcatcgacgaccagacggagtacgtcatgcgtttcacgcgtggcgatttccaggcatccgtgcgaacgcctgcacgtgggagactgtcgtcgctcatccaggtgatcggtgaaggctcggtgttggtcgcccacaacgctgcgttcgacctagctttcctcgccgaagcgctacgccgggcgcgcgtccgtcatttcgccttacgcgcctactgcacgctgcgcctcgctcggaaacttcttcccgaagctcgtcgatacgaccttgcttcattgtgtgaggcattggggatcgagagcggaaagccgcacgtggcacttgccgacgcccaggccgttggggcgctgttcggggtgctcgcggagcgtggtgggttcgtcgacgaagaggcgctgcgcgcgctgcatggtccgccggtgcaggtgcggtttcggtcaggatgcagaggtatagccccatgaccaagacacatagcagtgaggccgcatacgacgacagcggcatcgcaaacttcaatttgatcgaggagcaatggattccggtgatttggcgcaacgggaagccggatcgagtcggtctccggaaggcgctgacggaggccggcaagattcgccagatcgccgcgtccaatcccatcgacaacgttggcctgctccgctttctgctggcagtgttgcaatggtgcaagccggagttgtcggaggatgaacgtacgacgctcaacgagagcgagggaatcccggcggactggctgacgccacggctcggcggtaagggggagccagccgcagtgttcgatctgcttggcggcggactgcgcttttttcaggacaaatccgccgccgggaacaaccgccctatcggcgacttgcttgtcgagtttcccaccgaaacgaaggtcgtccacttccgccatgtgcgcgacaagcagtatggactgtgtccggcttgctgtgcgcttggcatcatccggttctgtgtgtgggcgaatgcctacggcgggggtcgctacacctcagccgtgaacgggcccacgccggcctacgcgattcctcaaggcaccacgctgcttcaaaccctggtcatgaactggcctccgggtagagtttctaatctacagccgccctggctcagtaacgacgctcctcctgctgatggtctcgatacggtcagtgtcttcgcgtggcggtcccgcaagctgtgccttggtgatctgtaccctatgaatgagccctgcagctattgcgggaaggctgcgcagttgatcaagcagcatgcctttacgggcaactggaagccaccctttgaaaccaaaggccagcagaagaagttctgggacaaagacccccacttggtgatcgaggaaaggactgcaagtgacgatgcggatcaagaccctgaggcctcaagtcaggaaagggcttcaacagactccgctgcaataagaaagaagaaaggtgccaagcagaaggtgcttaccaccctcgggtttccgtcgcccggatccagtgttacggcccacacccgcttctggcggagggctttgcgcgcgctactcgcgcgcccgggagctggcacatggcctcaaacggtcctcgccggacctgcggccaacaagggcctctatcaggacgccaccgcggtgaagctgctgacggtctcatcagccgccgccaaaccgactcaggatgcgctaagcctgcttttcaacatcactgagcaactcgtgggcgcgctgaaaagaagtacgccaaatcctgcgcgccaacatcccaaccgtaaagccgtccttgatgccctgtcgccagaactggaggcccgcttgcgcgatgtcctgagttgctggcttgaccaatattcccctgattcccctgatgaaagaactctaaaggacaacctcgaaacgcaacttcagccgctcatcggcgccattgtcagcgccaccaccgctggctcaccgctgcgaaggcgtgaggctcaggcgcgagcgcgcatggcgcttcagggcgtgctgaacccaaggccgaaggtggcaagagaggaagcaactaccgcagaccgagccaacacagcaacaacagagggcaacaagcgcaagcggcggcaaggcaggggcaaaagacaggaggccacgcaatgagccaaaccgacgctttcatcgacaagctgcaagccctcaaggagggcgagcgttcagtgttgcgcggtcttgccggcaagcagcttgacgaaacagtatccggctttgatctattcacgggtctatggtggccgttgcggcaaaggagccccagggcaccaagtcgagagacgagctggctgatcgcgaagcttttcgccacatttcctatcaggcacagccggccggatggggaggaccaacgtacgacactggcgaagattcttggccgcattgagccccgcgacgactacggcagcaaacgctttcgcgcccgccgctttcgcgcccgcttcgacgccctgctctgttcttcgctctcaacccttgaaccacacttgcgttgggccttgtcacaggtggacgacgcagtggcgcgtggacgcgcgcctggacttgactgggtggaactgctcgacgacctctggaagtgggagcgcggcggtgaccgcgacatacgcgaccagtgggccgagcaatacctgaatgcaatcaacgaggcgaaaggagccacacatgctgattgaaatccacatgatccagaaccacagtccttccaatctcaaccgcgatgacttgggcgcgcccaagtcctgcgttttcggcggtgtcgcccgtgcccgcatctccagccagtgcctcaaacgcagcatccggcgcagccaggagtttcagcgggcaatggagcgggacggcggtgtgcgcacgcgcaggctcattaccctgctcgctgaacgtgctcacggtagttcacccgctccggataatatcatcaagctcgtcaccgatgccttcgccaaaggtggcgtaaagaaggatgccaccaaagacgacgcgaacgccaccaacattctgatgttcgtacccgagtcgacaatcattgccatggcgcaagcagttaaggatgcgcatgccgccagcaccaaggccgacgatctatgcataacacttactcaaatgctcggccgcaaggctgcggtgcccgacatcgctctgtgcggccgcatgaccgagctcgactctgatggtctatttgccgagatcgactttcacgttgaagcttgcctatccgctgcccatgcgatttccacgcatgaggtcttgaacgagattgactactttacggcggtcgatgaccggcctgtcggcaccggcgcggggcacgtcaacgaagcacagttcaactcggcttgtttctacaagcacttcgcgatcgactgggatcagcttgtcagcaaccttggtgatgacgtcgatcttgcccacctgactctcaggcaatttattctcgcagcgactatggccatgccgtccggaaagcagaagagttttgccgcgttcaacccaccggaaggaattctcgtcgaggtcaaaacggaggcggccacaccgatcagctacgcgaatgccttcgccgatcccgtgcccgccaaatcacctcgcggtctgattggcgagagcattgcgcgcttggggcagcatgtgcatgagatcaatgaagggtacgggatccaggccgatcgcttctggttctctcctgctggtcgtcatgctcttacctggattgatcgcaacgcacgagagaacaagaaggagaagcctgtcattcttgagtccgccaacaatatcggggcgctcgctacgcttgtcgaaaacgtgatgacgacggtaaatacccacatccagccgacagcagggcggcactaatgagccagcccaacacgctcttcctgcgtcttgaaggaccgcttcaagcttggggcgatacgtccaagttcgtgatccgtcgctccatggacgcgcctaccaaatccggcgttctcggtttgatctgttgtgccatgggactttcacgcgaagtcgcagtcgatcatttgcccgaactgaacaagctggccatgggggtccgcgttgagcggcccggtatccgctggtgggattggcacaccgttggagccaaggttggaattctccaggctgccggtaagatcaagatcaaccagaaaacaaaggagcccgagacacttatcacgcgccgcgagtacttaaccgacgccagctttctcgtcgcactccacgggaaccaagaaacgatcgcaaaagtcgcaaaggatttacaggccccgaagtggccactgttcctcgggcgcaaatcctgtccgccgtccgttccggtgcttctaacgcgaaaacgtgatgacggcgctattgagcccgacctgcggcgctttgacgatcctgaggctgcgctgaagtcagtgccgtggcagccacgcctgacatcgatcgacggcgaagctccgttgggtgaccttctcgctctgcttgagtggcggtcctcggagcaagagccacacgctccttatgaagccgaggtctggtacgacgctccggtttcctttgatccccccgtgcacaatccccggttcgttgtccggagaaccatcgtcgtgccgacgggtgaagcaacgcaacaccctgtgccgcctccaccccggcctcgcgccgactacaacaacacggaatacaagcagcgccgactgcagcggatcacccgcgatcacggcctctgcgtcttttgcaagagcccggcgacaacggtccaacacgtcacctaccgacgcgcaggtggtgacgaagcggaggaagacctgcgctctctctgccgtctctgtcacgacgcctgcacgatgatcgagtatggcctgggcatgggactcgaccgcattaaccccgaagaagaacattggcgtgaggccattatcgccaagcgccgtgaaattattcagtttcgctcgctggcaacacgcaaacgaagattgcagccggaagaggtcgagtaagacatgtacctttcctgccttttgatcgacatgggcgtgaactcggatcgaccgcgaccaggccgccagtggctgcgtaatcctcatcgcgtccatcagcgtttgtgcatggcgcttccgtacccgcaaaccaagaaagacgatccacattttttgactccttattggccttgcggcttcgaagatccaaagccgaattactgtgcgacacaagacgaacggttcagcgaacaaacatgcctgataccgagaaacggcagacctgtacacgtggctcgcagtgaacagtccaacttcctctttcgcgttgattcgctgcccggaaaccgcgccatgattctggtgcagtcggcgcgcgaaccagattggggctacgcttttcacaacgtggactttctggctggaccgccgcagacgaagcctttccatccacactttcaggttggccaacacctgcgcttccggctactcgccaacccaacgcgcaagattggaacgaaatccgtcgatggccgccggcaaaacgggcgccgcgtccccctccgcgacgacgaacggcgtatcgagtggctcgtccgcaaaggaaatgcaaatggcttcgaactggcgcacgacgcggatgggcagccgaaggtcgcgttggtgtgcgagccgctgcggcgagggcggcgtgactccgccacgattacatttcagggcgttcgctttgacggcgtcctccggatcgtcgacgtcgagaaatttcggctggccgtcatcaacgggatcggatccggcaaggcctacggctttgggctgctgagctttgcgcctgtctgatgacgcgaggactttagggccgtcgattgagagctatgtttgagcaaggagacttgaaatggaacgagccgtgatcgtgaaaggacgggtcaccgacgatcggcacatcgagctcgatgagccgcttgaagaactcaccgggccggtcgaggtgacgttgcggccggtaccgactgcggagaaggagcccgatgacattcttgatttcctggccaagctcccgggtgggacacgatcgaaagaggacatcgatcggcagattcgtgaagagcgcgattcctgggagcggccttgggaccgtgaccgatgatcgtcgcgttggacgcctgcaccatcatctacctcatcgagggcggcccgcccgtcgctgacatcgcacgggcgcgcctgcgggagctgctccgcgatcccgccggccgcgccgtgtgctcgcgactggcgcgcctggagtgccgggtcggaccgttgcgcgccagcgacgtcgcgctgctcggccgggacgacaccttcttcgggcgccggcggcttcgcatcgtcgatgtcacccctgccgttatcgagcgtgccaccgggctgcgggcgcgctaccgactgaagacgccggacgctattcatctcgccaccgcaatcgaggcgcacgctgatctggtcctcaccggggacgccgatttgcggcgctgcaccgaggtgaacgtcgaggtcttacagccgtgacatcgctggactgccggcagaccttttcgttcggcggcacggatccggcgactccagcgcgcgcctacgaaaggatttcccatgcctcgtgacctccacgccctgccccgcctctcggatcgctggagtcacctctacctggagcacggccgcttgcagaagataaaggagggtcttggcttcgtcgatccgcaaggcggatcaaccgcggttccactggaccagttcgcgatcatcctgctcggtcccggcactacgctgacgcatgccgcggcgcgaatgctcgccgacaacaacacgctcgtgtgctggagcggggagcagggtgtccgcctctacgcctatggcaccggcggcacgcactccgccgcacgcttgttgcgccaggccgaggcctgggcagaccccgagcgacgccttgccgttatcgcgcgcatgtaccgcaagcggttcgccgaggagattccttccgggaccaccatcgaaacgattcggctatggaagggtaccgcgtccgctcgtgctacgagcgcgaagcggcccgtgtgggtgtcgagtggaagggacggaactacgaccagagttcgtgggaccgtgccgaccctctgaaccgcgcgctctcagccgccaactcctgcttgtacggcatctgccacgcggcgattctctccgccggctactcctccggcatcggcttcgtccataccgggaagcagctctccttcgtctacgacatcgccgatctctataagactgacctcaccattccttgcgctttcgagacagtcgcggaggggaccgaggacatcgagcggcgagtccgcatgcgatcacgggatcttttccacgaacgacgcctgctccgtcgggtgttgcctgacatctcggaggtgctcgatgttggtcatgatgctggagaaatccccggcgagtttgaaggggttgctgtctcgctggctgatcgaggtgaggtcgggggtcttcctgggcaatcccagctcccggatccgggatgttctctgggaccggaccgtcctgcacccgcgaaaccacgggtacgcgatccagatctggactgaccaggggccgcaggggttctcctaccgcacttggggcgagggtggccgcgagctggtagactttgaaggcatagcgctggttcgacagacatgcgccaagcgaggcacgagccggtgtcaggtggcgggcgatgccaccccgcgccttccaccgaggcggaagggcgggcgcagcgctggcgaaaggccggtgcgttcggccggttgaaacgtaacctagagcactttcaccggatctttgacaacttggtgtagccgtggcaccccaatatggtgggtcggggtaattggggaatacaaactgttggtgtcgtccccacgcgcgtgggggtgaaccgaccgagctccattacgggcgggactctgaccacccgtaacccgggtcctcgcttcccgctgcgctctttgcgacaatgtggcagccatgatcgcacgcgccttgaccatagccggctcggactccggtggcggcgcaggggtacaggccgacctcaagaccttcaccgtcttcggtgtgtacggcatgagcgccatcacggctttgacggcccagaacacgcgcggggtggcgggcatatacgctgtgccggccgatttcgtgcgccagcagatcgatgcggtgctcacggacatgggggtcgatgcggtcaagaccggaatgctgctcaatgccagcgtcatccgcgaggtggccgccgcgctccgccaacatcgcgtttccagattggtggtcgatcctgtcatgctggccggtaccggtgcggcgctcctggagacaaatgcttgcgatgctctgattagagaccttctccctctggccactttggtgacgcccaatatacacgaggccgaggcgctgaccggtctccagatcacgtctgtcgccgagatgggacaagccgcccgccagctatgtgagatgggagccgcggcttgtctgatcaaaggaggtcacttatccggaaccgatgccgtcgatgttctcttcgacggaaccgatctcctcgagcttggcacaccacggctcgcggcgccgcacacgcacggtaccggctgccagctttctgccgccatcaccgcagctctggcacgggggagctcgctggtcgaggcagttcggcaggcaaagatctttatctccagagccatcgtccacggcctggcgctcggtagcggcgcgggcccggccaatgctttggcctggcttgagcaggacgagaaagactgggctagccaagtctggcaaagaaagctctgattcgagccgcgttcgctcccacatctcctttgccgtcacgtgatctggaccgcatgtggacgatgctggcattcccgtccgggcgaacttcgatcacgaaatcatccttgaaccggaacagccgcgtggtggcgacaccttcgatgacccgagccgcgggatcgtcatgcgtgatggtccagtcgggcatctgccgcgcggcggcttcgacccgccggaacgcctcgtccggagtgaggttaaccggcaacggcttgatgtccggataagaggcctgctgctgcggggcgaacgaagcctgctggtaacccatgtcgcgcccatcacctccgctgggcgaagcggcgcttacgaactgcggcaggctcaggatatccgtggtgatgtcattgattggtgggtagcgtcgggcgaaagcggccagtgtgacgaacaccaccgtaatcaccgcacctgcaatcagtccaaatccgtagccatcgccgtaaagcgccgtggcgatcccggcgacgaggcaaacaacgccgagcacgccgccgagtgcgaacagggcgaagccggccatcggtgacgctacgccgaagtgagccaggagtggtccacccgcgaaagccagcagcgcggttacgccaagggaaaaagccaggcgtcccacccaccaatgagagtggtccatcctccctcctttgtatccttgatcactactgtgcgtacaggcggcgcaaagtggtgtcaattcagggaaggtgcttgctcagggccggccggctgctgcatactgcggcggcgttatgtggtggacctatcttctggccatggtattggcgggttgcacgtcggcgtggcagcggcacgagtcgcggctcaccgccgccgaggcgagcggacgttacgccgaggccttggtggaggcccgctggctggtcgacaatgccttccaacatgctccggcagcggagcgttcaccagccgctgaggcacgccgctacctgcgtctcggcgagaccgcaggcaagaccggggatgccagcgcggcggtggaggctttgcggcaagcactcacactcgacccgcaccaggccgctgccgtccgggcccaagtcgatcgcctgcctctgccggccgagcaacgagatcgtttcaggcaggagttcgcttggaacagcgccgcactggcgccggcggacaactttttcgagaccgcaggccacaacccggaatgttggtcgtaccaggtgcgggaggtgcggctgcgccatcaccgcacggtgcaaaccgctgacgggccgcagcgccaggccagttacgacgcgcggccgtggcgctttgatgccgtctcacgccggtggcagccggaaggtatgtgggttgccgacgtgggtacggaaaccgagccggtgggcggacccgagcaaccgcgttaccgggccatagttgctgctgaccacgagttcttttctgacggcggcgtgccgccctgtcaccgctcaggctggcgtggaccctacgacgcgcttggcaccattttcgtggcggagcggttgccctgaaagaataaagcccccaaaagctcggattttcttgtgtaagaaacgaccgctgcggggtggttcgaggggatcggggcggagcgtgaggcggccacggacgtggcggtagtgtctgtcgttgggggcggcttgatacagcggttcataagttcggcaacctgtttttctcgtgctcagcgcagcggtgctcgtaatcggctcctgcgatcgcgtccgccgattacgattacgagcacgcgcacgagcacgatacgtggccgtatttacgccggcgtgtacttagcgtcagccctactcgcggtagttgatgaattgtagaggcaagctgaggtcctgcactttcagcaactgaatggcagcctgcaggtcgtcgcgtttcttgccactcacccgcacctggtcgccttggatctgactttgtaccctcagcttgctgtctttgacgatcttcactatctgcctggccttatcggtatcgatcccttgctgcacggtgatcgtttgcttggcgaggcccccggccgcaggttctattttgccgtacaccagggctttaagtggcacgttacgccggaccatcttggactgcagtacatcgaccacggcttttaccctgaagtcatcgtccgagatgatctgcagttgatccttctccagcacgatctcggtcttggtacctttgaagtcgtagcgctggctgatctccttgcgggcttggttgatggcgttgtcgatttcctggcggtccacttgggaaactacgtcgaaagatggcatcacgcccccctatcgcgccatgggagccgtgatcacgtcgacaccgggtggaacctggaaggtgaagcggtcgtcggacagcccctggttgcgttttatgtcttcgaattgcaggcggctgacgttgccgagtgggtcgtgcacctcggctccacggatctcgccggtatcgctggcgaccgtgaggcgcaacttgcccacggccgcgccggcaccggtggcgctgtcacttcggggcgcgagcatcagaaagatcagtcggccgtcgggactggtgccgtcgatgctggcatcgaagtcctgcgccaggcgccccgctccggtgaggaacgaaatcggcgtggtcgagcggaacgcctcttcgaacggggccttgagaacttgctgctcgtcgggttgatagaaccacaacgtgctgccgtcggcgacgatgatgtcgcgtgcgccgcgatcgaactcccaccgcatcttgcctggtcgcttgaaagccacggtgccggtcgcggtggtggtctttcccaggctggctatggtcatctcctgtttcaccgctgccgtgaagtcgcgcgtcgcatcgtagcgctcctgtaccttctgcacgaccgccgccacctcgagtgcggaagcaccgcccgccagtagcagccaggcccaggtcagtagatgagcgggtctcatcagtcctcgatccgttgcgccaataccacgcgagggcggccgttctcgctggtgctcaccacgccttcgcgctccatccgttcaatcatgcgcgcggcgcgattgtagcccacccgcaaccgccgctgcacccacgagatcgaggcctgccggctttccgtaaccaggcgcacagcttgatcgtacatgacatcgtcgtagccgtcatcgctgccgacgccctcttcctcctcgtcgtcttccagcagatcgagagcgtactggggtcgggcctggcgtttggcgaactcggtgaccttgtgaatctcggcttcggaaacgaaagctccgtgcaggcgctgcaccttggccgtccctgggggcagatacagcatgtcaccgccgcccaggaggcgctcggcgccgatgcagtccaggatggtgcgtgaatcgacgcgggccgtaacctggcaggaaatccgcgccgggaagttggccttgatgagcccggtgatgacatccaccgatggccgctgcgttgccagaatgagatggatgcctgaggcccgggccttttgcgccaggcgcgtgattgactcctcgacgtcgcggccgacggtcatcatcaggtcggcgagctcatcgatgatgaccacgatcttgggcatgcgcccgtggcgcaacgccgcagctagcggctcgccgggcgcgcgcgcaggttcctcgccgacgacctccgtgagctcaatgacacccgcatgccggtcctcgtcggcgcgttccatcagccggttatagctgtcgatgtgccgcacccccttttccttgagcagacgatagcggttgtccatctcttcgacgagatgcttgagcaccaccacggctttcttcggatcggtgaccaccggcacgagcaggtgtggcagatcgtcatagagagacaactcgagcatcttcaaatcgatcatgacgaagcggacgtcgcgcggcgacgccttgtagagaatgctcatgatcatggagttgatggacaccgacttgccggtcccggtggcgccggcgagcaacaggtgcggcatgcgcgccaggtccgccaccaggggattgccggtactgtctttgcccagagccagggtgagggtggactcggcctgggtgaacagatcgcttgcgaggatttctttcaggtagatgtgctcgcgcttggtgttggcgacctcgatgcccacgactgccttgcccggaaccggcgccaggatgcgcacgctcatagcccgcaaggccatagccaggtcgtcggccagggtgacgatgcggttgaccttcacgccgggtgccggttcgatttcgaaagtggtgatgaccggccctggccgaacggcaaccaccttgccctcaataccgaaattcgccagcttcgtttcgagtatatcggagttccggcgcagggcgtcttcgtccactcgcacgacgctatggcgggggatgtcgagcaggctcagggcgggtagctgatatccattgtcggcaaacggcaggagggtctgccgcggttgcggctcgagtttgggctcgctcctgatcgccgcttcttcgcccagcacgatgacaggaaccggccgctcgatcaggggcgcgcgcttgcggttcgaggcgggctgtgcgccaagcgcctggcgttcctgtcgggcgcgccagcggctgtgtacgtgcagcaggccggcagcgaccgaggtggtgctgccccgcaatgaccaccccgtggtgaacatcagcgagaagagcagtgacacgccggcgacgacgtacgcgccgagtgtaccgcaggcgtcgcgcagcagcctggcaagaaaacccccgcaccagccgccggcgtgcacaacctcgtcgcgaccaaggccgccgccctgcagcgctagcccgaagcctaccgccagactcagaaacaggccgaccgccgcgccggcgcgcccgggcgagatggcctcgaaacggcagcgaaacagcttgacgcccaggactgccagcagcaccggcagcaggtagaccgccaggccgaaagcgtgcatcaacacgtttgccaagccgtatcccaccagccctcccaggtcggagtgcacctccccgtctcgaaacgacaggaagctcaccagcgcgaacagcgccagcgcgatcgtgaggacaccggcaacctcgttgaacagttcgctgctctcacgctcgacgtcgtctttggtcgccgtacgactgcgccccacctcacatctccattacaaacggcacgatgacgggccggcgttccagcgaacgcgcaaagaagcgtttcagagccttgcgtacttcttctttgacctcgagagagtcggcgcgcgactcggccgtgatctgcctcagagtctcgacgacgatcgtctttgcctgttcgagatacgcctggccctgctcctcgaaaatgaagccgcgggagatcaggtccggaccagcgatcagctcgccgctctgctggtcgattcccagaataacgagcaccaggccgtccgaggagagatggcggcggtcgcgcaacaccacgtcttcgacatcgccgatgcctttgccgtcgacgaagacgcgcccggcccccaccgtctcggacaggcgggcagcgctcgcatctatttccagcacctgcccgtcctcgagcagaaaggtgtcctccgcccgcatgccggccgattgcgccagagcccggtggcgaaccagatggcgatactcgccgtggaggggcacgaaatagtgcgggcgaaccaagcggagcatgagcttcagctcctcctggctggcatgtccggacacatgcacgcccgccccggcggcgtggtgcacctgagctccgcggcggtagatgtgattgatcatgttgctgatcgagcgctcgttgccgggaatgatgcgcgaagaaaggatcaccgtgtcgtcgggattcatgcggacctgccggtggtcccccaccgcaatgcgaatcagggcggaaagcggttcgccctggctgccggtagtgagcagcgtcaccgcgtgcggcgctagttgctccagttcgccgacctcagcgaaaagggaaagcgggaattccaaatagccgagctgggaagcaatcttgatgcaggtgttcaagctgcggccgacggtcaccacccggcggccgtgacgctgcgacaactcgatcacttgcgccaggcggtgcacgtgcgaggaaaaagtcgagaagaagatcttgccggagctgctgctgaaaatgcggtcgagggcgccgtgaacggaacgctccgaaggcgtgtatccttcgtgctcggcattggtcgaatcggacagcaggagcagcacgccgcgggcgccgtactcggccaggcgttgcagatccgaagcctcgccgttgatcggcgtctggtcgatcttgaagtcaccactgtgaataatggtgcccaccggggagctgaccgccaaggctacggcgtcggcgatcgagtgggtcatgtgaatcgcttcgatggtgaacggccccatctcccacggctgacgcggccggaacacttccaacgggatgtgcatcagctggtgttcgcgcagcttctccgtgatgagcccgctggccatgggcggtgcgaagacgcgggcaggtagatcacgcagcacgtaggggagcgcgccgatgtgatcctcatggccgtgggttatgacaaagcccaggaaccgctcaccgagacgctgcagataggaaagatccgggatcaccaggtcgatcccgagcatgtgcacttcggggaacatcaggccgcagtcgatggcgatagcggcgtcgccgtactccacgaccaggcagttcaggccgatctcgccggcgcccccaaggggaatcacgcgaagcggaccacccccgtgagcgaccgaaaccccgccggcggccaatgtggaactcgtttgagtcgttgctgaaaaattgttcgcggtcagacgcaccacccttcccaacctgcacaacgggccgccaaacacagccataatagctgcccgcgccgcagcgagtcaatgtgaacctcctcccccgccccccctatgcccttctcctcgatctgctcgcccgttaccgccgtgatcaccacgggcgtctcggtgatcagctccgcccggtgtcgcgccgtgaccaccatttcttcgacctcaaccgctacggccttggctttggccttcgctccagccgccggcacgggcctcgccgcggccgccttgctgcccggttgagccacctgagcgttaacctggcctggcgccagggcaacaagcaagccaatctctgcagctgcgatgagcgaagataaagctctcggtactctcaaggtactcatatcgctccctccccttgtctgcgttgtggcaccttcaactgtgccgtcgcgggcccttcccgcgccggcagtgttccccggctcgctatgacttctggccctacgtattgccttccggcagtttttcgaatttcagtgaatactgttggataagctcgctttccctcgcggtaaacataggttctgtttccactttgaagaagcgtgtctttcggactagggtgctgtcagaatcaatgtgagcccgcagctcaagatgta

SEQ ID NO: 578 - DNA, 16522 bp, Artificial Sequence
  Synthetic Oligonucleotide
atccccgcatcctgggcgctgaggtctttgaagacgggaaccaccgaggccaccggcttgtagggatagggaagcgttttcctgtcatcctgccggatgcagaaggcgaagtcgtcctcgcccaggttgacgccggccttgggatcgaaatcctccaggtaccagctttctgcaaacatcttcagggcgaagccgtggcgcggctgccccttcccgatgatgaaatgcgtggcccggggcaggatctggcctagtttgacctcatcctcacaggcctggcaattgggcaactcgccgttggcgtccggttccacagtccgttttccgcattgggggcagaggttgctgtgataggccgcctgctcgatcaggaatttcccgctctgccagcttttcccgtcctgcaggtaactggaaaatttacggagcttggcctgctccatgcgttcgatgaagctgtccagggttgcggggaaccggtcgcttttcagggccgcgaaaggcactttcaccgcccaatccaggttcaggctcaccgcgcccatgaactggcggtagaactcctcatcgacctcttgtctgatcagctccagctttgcctccatttctggcaggttgggggccaagagcatgaacttgccgcccgcgttgatcaggacgcactggcgcggcaggcccagttcacggcagatcctctgcagaacgatgtcgcagagggtcttgatcttgaacgagcgggcacggagggtcttggcggctttccgggaatgctccggatgcaggtcgaacaggtatttctggatcccgctgaggtcgccgccgatcagcatcaggatgtctttgccggacttgtccagatgctcaagctgctcccgttcttccggtctggccaggaaataggcgtgaaggacgctggctatccctgccgtgatgcggctgtgataataaagggagttggtgggtttttcctcccgggtgttcgaggggacgctccagaagtatttttccagcagcgaatccacggcgtcaaccaggttcggcagcgtgatcgtgccggagcccagggcgttcagaaggttgccgaattcacccttgaagcccgtgaagatcgcttcgtattccttgcacttcagggtgtcggggctcgcttcccgggggaacacagcctcgcctggctccgcctctatcaacggcagtacgctgtcagaggccagcgaatgccccagatgcacctcggagaggacgctgtgaagctctttcttcttgtaggcccccttttcggcggcctcctcatcgggttgccggtcccaggaagcggatacccgatccgcgttgatcaggcactggaccagccaaaaatcggggtccgtcacgttggcgaaagcggcggcattatggtggctggcggctaggttggccacctgttcccagtcgcgccccggctgggacaggacgccgtcgaaaaactgccgtgtccacatcacgtgctggtgggtgggaacattgttccagctggggcagtacgcctcgtatttggctttgccgatatcgacctccgccctctgcatcaccttgccgatgtcatgcagcaagccggccagggccatgtcgtacacgtcgatcatcatacctccttatctaaagtatctcatatttgcccaggccgaaggtggtctgtttgccggcctggatcaattctccaatttttagcagtcccacagtttgagcggaaggcgcggcgatcctcacttcccccatcaggccacccaggctcatcttctgctgctgcctccagctcttgcggtacatctcctgccagtgggtggaggccgccacctccccgtattccggcgcgaaaggcggcaatgggtcactttcctgcagaaaataacggcagatgtattccacccgctggtagacgctgcgcagcaccggctgcagcatgaagccgctcatcagcctgccctcgtgcttcagccggaggggggtgatgaacctaaggccgatctcgttccgccgccgggggctgtaactgatagtgtggatatccggctcccggatctcctgcacgcccatcctataaagcgtcctaccgtctaggtcctgtacccctgccaggcttacgggatggttctcgccctgcagccgtagttggcgcccttccagccgggtgagcaggtgcatgatcgaactgccgtattcggccaactggccaaagatcacgagctccatttccactctctggtcccgggtgtctgtgtggcggatgatgtaggggcggtagctttcgtggccgtgaccgacgtcttcgaacagtctgcggtaaaggcagccgctgatggggcagtcaacgcagtccaggcggttctggatgcaaaaggtctgcctcagggcccgaccaaagatgccccggaaactggaatggaaggaataatcgctgcccacgcccacgcccacatctatggacacacccagttttaggtaagggatcttaacgcccatcaaccctactcctggctgacattttccctgaggtgccgccctgtgatttcgcggtcttcatgcctttgcctgttcccggctactggctggtccgccgaaggaatgaccgtaacctaagctcaaccctccgggccggctgttcttgcaggcgggggccaaggcttccttcagaacgtacacgcaatctcctttgtgctttttgggatccccctcccaccaggcttggcgaaactacaaaaatgcggcctaatcagctttccatcttcacttggctaatctgcttcacgtccgggtgcggaggctgtgacactcacaaaactatcaaatcagacggtaaaattttggcaagtgtttttttggctcaagttcaattatggtgggtagaaaaaacttgagaggaacaaggcatggtttttaatgacactgctgccatggttcggtcagatctgctctatatggagacttgttatagtgggtgacacgtttcaggcagatcctgattacctggcagagcctgtagtagacgaactggtgcaacttgccccagtcctttttttggaagcagatgagcttgggaaaagcctccgcgatcttgtagatcatgtctttgcatgaatagacgaagtatagcgagatggtcatcaacatgttgaggttcttcagttttacgtagctggccaggcgcgttttctcccactgcaggtcttgtttcatctgccggtgcacttcttcgatcttcaagcgtttgtggtaagcgcagactgcccgttgggtgatttccagttccgacaggccgggatcggcgaagtcacagatcaggtagaattcaggctccttttgcctgctttttttaaacctgcgacacaccaccaggctggcttcaaccccattggctttggcggagggatgatcatcggtccggactccgatcctccatatggcacagttgagtgaatcccagatcaattggcaatataacgaacgttatctagacaggaaacatcagcgtagcgcatgattccaatcatgctttttttactggaaacaagccatgaccaaccgcagcatcggagttacatccgtagtatcgactgatgccggtcatgcgattcatctcattccgcagttccacgcattgccaaaggccaagttccaacaaccaagaatcgatcaattaatagccttgcagggacgaaacctgttgacgccgtcgcttgggcaaacttcgatagtggtatcggcagtgggtgttaaacagcagacacgaaataagtattgacaggaatcattcacattgtgatttgtatggcaagcattagcttgatcagatgaaggaggatcgatgaaacattttgtcgtttttgtgcttttgctgatctgcgttacctcaggccaagcccagacagtgatcgctcatcattataacgatttcgacactttcgccaccttgttaacgggtacatatctttggtcagctgtttatggtggcctggccagaacgcagaactacgcggatagggcgaaaccggagatattcacctccgccaattcagccttgccatcggattatgtgtcctgcctggcctcagacggggaggaactgctctgggcaggcacggaccagggcttgaccagatggaacgatggggtttggacgattttcacgaaagacaactcagggttgttaagcaatgaaataagctgtttggatctcaccgacacaggtaccctgtgggtagggacagacgtgggggtgtcctgcctgcaagacgatacttggacatcagttgagactgaatctgcggtccaggctctggaattcgacactaccaccgggaacctgtggctggggctggacggaggtcggatagcccatttgaccggtgacagcctggtcgaggtcctccacatccccctatttgaatcatatcccggccactttgaaggcaactccgtgaatgatctggcgatagaccaccagggacgcttgtgggctgccctggccagcgggcttgaatgttattccggaggaagctggacacactacagccctgaagatttgaaactgattggtgtgccaaatgccgtggcgatcgaccgaaccggagtcgtgtggaccggcggggtgggtctctcgtacttcgatggcagtaagtggatcgaagccaggccggacgaatcgatgatagccaatgtgcattccatggagcccctagaaagaaagcatggtttttacctctcggtctcagccgcagaagttgccgaaatcggcgggggtctgcactttgtggacgtggataccgatgatctcgcggcaaccgcagtccaagtcatccgcaacaatgttttcccggagctgaagatcgttgagagccattggcaacatgtagaagacatcccggaagatgcttggtgggatatagaaatttttggagaccccgcccggtttatcgtggccagttcactgctgggttcccccttgggcgcaggcaggcaggtctggtacgatgttgccggagacgtgttccatggccaaggagtagaattgcttccccaacccattcccgatctgagcgagtttttccctgcggatggtgcggttgtctatgatcctgacctgagtgaacttgacctgttctggtccgcgctttccggtggtgaccgccgaacctgcgaacgcttgatagcccaaggtttcgatgtcaaccgatacgccgaggagttcagtcaaggctttatgcaggacattgaatacttctatcctaacgataccagttggttgtactatactgaagaagaggtcgcccgcgaagtgcgtgacatggcccatttccgggtaagagagctcacattattgaaatcctgcggattaagattaccgcggaaagcggaattactatcggcagcaatcgaatgtgacatgccggaactggtgatagaggccatcaggcaatactgatccccagggcttcgagtttgactatgttggtgtcatcatcggccccgacatggtctataacaagataaccggggccttggagtttgacatctcaaagacccatgatccggtgctcaggggagaccccgccaattttcatgcctatgtgcgcaacatctacaaggtcctcatgaccaggggcatcagaggctgctatgtgtattgcgttgaccccgacacagccaaccacatcaaatccctcctgcattgatccggaggcaatatgcttaattggtcgattataagagccaggggggctgtgtgagtaaaaccgcaggttggtcctcaaagttccccgctttcatcacaacgtctaaaaaagacatcagagagtgcttgcaggaatttgtcggggatgctgagcaagctcaggtgaatgcctggaaccagtcgatccccgtcatccaaagggaagcagccgagatcatggccgcggaccccagcgcgtcagactactcctcgataatggagtttcgcttacccctggaatccagacgcaccgatgtaatattccttgtgaggcacaatattgtggtactggagctcaagggcaaatactcgcccaaccaggccgatctcgatcaggtggcagcctatgtgcgtgacttgaagtgctatcacagggactgcgaaacccggccggtcatccctttattggttcccatgctggccagaggcgacatgggctatatcttcggggtcagagtggtggggcccgattatctaaacaaggtggtggacgaactcgacaaggcatcacccacagagcctgtagacgaagacaggtttttatcggaagaagcctaccgtccccttcccaccctgatccaagccgcccgagaattgtttcacaccggcgcattgaggaccataaaaagagccagggcggccacagaccccgccgttgacgagatatgccggatcatccatgaggcttatgagactcaaagccgacggctgattcttatcactggcgtcccaggcgcgggaaaaaccctggttgggctgagaatagcccacgcccattttctcgatgacctggtggtcgacaggggcaatggcaagcccagtgcccccgcagtgtttctgtcgggcaacggtccactggtgcgggtgctgcagtatgaattgcgcggagcaaacggcggaggcaaggcttttgtccgtgatgtgctcaactacgtcagaacttactccaccaccagagcaaacatacccccagaacatgtgctgatctatgatgaggctcaaagggcattcgacgccgaacaggttgccgccaaacacaaggatatcccggggtttgtttatggtaaatcggagcctgatctgttcatagacttcgcagaaagggttccgcgctggtgtgtggtcatcggcctcatcggcagcggccaggagatccatatcggcgaagaagccggcctgagccaatggagcaaagccatagaaaaatcgaagcggtctaatgagtggattcttcatggtcctgcccaggtccgtgaggaaatgctgagcaccaagttgccctatgtagaatccgaagacctcaatctggacaaagaaatacgtttccatttggcagaagatatccataatttcgtgagccaactcatagataatagatcctctttgctggatgacctgaaatccattgccataaaactggaacaacagggctaccatctcaggatcacccgggacatttccttcgccaggaaataccttcaggaccgatatagggataaccctgacgccagatacggcattgtggcatcttcgcgtgatcgtgacctaaaaaggtttggcattctcaacgactggcagtctaccaaaaatgtcgatttcggcccttggtactctgatgccgaagatgaccccaggcagaaatcatgccggctgatgagagacgttgtcactgaattcggcgctcaggggcttgagctggatgccgttctgctggcctggggcacagactttatggttaaagacggaaaatggtcaaatgcgaaagcctcgagatatcagaacagcagccgcataaaagacgcggaacagctcaggataaatgcctatcgggttttgctcacgcgaggacgtgattgcacggtggttttcatgccacaactgccagaacttgacgagacctacgagtatttgaccagacagggatttatgcctatatctatgtgactggagatcaaggtttcgcaagattctaataaacattcacccccacgcatgtggggaatacgcggaggtcggtgaagtcgtagcggatgatgacggttcacccccacgcatgtggggaatacggcatactgtcccatgagggcatcgaagcggccggttcacccccacgcatgtggggaatacttgatgcgctcccagatggtggcgaggcagaccggttcacccccacgcatgtggggaatacgtgatctgccgggctgttttcaatgcgcgcgccggttcacccccacgcatgtggggaatacttgacacggaaggcgatcaattagaacttgagcggttcacccccacgcatgtggggaatacctcagcgtggcgtagttggccgccgtgaagttcggttcacccccacgcatgtggggaatactgtggaaccggaagtcatggccgcgatcaacgcggttcacccccacgcatgtggggaatacgtatcatgccgccttcgggtagatgatatactcggttcacccccacgcatgtggggaatactccagtttccattgctgttcgttcttccaaaacggttcacccccacgcatgtggggaatacgccaagtggggctccgatcccgtcatgaaggacggttcacccccacgcatgtggggaatacatcacggtgcagggattgacctggacgagggccggttcacccccacgcatgtggggaatacggtcgtggcgtatttggacatcacgtcccattcggttcacccccacgcatgtggggaatacaaggcaagaccaagtggacgccgatgtcaaggcggttcacccccacgcatgtggggaatacagcatcgggatctgcctgatcggggtgcgggacggttcacccccacgcatgtggggaatacattgcgtccaggtcccacggcaccttcgcgttcggttcacccccacgcatgtggggaatactcaatccaatggatccgcacatacatcgtgtccggttcacccccacgcatgtggggaatacaaccaccaatatctggcggcggcggcctcaaacggttcacccccacgcatgtggggaatacacagacggcagccagaactatatcaatacgaacggttcacccccacgcatgtggggaatactcattatcttttttcctccgtctttgtgcttacggttcacccccacgcatgtggggaatacccagatcatctgcgcctggctcgtgaatctgtcggttcacccccacgcatgtggggaatactttttcagattcccggttttggggttgaccaccggttcacccccacgcatgtggggaatactcacgagctttgagcggaggcgggacatcaggcggttcacccccacgcatgtggggaatacccttagtaaataaagggtttcaggctaaccacactgccttaggtatggttcacggatgtttggtcataagttttagtccttcccactcggtcacgatcctttccgccgcaccccagaactcaatgccgaagccttgttcgcaatgtttgctgaagatcatgaggcaggtaccgcccgcacagccggatctgaccttgtcccacagcttttctctcaccatggccgatacttggccgacaaagacacctgcttttacttcgagaagccaatgagtgatttctcccctcagggaagagggtactttttcaagcaccaggaccatcatcatggcctcctggatcgtccaggccccaggacaagccgcctgggctggcgctctcatccgggttccaaagcccgcccggtgcggctgggtcgacatccgcatggtctggttcatcttccggtgtttccaggataccgaacagggagtggatatcagccacgatcttcttcagcaggccaaattgatagaactggtcccggcaggccatgcgtgtccggcggtccaggttttcgatcccggcggcagtagccaggaaggccgcgggtacggaggtttccatcttgtagagatcggcaatgtcataaacaaaggatagctgtttgccagtatggacgaaacccagggcgggagaataaccggcggccactatcgcggcgtggcagatgccatagaggcaggaattagccacggaaagagcccggttgatggggtcggttttactccagttgttcctgtcgtaatttctggtttccatgggcacgttgaactctttggacaacctgaaataggtgtcccgcaccctcgccccctcctttcctcttatctgctcaagagtgagggatgggtccaatttatccttgaacctcagttcatacatccggcgcactatcctcagatgcgcttcccgatctgcccaggcggctgcctgacgcatcagattggcggaactgcgggtggtccccgtcccggctgcgtaaaagcggaccccctgttcccccacccaagcgaccaagcagccacaatcggccagcaccaggatggccgcgtgcgtaatggaaacgccaggccccagcatcagcaaggcaagaccagcgcaaggaaccggagtggagcccatggcatcgtgaaaggcgatggcctgctcctctttgtccaccttggcgtgttccacatagagatagctgacgcggtcccgcatcttgggaatggtatgcaggtctttattacgcatcgcttaacggaaccacggagagcaggccgaagcccatgcttttagcgctgccgatccctttggccaacgcagactggaacagcacgacatcatccactttcaaatatccttccagcaaggcggagcggtatctcaagggacggtatttgttctcacgccgaggcgcatctccctggggctctggcttggagccatacacccaacccaggttcaccagctccgtgttaaggggcgtgaagcccagcctgtcggccttggcggcgaaccattgggctacagcgtcgccagggttggaatcggtctcccaggtaagggcaacccgtttgtgcaggacctgtccggatttttctttcccctcggggctctccctgacctcgtcaattttgcgtttgacgctggcattgatgaggatgcggtagcggagccgctgtcctgtggagaatctcggatcgtattccttaacctggggcggagcggccagaaaacccgtggcgttttggaaggcccagtcccaatccggcctaaggtgtgactgcaccaatatcatcgccctttgctcctctccgtcggtgttgttgtccacccggaagaggaactggcgttgttccaaatctgcaggatcgaaaggctgcaggaatttaggatctccatctctgcgctgacgcatgggaaaggccatggagagcctgcggtggatgttgtacacgttgttgagccacaggcgtcccggcctcggacggtcgggatttccgcctgtatcgatgagtagttgggataggtagatcatccgttctcctccttgggatcgagcttgcgcctgcgctgttccagcgagcggaatttgatgatctcctcacgtttggccagaatgcgctcccgccagtcagggtcgcaggggtcgatgcggtccatggtcatgccgctgccgtattccagcatggtgcaggcatcatggcagaggcggcagagggctcgcaggtcctcaggctcctcgttacctcccgcccggcggtaattcacatgctggacggtggtggccggggccttgcagaccatgcagagtcccacatccatcaccaaacgttcggcgcgtacccttttgtattgggaattactgtaatcagcgcgactgcggggcggatgccaggtcttaccgatgagcacctgatgtacctccaactcattgctcaggaccagttccctgctgaccacgaagcggggcaggtgccgcggaggctggaaggacacgggaatgtcataatggatctctgcctcatccggggctggctctccgtcaaaggcgggtatccagtcgagaatgcactgaagcgttgagggatcgggttctccgtctttgcgcttctgtatcggcgcggccgccagggcttcttccagtgaagcatggtctccgggcggatgttcccccaccggccgggaaggcgggcaggatttacggcccagatatagcgcccagacaggttttcgcaacgcttcggccaactgctccactatccttggctcaccctgcaaggccaccagaaagctggcatcagccaagtattcgcgccgggtcagcataccccggtcgtcatatttgaggtttttttgtcgcagcctggcttccctggcctcacccacatcgctcaggtctgtcggcgcttccagattggagatgcgcatttttatccccgcacccaccgtatgataatcccaccagcgtataccggggcggtctacgcggacccccatgcgcagtttggccagttccggcagccagtatttagcggcttctgccctgcccacacccagggcagcgcaaagcagcccgaatactcctgatttggtgggagcttcggaggtgcggcgcacggagaatttggcctcatggctgccccaggcctgaagcggcccctccagccttaagaacaaggtattggcagccatgtcagccttctgttttcagttgtttgatggcttcccaatcataaccgcacttgcggatggtcttcctgaccagttcttccagctggccgacctgttcggcatgcagcccgcccttctgcggctgcagaggatagcgtccgttgggtgagaaccaaaaggagttgccttccatctggccgggaaaatatccctcgctgatgtcctgcacatagttggccagttgtcccacgctgagttcgaccaggtccgattccgccaccagcttgaccggccgcacgaaggcattggcatagctgaccggggaacttttgaactccaccaggatgccgtcgggcaggttatgggcagcgaagctgttctgtttgccgctggggttggtgcgcgcggcagccaggaccaatgccccgacggtatgggcagccaattctttgtttcctttcaggttctcgaccagctgctcccagtcgatggaaaaatacttgtagaaacaggccgaggcgaacatggcctcatccacgtagcccgcaccggcatccgctcccttcacgtcatcagccgcgacatagtagtcgatctctggccgggccgcatgtgtggaaattgcatgggccacctgcagagctgcctccaccgtggtgtccgaccacttcacactcttgtccttgccttctggctccagcatcctgccgcagagggcaatgtcgggggtataggtcgcatgggcgatcacatcggcaacttgctgggcggcttccgtgatctccagggaagtatcaaggacgatccgggcaaggtcctttaccttgtccctggacatgaaaacgagcattttgctgttgttgtcctcatgcttgaagccacatttggtgagtatctcctgggctttttgccggcaatctgtctcaccggcctcctgctggatcaggtcggccagtctgcgggtgcgaactccgcccagcaaagcctgaaaatcttcgctggtcctgatgctgcgtttgaggcactggctggagatgcgcgaacgcagcactccaccgaaataacaggtcttgggcgcgccaagatcgtcccggttcagattggccgggctgtgattctggatcatgtggatctcgatcaacattttagttctccttgttgtgttcatatgatgcttgattaaaggcctcagcccatttctggcgcaccagttcattgtgccaggccgaaaggtcgttggtaagttttatccagtcgagggaggcgcagttatacagcccgatggtctgcagcgcccagccgagcgggtattccaactggctggagcttgcccgcaggatcgcgtccgttcgggccataaatgtgcgtctctccttgttagtgtgcagggtgccgtagatgcggccgagcaaagagggcagagttttaccgtcttcctgggcgagcgggaactgtgcgtagagcttggccaccagccaggcgatctcgcgccgggggacccttgatgatgtcctgcgcagagtccaccagaggcccgtgaacaggtcgaacccgtccaagtcctcgtgcaggtcgcagcctttcagttgcctcaggcggccaaggtcgcctgcttttagctcagagatccttttgacgaattgagctgtgggcgtgtcagtcactttggtcctcctgtgtttctttgttttgaacatcaggttgttccagccgggggcgcaggtgtcgcaccagactggcggcacttgcgtcagcagccgtggcttccggggcataagcccccgagatcaccgtgagcagccgccggtacagggcttttacaggatccggtatctcgccttcccgggggatgaatccacccgtcagccttaccgcagcatggaccaggtggggggagatggcgctgaccaaagcttcgctgagcggaaccttaagcctgcccgcgacagctttatcggccctggacagtctgtgccgctcatatgccccgatcaggcgacggttggcctgggcccagttgggcacgctgtgggtgtctttcccgggctcttcgtggggaattctgatcgttgtttcccagacatcgtcgatcttggcctgattcacggccacgcctatgcagagcacgctcaggccttcattgcgagatgattttgtgtccgcatcccgtagcggacgctgccagttcttatcctgcagcagaggtttttcagcgatcaggttttccaccttgagcggcttgttctctttgccgccgtagcagacgtgaggatcctgccaatggggattggcaatatctccggccgtctgataatcacaggaatggaccaagagccccggccgttcgccgcaaccggcacaagccacatctccggccacgggttcatgcaggcggctgcgtctggccaatgcggtcaggcccaccagcagcggcacgggatcggtcctggggtccacggtgttgtcaacccaggccggggttcccatcaggtcgcgtggctcccagttcaggcatagcgtttccgccagtgtctttccccagggtagcgcgtagaacgggggcattccgttgatgctggatttgagtttcggcagtccggaggtggcatagacggtgaaacgcagcaaaccctgtatgcagcagggcaggcacaggccggaaacataatccaggctgtgcttgaagtgagagaaattattcccggtggggatttcgtgcagcaggtcagttacgggtcgaacatgccgggcggcagggtcctgataaaaccgggggccattgccatagagctcgaaatattccctgttttcctctagccaggatatccagggggccggaagcggcttgccgggctcaggcggtctgtcggtgttggcaaaacaccagtagcccaaggcgagtatgaacctgaagaccgcgaaccggtccatgggattgctgtaggcaagatgcagcctgtccgcatcccgcagcgcctgcagcagacttatacggccagtagtgccatcgcggcgaagcacccttacccaatcattgttggttaaatcatacattcaacactcctttgcttagtgtcagtcccttcatggacacctatcaaggctaccttgcctactttggatcaggacaaccagaagttcgggcattccctgatgcgagcctgcctttctcataatggctttagaagcgctaccggagagcatgaacctgttgcgacgaacaggtggattccctgtagaatgactcgccgagaaggtggataataggtattggcgagaactcaagatgcttctcgactccaaggcagcgtactgaacattctcgtcagttatgctgctgggcatttcttgcctgtgacggtacaagaattttttattccacatagctgatccaccataaatcccaataatggcctgaaggaaatattggcaagaacaattttctctacctggtctcggtcattattgaaggaagctccagaatgcagagcgttatgacgaaagtggttgcgcgattggccagttagcacaaaccgcccttgacaaaatcagcttgccccctatcatggccctaagcctacagaccctacatagaatgccctccaaagcgtgggaacaccgcccggtgattcccacgtttttctttttggctacgagcttcatgaccgccccaacaaatccttgcctgaatacggctgtccctctaatttttccgcttcaggcgacacctgatgcctggccgcaaccgaaaaccccgtaaacgcggtctcaggggccatgacggcaaatcggatggataccatgtaacgggtaagaacgatgggattccccgctttttttactgtgccataaaccgctatggactggatcccagcagagggaggtggacggcttctgtggcaatcggcgtaaggttgtccgagtggtgatggcgcaatgcgataactagcaacagggcgacagataatgccctgatcactatcctcgggctcgtgggcttgcaatgcttccattccatggggccagcctctgtcgcttccatcggcatcttggttgatgtagtttaaataatggccttctcggaaaaaattgtagttgcggatcttaaacttgggcgtataatcggcacacacctcagcataagcccgaaccgcctccattagttggtcctttgtgcatgctcgctcctggcctatctcggcgggacaggccaaagccgctatgat

SEQ ID NO: 579 - DNA, 16363 bp, Artificial Sequence
  Synthetic Oligonucleotide
aacggtgcaaaagcgcaggatatagccggtgatctgcccctgcaggatgttttgctcatactgctgcaggatgtagctgggcaccacgcggttcatatctggctacctgccttgcctggcttaactataatctcctttctgcctacttatcccccaggctcagattggcgaaggcggtgagggtgatctccgcgtccgcgctttccagatagctgacgcgtgcccggtcgcccgcgcgggtgatgggcagacggctgctcaggttgctggaggcgataaagattatatccggcgcttcggtcagggtaaggtagtagtaggtgcgtccatccgtggtgtccgagccaaagcgggcgatggagcctgtgagggtggcctgcttgtccgctgcctccggggatatccccatccggcttccggccagggccatctgatagttgtcgcgcgcgctgcgcacgctttcacccactcccaccagggaaaagtcgcgcactgaaacgaagctgaacatcttgattagcccggcgctgtccttgagggtcataaaataggtcggcttgccgttcatgttcaccaggatggggaaggtggcatagtatttgaagttttgcaccttgccttcggcggagcgcatggcggcagtctcggtggcaccggagaccaggtagaggtggctgcttttggtgcgggtgtccgtgagcgcaaagcccaccgttccctcgtccgaacccacgctggtgaggccggagtagaaatagctgcgctgatcgcggccatagatcacgttgtaaccgggcgtcacccgcagcaggtcgcgtttgccgaacacgctgttccaaaagccgtgcacatatttgccccaccaggaaagctggggaagcacaaagtaggagggctggatgcggtcaacccaggcgggaatcttgctgtcgtcatagatgccgccgctttttttgaggggaaagtatttgatctcacccgtgccggcatgcacgatggcgagtccggtggcttccggggcactcactccgatcttgtgggtgtaggtggtgatggtccagtagggttcgccattgtcgtccagttcaaaggtatcgcctgccaggccgatgcccgcgaagccgttccaccagagatggcggtagaggtcttgtccaaagtaggcgttgcgctgatagcggatttggatgggtttgcctttcagctcgcgcacaaaggtgatatcctgcggattggtggccgagaccttgatgtagcccggggtgcctttgcttgtgttggtgatccacttccagaagccgctgtgcagcaggggacagacccagaaaagcttgccatccaccatctggatggtcgggttgccgagcaccacccggctgccgagggcgaagtcctcgcccagtttcttggctgccaaatccttggcgaaagcggaatccaggatcggcacctgatccagattgaccggcgccaccaggtcggaaaactcggtcttttccacctcgccgatcatgcggcggtagctgccggaattgaagatgccggaagagaagaagggcgccaagatcagccacagcgccagaaggggatagaccacatagaggatcttgcgcaggcgccggattgccagcagcggagccaggcagatcatcagggggacgatccagtccaaaaagcggatatgcagcaccggaagcacaaagtaaagcataaaacccagcagcaggacggacagcactatggcaggcagggctttgatcctgaacttgggaaacttgatcacgacaggtttgggcgtttgttgttgaaacatggtaacctccctgaactaagctttgtttttatactctaccagatggcggcggatttgtcaagccggaatcgctgcccgcctccaatacagaatggaaaaaagtggactcggctcgaagaccgctcctatccttgcggatacagaggcgcgaccgcccgctcaaacactccctgaaccttggaaatggccagcccgtaattggtgatcggcactccgcgccgctgggcttccacgatgcggcggctcatctccatctggttgagcatgcaggctccgcagtggatcaccagcgcgaagtcctccagattgggcggaaagtcgtgtcccgcgtacacttcatataccagttccttgcccgtgaactggctcagccagcgcggaatcttcacccgtccgatgtcatccgcctgcacgtggtgggaacaggcttcggcgatcaggatcttgtcgccgtcgcgcagcttgtcgatctgcctcaccccttccgccaggacgtccagatcgcctttgtagcgggcaaagaggatggaaaaggtggtcatcttcacctctgggggcaggtcattcaccaccttcagcaccacctgcgaatccgtgatcaccagatcaggcggttccttcagggtttgcagggcataggccagttcccgctctttcaccaccgtcaccaccgcgtcgtgatccagcagttcgcgaatcacctgcacctgcggcaggatcaggcgtcccttgggcgcggcgaggtcgatgggagtcaccagcagcaccctgtccccggccttcaccaagtcacccgccagggggcgctcctccagcagatgggcgggcgccagcttgatcagcagttccttggcggcatcgatgttttcccccttgagggcggagacggagacccagggcagtccccgttcctcgcaccaggcgatattggcgggggcaggctcgcgcaaatccctgtggttaaagaccattaacagcggtatcttcatctcgcggatgcgtttcagggaggacagctcgctctccgcgaaggggcggccatcgttcacaaacacggctatgtccgtgcggtaaagtatcttataggtggcgagtacccgtttttcgcccagttcgccgctgtcgtccagtccagcggtgtcaaagaaggtcaccgggcccaggggcagaagttcatagcgtttgtccaccgggtctgtggtggtgcccggggtgctggaaacgatggctatctcctgtcctgccagggcgttgatcaaggacgattttccagcgttgcggttacccagcagggtgatgtttacgcgttctccgcggggtgtgctcatctatcttctcccaaaaagtcttgcggcttgcggccgctaatagcttttattatcagttctttcatgtttctttccttgtcggactggataccagcccatgtaaaaataatatatgtgaaaagcgcgaatctgtcaagcaaagagaattctggcagacaggggcctgtgtttttgatatatccacaaattacacaaattaacacggattaaaagaacagaataaggacaagtgtccagcctaaaaacaacaaccagaccctgaaacaaaccgccaccaagccctaaagccgtgtcatcccgggctgtcggggtcaccgccaaagcgcgaagcggtttggtggggtggcttgacccgggatccagtcttttaaaaacaaccagcaagccccgaaacaaagcacaacagactaaaaaccgtgtcatcccgggctgtcggggtccccgccaaagcgcgaagcggtttggtggggtggcttgacccgggatccagtcttttagaaacaaacgcgtaaggttttaaaaaagcaggcacctttccacctcaaaacacctttccacaaattctccccccatatatataggtgctacgaccccttcatgccaggcgggaagcggatcccagggcaagtatatatatacttgcccgtaattgcgcggccatgggctggctgccctccctttcccctcgcgcgcgggtggctctcatttgcatccagcgttttggcgtgagtcttccttaggtcatccttataatttataaggttgacctaaggatgatggcatcaaatccagtagcagcaaaggagggcggtatgaaggattatgcggaaggttgtggtatttttgtggaaaggtggaaaggtgcccccgaaacaagtccaccaagttatattttgtgtcatcacgggaagtcggggccccctctggggtggcttacccgtgatccagtctttttaaaagaaacatccacaaattacacaaattaacacgaattaaaagaacattaaagagtcaacacacccgactccggaacaaaaccctccagactaaaaaccgtgtcatcacagcctgcgagccgtgatccagtgcccaggtgtggcaaagtccgtttgccacagagaccggaggtctcttccaaacaggcaactccgttgcctctgccgaacggacttcggcaacccttatattacaccaatccgtgtcaatctgcgccctttatccgcgtttatctgcgtgaaccgtggaacccgggatccagtcttttggaatgtttgaacttcgctgaaaacatttttcgctaccaggaatgaaaactggacaacaaacgcagcttgggatatctgacactaagagtgtaattcacacgatcaataagaacatagcgtgctgtgcatacaaaacatattaccgacggacttctgttctgaaatatggacgttttgaacttggtaaacagtccgtatatggactaccagctgggacttgccattaggcatatgcccgaatgtaaagctatattcttatataacgcattgtagacagcacaggttgttctctgctctttccatattacactagtggtcatcatttcaccagtaggggtttttttacgcttttttcccgggagttttcatgtaaagcaccctactggacaaagagatgggagccggaaaacacagcctgaactgggacggcaccgactccaacggcgcccaactggcaagcggagtctatatctaccgcctcagcaccggaaagacgagcgccagccgcaaaatgatattgctgaagtgacggacagccgcccttccaagtccgataattaacttgaaccgccgcgcattacacacggcggttctttccaacaagccaagtatcagcagcgggaaaactgcgctgaaaaagccgctggtggggctccgtaaaatgggagtggaagccgccgcatggaacaccttgaaagtaacaagataccgccccaaattgatctttcctaacccaaaatccgcaaagcaaatttcttgacaatgatctttggcttaaatataaggttcctatcgaacaaaaggagcatgttatgtacaatcttctttgtgataattgggtaaacgtggtctatctttcgggcaaaccagatagaatatctttagttcaaactcttgaagacgcacactgtctgcaactggcatacagcaatcctatggaccggttcgctgttttcagattcctgcttgctcttggctactggtgtttcgccaacaccaacggggagcctgaacctgataagccgcttccgacctcctggatatcctggctggaagaaaacaaggggtatttcgagctttttggggatggacagagatttttccaagccgatcccagttccaggatcagagccattaccgaccttattcatgagataccaacagctcacaacctatgccatttcaatcatgtcaccgactatatcgatgggctctgcgaagcttgctgcatcaagggactgctgagattacctgtctttaccactgtcggtggcagagggataggcgcgggaatcaacaacactcctccattttacctgctctggcatgcaaatgacctcgctggcatgctggttcaaaattggcaaccctgggataatatggggattccggcatggttgggttcttttcaaaaagaaagcaggaaagtgggcttacttgccggaatgacctggctgccgcgcaaggtgcatctgcatgatcctgtctcaggtcaggcagcatgttgttcctgcggcttaccctccaaagctctcgtctattcctgcagcataaaacctgaaccagtgccggaaggccttaaatggaaagaccctcatggtgtttacaccgatcagggaaaaagtctccagtccaaaatcaaactgatgtccaatgatagatacactttcgcggaccgggattggtatagcccgttgttcagctatttgcacgcggaaggaaactccagacaaggaaaactatggttggttggatttgccagcgataaagcaaaaagcatagacatctgggacaagatcatcgagcttgagggaactgatacaaatgatgagctactggctcaattggcaaacagggctactgcccttaatgccatgcgcaagaagcctctcagaggtgatttcaaaaagtcagtgggcactccccagattgctgacattatcccccacgccgaaagcagaattgccatcaatgcgggtaaaatgactgagaacaggggctattcctggcaggatgccgatactgaatacggagaactgctcaccaaggttgcatgctctttggagccggctcaaacagtggacgccaggctcaagagaggtaaattcatttcccgcaagccctggccagttataccagaatccaaaacaaaacccgcagaggaggaccagaatgaatagaggaaccgttgacttcattgcaagcctggagaacctcaaagaaggcgatttgggcattcttagaaaactcaggggagcccggcttgatgaaaagcttcccggatttgacctgttttccgccctatggtggcctttgcggcaaaagaatcaacgcgctcccaagcgtgaagtggcttggttgatcgccaaactttttgctgaattccgctttgaacagcgcgagggagccacattgcccattcttatgggaggcatctgccggaagttggaacccaaaaaggaattaccccgggtattggcacgctttgatcaactcgcatcgcttgacattatgcagatggaagagccgctgtcggtcatcatgggtattttgcgcaagcaccagcaggtctgcctggactgggtagggcttactgatgttctgtcattttgggagcaggaacctgtcaaaagagaatggtcggattcatttattaaagcatacaagatcaacaaggaggattcagatgttgattgaaattcatatgattcagaatcacagcccggcaaatcttaaccgggacgacttgggcgcccccaagacctgttatttcggtggagtattacgttctcgcatctccagccagtgcatcaagcgcagcatccgttttgccccggaattcgcggaccttagaggaggtatccgaacaaggcgtctggcagagaaactcgaggaaatgctggaaaacaaagataagaagctggttgccaagtttcttgaagcctgcggaatcaaaaccaaatcttccaagaaagctgcaaaaaagtccgaaaagatacccgcggaagccgatgaagatcaggatgagcagcaggcggctgatacatctgacatgctggtttttaccacttatgatgccctgcgccaaatggcaaagctgctttccgactccaaactaagtgaaagcgaaaaactgctgcagttcaaagatctgctcacaaactgcgtccattctccggatatagcactttgcggcaggatgctggagaccaaagagcttaaaaacactggcgttgaaggcgccctacaggttgcacatgcgatctccacccacattgccagacctgagatagactattttgtggcggccgatgatgttcccggtgaagacgccggagcgggtcatattggcgaatccatgtttgcctcagcctgtttctacaaatacttctccattgattgggaacagttggtcaagaacctgaaaggggacacgaatctggcagcccacaccgtgggtgcctttctcctcgccgcagccaaaaccaaccccagtggcaaacagaacagcttcgccgctcataactatcccgatggcatccttgttgagttcaagaattcccctattagctacgccaacgcattcgtcaggccagtttccgtggtcaaggaatcggacctggtggaacaaagcatcggccagctttccaactacgtgaacgacatcaggcttggctattatgatgagcaatccccagttatcagcttctggttttctccaaacaatcgctattcccttggcaatgagcattccaaactggcttccagaaacattggcaacctcaatgagcttgtaggcgctgtgttggattatattggcggcttcaagtgggaagaagttcagaaaagcaaggcttatgttggcggctgacatgagtgcgccacccaacaccttattcttgcgcttggagggggctttgcagtcttggggcagcaacgaggctaagtttgctttgcgcaggactaccgacgctcccacaaaatcaggtgtcctggggctgctttgcgcggccatgggaattgggcgcgcggaggctgctgattcatggctcccaaaactcgccaacctgcgcatgggcgtgcggatagaccgccccggcatacgctggtgggacttccatactgttggagcgggacaaagaatgcgcatggcagagctgaaggcacccaaaaaaccttccatggttggagctgccctggctgataccctgacaccaagcaaagtaaaaaccagggcagagaccttgctctcacgccgcgaatatcttgccgacgccagttttctggtcgccttgcagggtgagccggaacttgtggaaaagctctccgccgctctggccaagccggtctgggcaatttatctggggcgcaaatcctgtcccccttcacgtcccgtgggcgagcatgctccgggcttttataacactttggaggaggcgctgtccgcggttcccctgcaaaagcgctggcacaatgaacccctgccgcaaatactgccttgcgtcatggactggatccccagccaggacggagaacatgcgcctgatgacgcggagattcattacgatctgccggtttcttttcagccgccccgccatttgccgcgcttcgtgatcaggcgtgagctggttgtgggagaggatgtgcaagtgagcagggaaaccggaaccagcgtttggaggcccaaaggaacccgggcggattataacaattccgagtataagaaggtcagggcggagcggcttgtgatggaccatgccgcgtgcatggtatgcaaagctcccgccacgactgttcaacacgtgaattaccgcagggcgggaggcaaggaaataccggaagacctgcgggcgctgtgccgcctctgccacgacgcctgcaccatgctggaatacggttccggcatgaccaccgaccgcatcgacccctgcgaccccatatggcgggagcgaatactggcaaagcgcaaagatatagtcgagttccgttcgcgcgggcagcgtttccgcaaaatgaagccagaggaggaaaacggatgatctacttgtccaagctattgatcgatactggaggcaatccagaccgtccccgccccggcagaaagtggctggacaatatctataacgtccaccgccgcctttccatggcgttcccttcaggtttgcgccgggagcaggatccgcatttcctgaagcccttttcgccaaacgacttccaaaaaactcccttccttttccgggtcgataacaacatcgacggaaacgataaaagggcgattattatcgtccagtccgttcttgagccggattgggattattgcttccaaaacgcgcttgatttcctggcagcgccaccggaaacaaaggagtataatccagagtttcaagcgggacaactgctccggttcaggctgcgggtaaacgccagcgtacgccgtcatattcctgagaaggtgcaacaggacggtcaaaccatagaaactggcaacatcctgcacaaaagggtttctctcacctgggatccctcttccaccccggatcaggcccttgccgactggctggctgccaaaagcccaaagctgggcttcacccttcagcgctgtgagcttcttcaactgggttgggtttatggctccaagcctgaacctaaaaatgtcaaagcaaaggaacagggacagggctactggcgtgaacacacatacaatcctctgcgcttccgttcggctctactggagggaattctcaaagtggatgacccgaaactgttcctggaaacgcttagaagcggcattggaaaagcgaaaagcttcggctttggcctgctgtccgttctgccaatcaggaatgatgaataaagacctgcactctatcccccggatcagagatcggcttagctatctctatgtggagcatgccaaaattgatcagaacgggcaagccatcgccattcacgatgccctgggagaaaccccggttccttgtgccggcttggctatgctgatgctgggaccgggcataaccatcacccatgcggcaatactttcactggctgcctgtggctgtctggtagcctgggtgggggaacatggcgtcaggttctatgccgcaggcacaggtacaacccgtagcgccgtcaatcttatgaaacaggcaaagtactgggcagacccggttttgcatttacgggttgtgcgctccatgtatcagttgaggttccaggatgagctttctcctgatttaactttgaaccagatcaggggcaaggaaggtgcccgggtgcgcgatacatatttccaactctcccaaaagtatggtgtgcccatgcagggcagaaactatcaaagagacaactggaataaagcggatcccataaaccgggcattatctgtggcaaactcctgcctctacggcatatcgcacgctgccattgttgctgcaggattctctcccggattgggctttgtccacactggcaagcaactgtcatttgtctatgatatcgcggatctatacaaaatggaaatggctgctcccgccgcattccgggcgaccgctgaagggatcggcgaactcgaccgcagagtcaggcttgcctgccgtgatgaattccacaggcagaatctactcaaacgcattgtcgcggatattagttctctcttcggtgatattatgccagaggatagcccggatgactgttttgccgaagaaccagccttgcctggaggactctggtctccagatggagaagtttccccaggcggcatatcttacgggcaggatgatctgccaaaggaagattgatggtggttttagtattggaaaatgtgccaagctccctgaggggtaagatcacacgttggctgctggaagtaaaagccggggtgtttgtgggtaaagtctcagcaatggttagagataaactgtgggataaggttagaagcaattgcagcggtggaacttgcctgatgatctggagtagtcagaccgagcaagggtttgatatcgaattctggggtgccgcatcaagagtcgttacggaatgggagggtatcaaacttatgaccaagcatccttaaactaaggcttgaaggagttcaatgacctcttagacctctattgatcaagtgtattccccatgcatgtgggggtgaaccggatacacacgcatcggttgcataggctgtccggtattccccatgcatgtgggggtgaaccggatcacgtcaccaagatctggcttcggcacaggtattccccatgcatgtgggggtgaaccgcttatccgaatgctacaagctgcacgtgacctgtattccccatgcatgtgggggtgaaccgagacccttcaacctatcgcaaaagaattcaatgtattccccatgcatgtgggggtgaaccgactacaaaacgaggtgatcatatgagtgtcaagtattccccatgcatgtgggggtgaaccgcatctgttttgccttctgcattgccttgtatcgtattccccatgcatgtgggggtgaaccgaacgcccgccagccggcggcactgctggctatgtattccccatgcatgtgggggtgaaccgacgaatcccgtctatgccgcccaggccaacgcgtattccccatgcatgtgggggtgaaccgaaaccaggaattaacgtagtgccaggcaagacgtattccccatgcatgtgggggtgaaccgactttgacaaagccatccaggtaggtgatgccgtattccccatgcatgtgggggtgaaccgccgacgaaatagcgatgaagggactggtaacgtattccccatgcatgtgggggtgaaccggcggcggcggctttgtcggtatcctggtagaggtattccccatgcatgtgggggtgaaccgaggacgtagcgaggcggcttggtgacctgatggtattccccatgcatgtgggggtgaaccgcgcggagctttccttgttgtcaccggaaagaggtattccccatgcatgtgggggtgaaccgaattatcggaaataacaaagagtcttcaaggggtattccccatgcatgtgggggtgaaccgtcaacgaaaccagcaacctgctgatcgttggggtattccccatgcatgtgggggtgaaccgaggacgtagcgaggcggcttggtgacctgatggtattccccatgcatgtgggggtgaaccgcctgaatctatcaccctactgagacaggcaatgtattccccatgcatgtgggggtgaaccgatcgtccagattctcacgatcatcctggacatgtattccccatgcatgtgggggtgaaccgttataaagggcagtccagtgagcaatagcaaggtattccccatgcatgtgggggtgaaccgatggcaacaattagcaggaattaaacaagaaggtattccccatgcatgtgggggtgaaccgttccggatgcagtcatccgctgtcgatgtggagtattccccatgcatgtgggggtgaaccgttcatagcgccgcttttcagcctggctacggcgtattccccatgcatgtgggggtgaaccgacgcggcataaccgcatgggcagcgcgtattggtattccccacgcatgtgggggtgaaccgatcgacgccggcatcatcgaggatctgatcctgtattccccacgcatgtgggggtgttgcgatttcctcgcgcgcgggcgactctcatttgcatctggcgctcagaccttggtcttcctggggtcaaccttaacctttatatggatgacctaaggatgatggcaccaaagccagtagcagcaagggagagcggtatgaagtaatatgaggattatcgcgggaattattttgaggggacaagcatccaatctgggtagtttgttggtattttatcgtttggctaaagtggtggttttgtaattgacctgaaatcggggtgacggggttttatggttttttgtagttcttttttgtgtcgtgttgtaaaatattcaccctctttctatctgtgtattatgtggtttttaaaaaactggatcccgggtcaagccaccccgacagcccgggatgacacaattttagtgtctgtcgtggtctgtttcggggctgatgcttgtttttgggttggacgtttgtccttattctgttcttttaatccgtataatttgtgtaatttgtggatatttttaaaagactggatcccggctcgcaggccgatatagcttggtggacttgtttcggggctggatgactgtcccaaacggcgctatagcaagcgccactacagtaaaggcggtcgctgaaccgccttcagggcagattcttttgtcctttaccttatccggcaaaattaacttgacataatttattataggtgattatctggtaattgtcattaagtttcgttttgaaatctccaaggaggcagatatgaaacgatcgcttcttatattggcgctgcttgccgtcacggcatcagccttcgccgctggagtacttatcaacaagcaaaacactcagtttcagattgctcaattgcggagctgcagctatgaggttcaaatcaccaatcaggttgcggaagtgcaagtgaacgaaacatttgtcaacaacagcaacggttttttctatccccgctactattttcccatcccgcgaggcgccaacgcgacccgcttgagatggagctatggcgacacctggcaggaagcgtcaatttcaccggtgccgcaaaacccacagggcggcccgtcctcttttccggatgaatttgtcgtttatatccagttgatgccggtagttttcgacgtggcagactccatggccgtgaatgactccctgcggctggaactctcctacgtgatgatgttgagttacaatttcggcagcgtaaccctcaacctcaagaacgactacagcctgttgcagaacactcctctggatttgcaatccctggatgtgaacgtctcgtccgacaaggagattttggatttcaacatcctgaatgtgacagccagcacccaacacacggggcacaacgccagcgggcattactccctcgccaatcaacccgccaccgccaactatgcctgccagatactgctatcgaccgccgaactgggctcctggggcttgagtaccttactggatgaagtccccgatgagggagcgccggggtttttcgtcttcaatcttgaggaggaaagccttccggcggattccaccttattcctgcggctgaatatcgtgatcgacgtatccggctccatgacctttgaaaaccgcctggaaaacgccaagaccgccgcgatctatgtgctaaaccatctggaacccgaggattacttcaatatcatcctctttgaccaccgggtgcgccctctctgggattatctccactccaatacagacagcaaccgccaagccgccatttcctatatccagaattatgagattaccggtttgaacggaaccaacctctccggtggtttgcaaaacgcgctgtatcagttttccccaactcccccgggagtcaaaaactgtgtgctgctcctttccgacggccaaccgactgtcgggatgacggatacctaccaaataatcaacaatgttaaccaacacatcaccaactatcacatcgatccccgcatcttctgctttggagtcggcaccgaggtcaactatcatctgttaagcgcgctgtcacaatacacagacggcgtcaccatctttctggagagctccgagatcgtcaatacggtcagcagcttctacgacgtcatgcgcaatcctctgctcctcgatcccgaactggccgtcgtcccgcccgggatcacggaggtgtatccctatcccataccctccatttatggaggaatccagtatcgcatcgtgggcaggtatgcgactccgggaacctatcagatgacgatcagcggcgcgcaccagggcacccagttgaacctgaactattcccaaaaccttagcggagaggaagcccccggtttgagcttcattcccaagatctgggctgcttccaagatcgacaacctgatggtggagtattattcctatccgcccaattcggcggaagcgatcgccctgcgtgatcaaatcaccgagatcagccagagtttcggggtggtctgcgtcttcaccagtttcacttccgatccgcccgacacggatttggatgacgtggtccaacccgtggtaaaaatgcccctccgcctgctgcccaaccagcccaatcccttcaatccctccaccctgctctgttttgaagtgtccgctgaactggagggactggcagagatcagaatctataacctgaaaggacaactggtgaagatcctcacggtgaaggttgacggcaaaggcaggtacaacgtgccctggaacggcaccgatctgactgagcggtcggtttccagcggggtttatgtctatactatcagatttggtaaatacctgctccacggcaagatgacacttgccaaatagagccggtcgagatgccctttgcggcgctatggcaagcgccggtactttgaaaaggcggtcaccgcaccgccttttttctatccctttttaagatcttttacttcgtgttaacttgtgtaatttgtggatgattattctaaaagactggatcatggctcaagccaccccaccggattgttaccggtccggcgaggaccccggtaggccgtgatgacacgatgtttagcttggtggacttgtttaagggaaacctttccacctcaaaaacacttttccacctttccacgacctaataattcgtgtaaatttgtgtaatttgtggataactctaaaagtccaacctgcttcagccccagtatttgcggtccaggctgcggtattggatggcttcggagatgtggtcggatttgatggcggccaggccttccaggtcggcgatggtgcgcgccaccttgag

SEQ ID NO: 580 - DNA, 15828 bp, Artificial Sequence
  Synthetic Oligonucleotide
cgccggtctgggaggtgctcaccacgttcacggcatagcccttttggcgtttccaggtggcaaattcattcagtttggtcaggaacacagggtcgctgttgttgccgtggatcagcaggatgcgggcgtgggaaggcgcggtctcaagattgcggtaatcggcgaaattggcgatttgggcctcgtatatcttcctgaaagcctggctgtagcccgtataatcgggcagttcgttgaggccgggttcggcagtgaaatccaaggttacctcgatatccctgaaagtggccaggcgcctggtgacgggatcgtattggcagggataaacgttgatctgaaccacgcggaaatcacgcaggatggcgggttctgaggccgttgccaggctggaggggaaaagcccgccggaagggaccgccacgccgtcccagccttccctgcatattttgggctcgtcaagctggctgtattccaccccgccgtagctataggaaagggtgaagctgccccggggcgggatggccaccatggtgctgaacacgggaagttccggctggccgggttcgcaggtgccaagcgcgccttccatgcggatttcccggacgctttggcctccgtcttcgccggcggaaaagctgagggcgggcacggaaaccgcgagtttaagctggctgccggtagaccgcgcgaccgagaacgggcttgctgtttcggcgttcagagcggcaaggcagagcagcgccaacatggtgagtgacaggatccttttcattgtatcatccttgtatcgtcaaatcaaaaacctggagttgaggctccaggttatggttgcgttttttgcataaaggttttcttttgctttgttcatttaatggcatagatcaggacaccctggtcccgggaagccacgaccagttttcccttgttgaatttggtgttgttggtgtagccggcggatcggaggttctgcttcaggatgggactgctgggattgctgatgtcaaagaggtagatgccgccactgcctgagctaacggcggccagactgcccataatgtcgatgctggtggcgtagccggtggtgtcgaaggtatgcaccagcaagggttcggcgggcgcaccgatgttcaccacgttcaggccgccctggcggctggcgacgtaggcataattccccgcgaccttcacctgcagggcctggccggggagcgcgatttcgctcaccttctctttggtggcgcggtcgtaaatgaccaatccgcgctgttcggcggccacatagatgtagttgtccgtggcgtccattcccgaagcggtggcgggagtggtgatcacgtaatctgtgcccagatagagtccgccgttgtagcgaacgtacatcaggttgcgtccggctccgaaaaagccctggacgatattgtcatccacaggggcctcaatggcgctgaaagaaatcgattgcaggccgtcagtgccgccggtgatggaatctatcagcctgagcgaatcgggatcggagtaatcgacaatacggattttgtccgcgctcacatactcgcccaggaagagcagtttgtgctcgccgactgccgagatattgcggatgttcaccagggtggcgtccgcgctggggggatagatatccgtccaccaatgctgagagtaatccgtggcatcgatcacggaaatgccgccctggtcctgggccacaaaaatgctctcgttgtcaaaagacaggtccacgggattgccgaccacctgcacctgcttgagcaggctgaggacgtcctggtcctcccaggcgggattgcgccgcgagcatccgcaaaggatgagcagcaccgccgcgaacagtacgatctgctttttcaccatgttcaaatcctcccaggggaataaaatttatgattatgcatatagtagatgcaagaatcgttccgaatctgccacaataactgcggattcctttcccaaagcctttttcgcccacggacaggccgtttgccccttcccactaacatcccgtaaacctccccttaaattcccgcccggccaatgggaactcagcgggaagtattttagatgtgtatgggatggggcaaatggggcttctattgatagtgggtatcaaaatgggaggaagtccacaaattgcgcgaattcatacgaattgcttttccagttacgctaccaactgtggtagataacctaaaataaaggacttacttcccaatcgggcaagtaatccatatgtttggagcccgaaggtcccagaacgattggccgacggggacatcgaccttcctgacgctggcgtcgagcgaggcacgagcatggacgccagcaacatctcctgtagtccatactcgcaagctcgctgcactccaggctcaccaacgttggaaggcaaattcacaaattcacaaccggtaaatatggcttgtgaatttgcaacctgctgatagacgggtaattatgaggctaattcacaaaaaaggggtctcttatacatccgcggaagccgattgtaaacaggatatgatgtatccacgctaccagtctataatacatatagaaatagtatatataatatataatagtattatatattattatatattgatattatatcatctctaccttcccttcatctcttgtttgcggcatgagccactgcaaaccggcattctcccctggtccggctggatataagagataagcgtattttgtgaatttgtcccccaactcactgtgccacaataacacacggattcacaagccatatttaccggttgtgaatttgtgaatctgaccttgccggccttaaggaagtttgaaattagagccctattttggacttgacaaattattccttggtaaatttggtgtataatagctatggggcataatgatgttagcctgtggaacggcctctgtaaaggatcaacaagctatcaaccctccccatgcgacaggagcttcaatgtattataatttgacagacaaaccctggatcagtgtgctacagcttgacgggcattctgccaggctcggcctggctgaggtcctgcgaaaagcacacacactgcgtttggcttacggcaatccgatggaccgcatgtccgttttccgtttcctcctcgccctgggctattggtgttttgccaatacaaaacaagcgccggtatcagataagccactgcctcaggcatggacggactggcttgaacaaaaccaagaatatttcgaattgttcggtgatggccccagattctaccaatccccaggaacatccagaatacgccccagcacggaccttatccacgagcttcccacggcaaacaatttctggcacttccgccatgtgaccgatttcatcgatggcatttgcccagcttgctgcgttaccggtctgctgcgcctgccactctttaccaccgtaggcggcagcggaatcggagccggcatcaacagaactcctcccttctatgccatctggcagggtgatagtctgtcggaatcgatattcctgaattgggaacccacttcccggttgggtgttcctgcctggctgaacccgtttggatcccaaaacgagaaggatgtagccttgctgactggcctcacctggctgccccgcaaggtattcctgcttggcccggtgtcagacggagcaaaatgcagcgcctgcggagaagagcatgagcctctggtctatgcctgcaacaatgaggcggtgaaagtgcctccgaaccttgtctggaacgaccctcacgcgatttaccgggatgacaataatggcctgactgcccaggtggctctgatgtccggggacaaatacactttcgctaacagggattggcataaacccctggtcggcttcttacgggcgaaaggcatgtctcggaccgccacgctgtttttagtgggcttcacaagcgttcaagccaaatgtgtggacgtttgggaaaagaccattgccctatccggaaaaacaagctccgaggaactgctggaccagatatccgaaagagcctactccctgcacaggatgaggaaacaagaccgccggggcgattacaaggaatccgtgggaatcaccgccgtggcggacatcatcccgcacgtagagcatcgggttgacgtccattcgggcgagatggtggaaaacagcggcaatgtctggcaggaagcggatgaagattacggattcttcatgaagcgttttgccgtttctctagtgccggaaattacggttgccgccaagcttgaacgagaacaactggctcggcgcaagccctggcccctaaaaccaaaatcaattaaaaaaccttcatccggaggcgataatgaatgagagcaccgtgaaatttgttcggagcctgggcgaactcaaagagggcgacctgggcttgctcagaaagctcaggggtcgccgtctggatgaatccctgccgggtttcgacctgttttccggcctgtggtggccactccgcagtataagccccaaaacccccaggcggaaggtggtctggctagtcaccaagcttttcgcggaattccgctttgagcaaaagaaaggcgccagcctgccttggctcatgggcagaatatgccgtggacttaaagaagaaaaagagttcccacgtgttttagccaggttcgaccgcttgctcacgctcgagttgaaccaactggaggaaccgctggcgcaagtgctcgcgattttaaaaagacatgacattgccagtctggactgggttgccctcatcgatgacctctccgcttgggaacgggaatcaaacagagcgatatggtcagacacatttatttcagcatttaataatcagcaaggaggaatcaaatgttgattgaaatacacatgatccaaaaccacagcccggccaacctgaaccgggacgacctgggcgcgcccaagacctgttatttcggtggggtgttgcggtcccgcatctccagccagtgcctaaagcggagcatcaggatgagcgatgaattcaaaaacttgctcgggggtatccgtacccgtcggttggccgagttgattacaaaagctacaggacaggactgcaggaatcaggcagaggaagttctgaacaaagccggtttgaaacacgaaaacggacatagtaagatgctggtgttcatgacccggaacaagatcgatgcccttgctcaaattgtcaccagcgaaggcctgagtgttgcagagaaagccaagaaagcggcagatgtaatatcgggggcaatacattcccctgacatcgctctgtgcggaagaatgctcgagcccgataccaaggacaagaacacagacaaggtcaagtgggaaaataccactgttgaagcagccctgcaggtgtcgcacgccatttcaacccacatcgcccgcccagaaatagattactatgtagcagctgatgacgagcctggcgacgacacaggtgctggattcatagacgaggcgatgtttgcttcggcctgtttctacaaatattactcaattgattggaataccttgataatcaacctccagggtaatgaaaagttggcagctcatactgtcggagcctttatccaggccgctgcactcactaatcccagcggaaagcagaacagctttgccgcacataaccttcccgatggaatattggtagaaataaaagagacacctgtcagctatgcaaatgcctttgtgcgaccggtgggaatcgttaaggattctgacttggtagaacaaagcattggccaactggccaactatgtgaaggatataagtgccggtttcttccctggacagatgaaaggcaacgctctgtggttctcgcccaatggacgttatcccctaaagcctcaacagggcacgctggacataaagccagtttgcaacctgctagaacttgttcgcgaagcagttgagatgttgggttttgaatgggatgatgtaaaaaacgagaaagtagagagttgaaatgtcttctccgcctaataccctgttcctgagattggaggctccccttcaggcctggggaagcaatgaggccaaattcgccgtgcgcaggacagccgacgcgcccaccaaatccggagtggcaggcctgctctgcgctgccctgggaatcagccgggccgaagccggacagtattggctgggtgaaattgccaaattgcgcatgggggtgcggatagaccgcccgggcatccgctggtgggattaccatactgtgggagcggagcagaagctgcgcatttctgacctgaaaatgcccaacggcctagttctggttggcactgccctggccaaaaacctgggcgcggacaagatcaaatccaaacccggggctttgctctcccgacgcgagtatttggctgatgccagcttcctggttgcgctccagggtgaaccggatatcgtggcacaactggctgaagcgctgaaaaaaccagtctggacgctttatctggggcgaaaatcctgtcccccctcccgtccggtggatgaacacccgccagggttttatgccagtctgaaagaggctttgcggtcgatcccggcgcaactgagggaaaaaggcgaaccgatacctgacagtgttccctgtgtgctcgactgggttccggcccatgatgacgtgcacgctccgccgaacgccgaagcgcattacgacgtgccggtgtcctttgagcctccccaccacttgccccggctggtgatccgctgtaacctgccattggaccgcaacttcgaggcagagaccgtgctttccggcaaagcctggcaaccgccccgcaaccgggcaaattacgacaatcctgaatacaaaagggtccgcgctgagcgtttggtgatggacaatgccgcctgcatgttctgcaaggcacccgccactactgtgcagcacgtgaattaccgacgcgccggaggcagcgagaagccggaggacttgcgcgccctctgccgcctctgccacgatgcctgcaccatgctggaatatggcagcggcatgaccatggaccgcatagatccctgtgaccccgcctggcgtgagcgcatcttggccaaacgcgaggaaataatcaaattccgctcgctggagcagcgcaggcgcaaactcgatccgaaggaggagaacggatgatgtatctatcccaactgctcatcgacacaggcggcaaccctgaccggccaaggcccgggcgcttgtggctgaacaatatctataatgtccaccggcggctcagcatggctttccccatgcgcaagcgcaaggaaggagacccgaggtttctgcagccctttgaccccgcagattttgaaaagcgccagttcctctttcgggtggacaacaacaccgatggagaaaatcaaagggcgatggttttggtgcagtcgtccctgccgccggattgggactgggctttccagaatgccacgggatttttggcagcccctccccaggttaaggaatacgatccccagttctcagcaggtcagcggctgcgcttccgcatcctcgtgaatgccagtgtcaaacgcaaaatcgacgagttgcgggaaggacccggaggaaaggaaaaaacgggaagggttctgcacaaacgggtcgcccttacctgggacacaaattccaacccaaaggatgcggtggcgcaatggtttgccgccaaggctggcagactgggcttcacgcccggggagaccgaactggtaagcctgggctgggtatacggttccaaaccggagccccggggaaattcgccccggcgtgagaacgaataccgtcccctgagataccgttccgccctgctggaaggttatctgacagtggatgatgcctttctgttccgggaagccttggaaaaaggtatcggcagcgccaaaggaatgggcttcggcctcctttccgtggttccggcaagtgatgcgtaacagagaccttcacctaatgccaaaaatgcgggaccgcttcacctatctctatgtggagcatgccaaaatagacaaagaacaacaggcaatcgcctttcacgatgccatgggctccactcctgttccctgcgctggactggccctgctgatgctggggccaggcgtatccatcacccatgcggccatccttgttttagcagaatgcggctgtttggtggcttgggtgggggaacagggagtccgcttttactcatccgggacagggaccacccgtagttccgccaaccttatgcgtcaggctgccgcctggtcaaatcgagatacgcatctgcggatagttcgcagaatgtatgaattgaggttcaaggaaaaactggacccaaccctctctcttgaacagataaggggaaaagagggagcgagagtacgggatacctatttcagactttcaaaagaattcgatgtgcccatgagtgcgaggaattacgacaggagcaactggaataaaaccgaccccatcaacagagccctgtccgttgccaattcctgtctctatggcatctgccacgccgcgatagtggccgctggctattcacctgccctgggtttcgttcatactggcaaacaactgtcatttgtttatgacattgccgatctttataaaatggaaacctccgtgcccgcggctttcatagccacagccgcaggggtcgataacctggacagaaggacacgcattgcctgccgtgaccagttctatcaatttggtctgctaaagaagatagtggccgacattcacgcccttttcggtattctggaaacttcggacgatgagccagaccttgctgatgtcgatccagccgtgccaggcgggctttggaacccagatgataaagtgagccccggcggcttgtcatggggtctggatgatcctggaggccatgatgatggttctggtgcttgaaaaagttccctctggcctgagaggagaaattacacgctggctcctcgaaatcaaggctggagtatttgtcggtcaggtatcggccatgataagggaaaagctgtgggacaaggccaggtctggttgtgccggtggaacttgtatcatgatttacagcaagcattgcgaacaaggctttggaattgagttttggggtgccgcggaaaggatagtgacagaatgggaaggattgaaattgatgaccaagcatccgtgatccatacttgaagcctgttcaatggcctcaaagcgtctactttcgaagtgtgttccccacctgcgtgggggtgaaccgcggattcgccaagcttgtccctaccgtgatgcgtgttccccacctgcgtgggggtgaaccgaagagcggttttgggcgtataacggcccgcttgtgttccccacctgcgtgggggtgaaccgcctctgggccttagctccgcacaggacaagcagtgttccccacctgcgtgggggtgaaccgctgagaccgctcgctccctgtccgtcattgacgtgttccccacctgcgtgggggtgaaccgtggggtgggggcggttgcccgccccgttccccgtgttccccacctgcgtgggggtgaaccggcaaccaaccgcataggcatagcgaaatcaaggtgttccccacctgcgtgggggtgaaccggacatctggaaagattgggtggcaatggcgatgtgttccccacctgcgtgggggtgaaccggtattcttgcccatcatggaaatgccgtgtccgtgttccccacctgcgtgggggtgaaccggtagctcaactacaagcggcgagccgaacctagtgttccccacctgcgtgggggtgaaccgactgccgctgctccagagtttatgaaacctctgtgttccccacctgcgtgggggtgaaccgatgttcgccggagaggcgctcgactacaccgagtgttccccacctgcgtgggggtgaaccgccctgaagatacaggagcagattgaccaggaagtgttccccacctgcgtgggggtgaaccgaacccaatgaacatggtgtaaaggaaatagaggtgttccccacctgcgtgggggtgaaccgaggtctgagtagtctgcgggccccaggatgaagtgttccccacctgcgtgggggtgaaccgtgatccggacggggctgggcgcggcggatgccgtgttccccacctgcgtgggggtgaaccggtggcttacatcagcctggtgaagaagccggcgtattccccacctgcgtgggggtgaagcggtagaagaacgttccggcaaacagagacgccagtattccccacctgcgtgggggtgaaccgggcgacacaacctctaccatacccgagggtcagtattccccacctgcgtgggggtaattccatttctgccggcgcacagacggcgccgggcagtccctgataatcgcttacttcagcagcagcatcctgatggttttggtttcgctggctgtgctcacccgggcgaaatacacaccgctggccactccccttccggtttcatcacgtccgtcccagcgcagcctgtggtttccgcccgcgagttttcctttgtgaagggagcgcactttctggccgcgaatgttgaagagatcgacgctcacctcgtttgagagggcaaggttgaaggcgatggtgacatccggattgaagggattgggataggccgatagcgcggatatggggctttggaccagatcctggagagcaacctggtaattgctcacccggatgtagccttcgtaggttcctgtagccggaggctcccaggtaaaagtatcctggccgttcagatagtggggaacgtcatccagcatcagcataatctgccattggtcgccggctccctcggtgctgaaactgatctcatgtggcccttccaggcccgcgtgggcatggatgttgaagtattcaacctgttccggcccgctgaagggctggcggtattcgctgcaaaggttccggatgtcagtggaatccgcgccggcatgatggatccagagagaggagcaatcagaaatcggaggacagggcgggctgggatggtcaaagcggaaatccacggcatttgtagccaggggatgcaggccgagttcaattccggcgggatgggctccctcgagttccatccgcagcctaaaaacgggttccggagccagcggcttgggaccgtcgcagaaaggcaggaaacgaatctgcggcgccaggtccggggagccgttgtaatagatgaggaaagcctcccagggctcgatacggctggttttttcgtaatcctcgccgcgccagacaaagacggcgggcgaaaccagttcctggcttagcatttcggtgaagctgtgcaactggccaagaagagtgaagctcaggtcctccaggtcgtaggcgcagagatgggggttgggcaaaaagttccagccggggaccaaatcaatataataagccccgctctggagcggcaagatgctgctgtagaaattgatatcgttggatgaaacccaataggcagtgccgaagtcgaaatccagcgtcatgccccagccgccattcggggtcatctgatagccgagggcggggccaaagacctgttcaaagctgaggttgctatccggccagggattggagcgcatcttcaagccggcttcgttataggccaggatcatctggggaagcagggaaaagcgatagggggatacaaacctgctacgcaccccatccaccgccacgatgtccaccacgaagcggcaatcctgcatttcagccacgttggccggcaccagccagggaaagctggtttgggtgggcgtcacggagtccgaaagcagcagactgtcggaagcgttgacaatagaaatttcggcatggtcgatgaggaagggatattggaaactccagccgaaggtgataacggttccgccctgatatactttgttttccagcgaggcaaaggaagcccggggctgcatgtttccccagtgaaggatcatggtgcggaagtcggaatttgtgttgctgtattggtagggcccggccagcaggttgtggtaggtgccgccattctgcaaatagagcttttcctcccggctgaagttgccggatgctgtgatgttgagcgtttcgatctggtcgctgcggaccctaagcacccaggtcttgatctcagaatcggcatcgaacattgccttaacttcccggcttaggttggtgccgctgttgctccaatactgttcgaagaaagcgccccagacgtaatttgaggcgccgggggtgcctttggtcacgtcccagtaagcgtcgtttccatcggtggcgaaggggttggcgctgaagaatacttcgtcggatagcgtccctgacatgttgctgacggtgaggctgtggatgggccttggttccgcgtcggcgggatagttgtgaaaatactccacgttctggaggtttgtgctgctgattttgtaggtgtagccgctgccgttgctcacatccgtatcccaccattcaaagttgtaactggagggatttgaaagggcggggttggtgagccaggaatccaccagagcaaagtcgccggcggcgtcctgacgatagaccttgaaaccctggttgctgacctgaccgttcacctgccagaaaaggcgcactgtgccatccaggccgtgggcggtgaaagaggtaatgccagccggggcaaggttggcgccaacttcgttggaaagggtggagtagttgccattcttgtctttggcgcgaatcctgaaatagtaggaattggagtttgtcaggttggtcaccgtgatcatctcgcaatcgggtgaggcgagaaaagagttgttatcccggttgaagacctggaagttgtcggtgccgatcgactccgtggcgtagagcacttcgtaggattcaaaatcgtaagcatggcttttctcccagctcagagtgacgctggtcagggactggttgtgcacggcgaggttttgcggcgcaggcggggtttggttgtcgttcatggcgaacatatctaccaggaccggctccagatcatagatccagcgtccgtaatattcgatgaagcggtcgaaaaggccatccatattccagctctggctggtcgcgtcccagccgaagaaccagtgatacacgttttccgtttcgtcatagcagttgggcagttcatccatttccagatggaagaaaggttcgtaaacgtcgtaatcggttaaaccgctctgggtgtaaagcatgtgctggttctgagtataggcgggcaggtccacctggtcgttcacgggatagctgttcacgccgtccgaaaaaatgaaatcgtgcgtgctgtagttcacgctgtaaaagtcgttcagatagacatcggcatgtatgccaatggtgttcgcgggaatcatcagatgctggccggcattgatcaggtcgcgcttcagaggcgaaaggtcccggatgggcaggttggggcaggggcgcggattaccggcagaaatctggcagttggcatagccctgatggcggttccagtcgtaggaatggatctgggcagaaaactccctcacgccaaactggtcgcggatggtgtcggcaaatttcttgtagagggtgttgaaaggatgggtggggttgcgcagggggtcggagagggatttggagttggtgtaagaaccctggttggtccagcgaacctcgcggccggagccgtttatcatcaggtagcgggcgtcccagtgcttcagagcttcatatcccatcgcgggagtgggaaaatcatcacagggatggggaacggtgatgattatgggtttgctgccctggggactgtagatgaaaagcccccagccatagacaaatgcgcccgattcgtcatcatcttccgtaaccgttccgttgtcgtcataataggcgggattgggaatctcgcgcagcatgatataggtgcgtccggtgtctgtgtcattgaactgcacaatctgaaaaggggcggaattggatgtgagtatggcctgtgcgccatcgtaatcctctgccacgaagagttccgccatgttgttccaatagatcaggtcagtggctgtgggaaggcggaaattcccaaatccgttggtttggacgtcgtaaggcgcgtagaggttgtaattggggctggctataccctcggcaatatgggaaatccagttgtcataggcgcaggcgggctcgctgcccagcagaaaagcgcggagagaaccgctctcggtgatgattgccggggccagtgccgccagcagacagagccagactgccaaaatagtttttttcatgctttcatccctgttcggaagctttttttcttatcgagcaaactacttaacaggggtgaaataagtcaagactttttctttcggctccgtccaaccttgctttcggacatacggccggactgctcccggtaaagtgcttgacagccggggcgaaattcattttatggatattcaagggagttcatgatgaagaaaacgatccgcaagacttacactttcgacgacgttctgctggtgccgcagcaatccaaagtgctgccatcctcggtttgcatccagaccaggatcagcgccaaactaagcctgaaaatcccggttctgagcgcggccatggatacggttacagaagccggaatggcgatcgcgatggcgcgggaaggtggcctgggaatcatccataaaaacctcagcattgaaaagcaggcggatgaagtgcgacgggtgaaacgcgctgaaagcggactcatcacccgcccctacacccttgctccgaacgacaccctggagagagtgcaccagatccgtgaagaacacagggtcggcggatttccggtgatggaaaagggaaagctggtgggcatcctgaccagccgggacattcgttttgagaccaacggcaaacggcttgtgaaagacctgatgacgccgcgtgaaaggctgatcaccgctccggaaggcacctccaacgaggattgcgtggccctcctgcaaaaacaccggatcgaaaaactcctgatcgtgacccccgattttggcctggccggcatgctcacggtgagggacatcctgaagcggataagctacccaaacgccgtacaggacgataagaaccgcctgctggtcggagccgcaatcggagttaccggcgattatctggaaagggcaaaggaacttgcgaaacagggtgtgaacctgctggtgatcgacaccgcccacggccaccatacaaatatccgcagcgcgatcaacaaggttaaggccgcctgtggcgtggaaatcctggccggcaacatagcgactgccaaagccgcccaatttctcatcgacaacggcgccgacgccatcaaggtgggcatcgggcccggctccatatgcaccaccagggttatcgccggaataggcgttcctcagctttcggccattatggactgctccgaggttgccgccaaagcgggaattccgcttattgccgacggcggtatcaaatactccggcgacatcgtgaaggcaattgccggaggagcggatgctgtaatgatcggctcgttgctggcaggaaccgacgaaagccctggcgaatatatcatttacaacggccgccgcttcaaaagctaccggggcatgggctccatcggcgcgatgcgcaaaggcagcagcgaccgctatttccaagaaggtaccgaggcaaacaagctggtcgccgaaggcatcgagggcatggtgccctacaaagggccactgaaagactttttgttccaactcacgggaggcttgcgctccggcatgggctactgcggcgcggaaaacattgcagctctgcg

SEQ ID NO: 581 - DNA, 15706 bp, Artificial Sequence
  Synthetic Oligonucleotide
cagcgcttgacaccatattccctggatgttagatcattggtgtcgtgtggggatgtagctcagcgggagagcaccgcgttcgcaacgcgggggtcgagggttcaaatcccttcatctccaccaaagaaatcaataggttaggccaacactgcctagccttttttgtggaaaaaccccgatttgtttcctttttgttaccacaatcctacttgaacccgcttgcagtgtagattttcgttgtcccattttcgaatgtcagccgatcgatggcgtctaccagttcctcgtctgagatatagccgtatcgctcgtcaacccgttttcctcgcagagcgtgccccatgatcatctcggctatctgatccggcactccgctacgccgcgcattgctgcgccacgtatgccgaagatcgtgaaatcggggccacggtttctccagccccaaagactgacatgcccggtcccacggattttttgtagcctcgaccccgatcggccggatgcctttcttatcctgcaacaggaaaaccctatcgcttgcgaggtatgggacacgcattgcttcttcgagaatggggacaaagtcccgatgaacaggaatcctcttccagtgactttccttcgtttctgacggggtcaaggtgagaatccgtttcgaaagatcaacctgtcgcctgtttaaagaaaggatctcgccccggcgcatcccagaatagaaagaggcccaaatcaaacgctgaaaccaagtagggcaggcttgcgctatactcccgacatctccaaaggaaatataaacctgtcgttcaccggacttctgactgagattcggcaccaggcgggccgggtttgcctcaacaagccgatattccaagagagtatggaagattttcgacagcgttcctttctctcggtttatcgtcgcaggggcggccccctgagctgatctatgggcgatatatgttcgaatctctggcacccatagattcttcatcggcgtgtccttaccgaaataaccaacgagatgtgtcagacatatctcgtaacggctacgctctttggtatccgccacgctcggcgatctcaggaaaatctctgcgctcttccacaaggtcaggacagactccggctgttcgacaatctgagtttcgagcttgagggttttgggtagctcccattcctgattgttaaacatccgcacaagggcctcacgggcaatgtcatccaaaatgttgtagttcccagtgcggcacgcacgcatcaaaagtgcctcttgctcttcagcgtctttcctgttcgttgcatcaactcgcagaccgatttttcgccccccaaaagggcgaaaataaacgtaccatcggccccgcttcttgcctctctttatcaccgccaatttcgcatctccttatgcagcgcccgcggtgaaacctgagtcgatccgctaacacctccctccgtatgtgcctgttgtttgggcaaaggtaacaaggagcgctcactcttttcaagtcttttcggtcgtctcgatttacgagttgcctcggcaagaaacaagtcgatgtgttcctgagtgaaacgtcgtcgcctatttgtgatctcgatgcacgacagccgctcttctcgcacgagtcgatgcacctcctttttggagatctgcaacagctcgctgacctcaccaacactgtaaattttcatcccaatcctccatacttctcacatacccatggtagttcgggtattcttattcgttcaagttctcgcatccccggcaccgcccttcacctacgacggtgctgactgatgcagtgatatttggtgaaaaacccctacctgtaatgcgttttgaggtggtgtccgtgtcggataaggcttcgggtcgcctccctggtgctttgcctgaaaaccgctcacccttggccttattgcgccctgagaaagcgatgccatgcaagggacattctgggctcgcacacatcgacaagggatgcccgttgaggcaaacgtgccgacaaaacccccgtactctcttaccaataaaggctttccgaaattcaggcttcattaaaccatctccccctctccgtggcgctggccgccgatatgtgtccaacggacatcccgtgcaacagctgagatcgttgggcgtgtcgccccggcaaaatcggcagtattggccgatgcccttataaacgtcgctcttgttcgccatatctacccccccaatcagacacacctgccttgcaaagtgtgtataagtgtttccccgtttcccttttttcataaaaccccgatgaatacttacctagaagagggaaacacctgttcgaaaaccgtttccctcccgtttcccagtgtttcctttttccaggcatgagggaaacgagggaaacgcctgggaaacacccccgtttccctttaaaacccgcattaatattgattgaatatatatttgggaaacagggaaacggtaatatccccttttgccgggtcatggttcgcccctctcgggttttccgtacatggcatcctctggagggaggagccatttcccctgaatgtcacgttgcgcctgaccaaccttttccatcttatagagaagcgctttggtcgcaccgtaatccttgtggagagcatctttgatctcagtgatagataggggccgatccgcttctttcaggacatctcggatctgcaccctctctctactcatttgaagttcggcgctatccccgagccacgtccaaagaccccgctctttatcgaattgcagatcgcccttgcggtcctcggtatccctccccgtgatgaacagggttgctttcgattgatgccggtcaggctttttcaagttccacaatgtgtccgcacaccctgtcaacccggtactgcccgagacattgtgcaacgggtcagatgactcctgttttcggtcgtggtggattaaaatgatcgcaatggaatatgcggcggccaattgttgaaacggctccaggtctttgtaatccccctcatatatggagtcatgcttccccttgatcggcctgatcttttgaagcgtgtcgatgacgataaggcgtgcatcatcttggtgccccttgatccacgtttccaggaagtctatggtattcgggcctttcccgccgcccatgagagggatgtcgttacagaaatacgccctggttggtggagatgcgtcccccaaaatcttgtccaagcggctcttgaagcggcgtggactgtcttccaaggcacagtgcagcacactcccaaccgatgtctcgaagtgcccgagtgcctgcatccccgacgcaatcgcaacggataggcccattgtgagccagctcttcccgatctttggagccccactgaggatggccaggccttccgggagaatatcctcgatgatgtatctcggctccggtagttccatctctacgagggttgcgaaggatatgatcgaaggggccttgtcgctggcaggcgatgcttcagtcggttcggtcggtttctcttgtggctgctgatacaatgaagtgcgctgaatgatctcgttcaactcggcctgaacctgttcccggctcttgccccgtgcccagtcactaaagtccgagccatcgtcagcgaatggatgcaagtcgatgattttcacggatctgcagtgtctgctcaggaactcggctttttctttcgcgtaccggcggcccgctgtgtcggcatccgcaaagatgatgatgtcgctatccctgagaggctcgtgaatgctggcttcagtgcagtgctttaggaatcctgattggttcggaaatgttgtgggtaaatatccgtaagatagggctgtctcagcatccctctcaccctcgcaaacaaacaccgtctcaccgggtctgttcacgagcaggtgcacgttgtagagcgtgggtcgcaccccttccattttccaggtgtaagatccatcaggagcgatgccagtttgcatgaaccggtcacccttaacctcagtgtcgaagcggatcttcgccgatagaggatggccgtgttcatcgcagtaggtgtaagtgttccggatttttctttgccgatgcgacgtctttgaggtttgagttatggttgttttgtggctgccattcccggaaggcgtgatgcccaattcctgacatgattccttgaacgagagtccctttgtccactgcaaatactcgatcccgtcaccctttgcatcgcattggcggcaccagtatcgtccctgttgcggccagactctgaatcggtcattaccaccgcattttggacacggtcctgcgtattcacctccatcggttgtcgctttccattttacggtcgtatatcgattaattagctcaaggaattggtttccattgattttttgcgatttcatcgctatacttcccccaccataaaaacccaagaatgtaataattgttccggcctcccagccggatttttctttgtttacggttttctttcaggcaacctgtggatccaatcctctaggtcttctcggctgcaccgcaagagacgtccccctggggttgtgcgaaaagttggcccctcgccttgttcgagccatcgagcgagcgttcgaaggctgacccccagcatttgcgccacttgggttttattcagcatcatctccatttttcttctcccttctaccttccatgacaggcggtttatggtaaaaaaaatcactgggcatttttaacgaattcgagccatcggcgggcacttacgaacagatgagattcacatgggccgggcccaagatagtcctctgcttcactaagaaacaggctctcgggcatgaaccggatcagtcgccgaggcagtcgagacccatgagcccagtcgagaacacagtccgcaaagcaataaaactcttggtgctcgatatattcctgcatcggccgatcactcaaaggctgaaaattctcaaacacgattggggtctttttcatttgctgcccacctccccccccgtggactgaaacatcgttaaatcggacaccgtgcgaaaatagcgtatgcagaatgcccacaacaacctggtcggattcgctcaagacacaacctctgccaggtccgcacggaggggcgacgtaaacctctgggcggaaaactcctgcggtcatccattgaaaaatcgtgttgggtttgatgaatggaaacactgtctttgtcaccgatctaatcgttttcataatattatactacctgctatggcgtgcggtgtcaagccataaaaaggaaatataaaaacaaacagttaagataaacaaacaattaaaagttgtggggaaattgggaagtttggtgagatgtcgccccccaaaggatagggggtagggggggtattttccggatagggggtggggtgaggcagtcggaggggaccggggactattgccccagttgatgaagcgaaggtattgttggtttcttctgggggtgtctaatcccacagcgctatcgggccttcgatatccatctccatcgtctccccgcacctcggacaagggcccggatcattccatggcgttacatcctttgccccacagaccgggcatgacaagtctgggaggaaatcgtgcctgagtctcgtcgggttatgccgcagcactccgctggggtccgtagaaataaggcaatcgctgagtccatggcaatgtggacatgagaccgtttgaaccactgactcaaatccgcagtcaatgccgcctgaaatgtgctcaaccctgtaaccgcaatcagggcataggaaagaaagcgatctacccatgtgtgcctcctctgaatttcagtcttccacgattgtttttaatgccttcaaatcggtatcgccatgatcgttgccgccaggccatcgagctgtttctgctgctctctccaaaacttgaccagcaacgactcacacttccttgcggccaactcttgactcccggcaaagagaaaatgcgtgccatatctgacctcaaatgcgctgatgctctccaccgctgccctagggttaagttggctccgatagttgcctgttgcgagttgcgcgtatccttcctccacgatgacggcaaagtaatccaatgcttgtgaccgctccagttctcgctcgaacctggcccggcccttgcccaggcatccaaccaggtcatcaagtgtttttcgttcgattgcgatcatggtttcgagcccgtccacgctatagtctcccgtgtccagcttcctgacgatcatgggggccttgaaatactcatcccaggcgaccgctggttctctcgaatcctttatgaggaccggcccctccatacctcatccccccaaaccactaattttacgaccagcactccagcaagactagacagactcgtccctgaactcttcgatgcaccctgccaaatacagatagtctcgggcatcagggtctccattttcaatacgggtccgacattcccccaagatctcccgccatgatctcattgaaaaaacttctatctcacgttcactatcaacatcccaacatcgccgcttgaacatcacgccaaactcaccgattgcaaatgtgtctaacaaccgctccagaaccacataagcattgcggagggagtggggagcgctgcgataatcatcaagattgaatacgctgccatacccatggtggttcagaaaatcctttgcgtcactgaatccacaataccgacccagaaattctgtgtgcccggaaatacaatgatccgaccacaagatacactcggaggctagactggaatactcccacttataatcgtcatcgacctgactgacgaataacataaggtccccataggcattggatagctcctcaagtgtaatctccggcaacattttcggattccgcgcattttcctgttctaagatccgctcgcttttcatgatcctctactgttgtttcctcgtcgtgattttcttaagatccggtgtccttatcgagttcaaaggacagcttcggctgcccgaagaagtgccagagtgctgagtccacaatatgagaaactgaaacgccgtcttggtacatctcctgaagtctatcatagagaacaccgtcgatcgtgatggctaacttctcccggcgccccactttgtgctttttaacgatcggtgctcgtggtgccatccgctgtgtcatcgctcctcctgattcgttcatcgagcatttcttttaaccggcccagttggtcgggtgtttgttgcctcaaatccttcagtagctcctgaaactcggggctctcgtcaatcggtgggagcgccctcctgcgttttttctttgccatggtgtcctccctcttatgcagccttgagaaactgtcgcacggtgcccctcgtaaactctctcccagccctgttgaacagtccctcagacgccagcttggtgatgatttttctctcagagtatccttgactgtggagccgctggatgcgctgaatgacccgctgctcatcagcattctcgatcacgttcccggcatcatcgaactggaacccatacggcgcatgacgggaaacacgacccccgagctctcgtttccgagcaagtgcaaaacgggtattcagtgcgatctttttccgctcgaatgtggccatcgccgcccgcatcgtgaacagcatctcctgggccgggtcggtcagatccacttcaccgccttcggataccaggtgcagcttgactccctttttggcgcattgcttgcccagccggatcgccccctcagtctccctgttgagccgatcgagcttcaccgtgagcaggtgctggacgttcttccttgagacgagctcttggatctctttgaacttggggcggtcctcgtctttaccggatgcaccctcgactccgacatggacaatttcaaggcccagaactgccgcatactgacggcaccgggattcctgcgcctcaaggctgatcccgtgctttcgctgctcatcggtgcttacccggcaatagatcgctgctctcatgggcctgacctccataataaggattgaaaacatcatacccccgcacttatcagttgtcaacagaaacaatattcttatacaactaatatatcttttctaactcttattacattacgtattttcaagaaattggtactcaaccgttcccttgcggaccagtttgcggactcccgtccgtgttacattctctcaagaggctgaatggtttgcgcattcaggctgtcgccccggaggtcgtgtcgaccctcgcaatggaaaactcggcttcgcaggatcgccgtagtcgcacgatctcccccaggcaacaacaaggtttacccggaggtcataggcccggaaatcgccccatattgcggcagtcgtcctctgtggtcctttcccaaaaaacctcattaataaacgctaaaatacttttttagattcgaatgactttttttgtcgtacttgatgactcgtttgtcctaatttgacacatgttactgatattttgtccccccgaggggagaaaggagatgcgaagatgatgaggatgatattgatagcggttattttgacgatgtttgcaggatctgggtggggacaaaataagcaggtccgtgatgccaatggtcgccttgtggagacttggagccaaaagggaaacaccacgcaggtgcgggataaaaatggtagtttgcttgaaacaaggacacagcacggcggcaacattgatgttcgggaccgcaacggacggcttataagaacagagaagattggcaagtgacttgccactgggcaattagcagatggttgacttctgaagttttgtcgctctcgtcctcagagggggctctatttatcttgagcccatgggcccttaagataaaaataagcaagtgttttcgccatctaagaactcccgtccctctggtctgtgattccaatgttgctacgatttagagcgcgttgtactggccaacacgaacaaaaaatgacgacaacattaaaaaataacttctcatttgtgtcctcatttgacaatttggtttggtatcagtttcggaaaaccctatctgtgcgggggcgatctgaagtggtcccggtcatagaagcacacgtaacacttttccatcagtcaccactgaaactcgttgagcgaagaactccaaagcaaccgcaaggggaacaaatgagtatcaaggatcaaaaagggaattcctggaacccagatcaaataatgattgcggaccgagtcttgccttactattttctcagacgaaaggaggaccatgacgcagaaaaccgatcactataacctgttgttagaggattggattcccgtactttggaacgatggtcgatacagccgggtcggaatcattgaagcactcacgcaatcaggccgaattcgacagattgcttcctcaaacccaatgggtcgtatcgcgattgtaagatttctgctggctttactgtattggtgccgagggaatccgactgaagggagggaatcaggctttcatacttctttccctgaaacgtggttctcgaaattggacgccaaccaaagcctattttcgctcttcagagacgagaaacgattctatcagtttccaccttccaagaatgccaagaagctctctgcaaattatctaatccatgagataccaacggggaccaacaagaggcattttcgccactctaccgatggcacaaatggattatgtccagcgtgctgcgccgagggattgttgcgactcccaatgttcgccacctcgggaggacggggtaagcctccgggtataaatggaaaacctccactctacgtcattccacagtgtacatcacttgcagcaacgctgagactttcatggctatcagcatcgaatcaggggtttcccgcttgggaaaagcctgatttggaactcccaaaaactggggtggtccctattctcgtcggtctgacatggctgccgaggcgagtctggcttgacaaccctgaagattgttcggctgcttgcatttcctgcgggcgcagagatcgtctcgtacgaatgtgtgtattcgaaggcatcgggagcaccaagacaaatcctgaagattcgggccgaacttggcaagatccccatcttattttgactgacatcgctaaaggctcctctcgggcccttgctgtgcgtgatgcacttggtgcaagtgatggcgcttctgggcagtgggcaatgattgcggctggcatacttcaaaaccaagaatcaacagacaccatgcatcacggaatccaggatagcggagctgaggggaagcacgtcaaagcatggattgttggcttttcaaccgttcagaacgacaaatacctggaagcaagagaatacctgatgccatattcattgtatccgtcccaggttcctaataaccttgaacaacttgaacgatggcaaaaagagtcgcgaaggattggaaaacaactagctgggattgtgggagggaagcttaaaggagacacagcgatctcttctattcgccatcatattgaggaaaaggtctcggttaaggtgccagagttacttgtgggagaggagggcacatggaaccaagcggcacaagaatacaaaacgataatggtttcaatcgccaaatcgctgtcacctggtttcacctcatcagcattactaaagaggattcgaatagctggtctgaagccaaatatgagtccgaaagaaaaggagggtgaacagccgaaaggcagcaaaggaggagacaagtgactccgacggatcagtacattcatgtcttaactcggctcaagttaggagacttaggacttttgagagcaaacgcaggcaagaggcttgatgagtcggtgagaggctttgatctctttgcaggcctttggtggccattgcgacaaagaaacgaacgggttccccgccgagaagtggcatggctcattgcgaagctctacgcttttcgtcccatcccgcattcagctgggacttaccttgctcttcagttgggacggtctcagccaatcgaacctagggcacaacaaaaataccggcaagcattcgataggatgctggcccttccagtcaaccagattgagccggccttgcaatgggcgcttggtagggtcgcatcaaccagagattttggactagattgggtcaacctgacggatgaactctccatttgggaacgggaaacaacccgcctcaaatgggctacagcattcctaagaatcaacgaaagggcatagaaatgttaattgagattcatgtcattcaaaatcatagccccgctaatctaaaccgcgatgacctaggcgctcccaagacgtgctattttggtggggtaatgcgctcccgcatctcaagccaatgtcttaaacgaagtatccgtatgaatgatgagttcaaacaactcctaggcggagttcggacccggcagcttgcaaaagtcattggcgacaaagttgatggtcaagccaataccaggaaacgtgcggcaaggattcttgaaaagtgtgggattaaaactaaggacgattctaagagcgacatgctggtctataccactcgtgaggcgatcagcgagatggcaggaattctgcagagtgaccatggcaaaacagatgaacaactggcagaggagtttggcaaagtgatagttggacggacagctgtaccagacatcgccctcagtggcagaatgttggaaacgggcgtactccaagacacggcagtggaggctgcacttcaggttgctcatgcgatttccacacacgaagctcgtcctgaggtcgattactatgtggctacagatgatatcccgggccatgatgcaggcgccggctatgtagacgaagccatgttctcctccgcgtgtttctataagtacttctcaattcactgggagacgctcataaaaaatcttcaaggttataatggaaaggaagagcagttggcagcccatacggttggtaggttcatccgaactgctgcagtggccaatccctcgggtaaacaaaacagcttcgcagcacataatccaccagatggaatgctggtagaaatcaaggaagctcccataagctatgctaatgctttcgcgagtcctgtagcctatggtactcgtgacatcatctcccaaagcgttgcccaattggggcaatacgttagagatcttgatacgggatatggcaaaccgcaacagagattctggttttccccaaatctgcgccaccatttgaccgtgatcgaaaataagcaagaatgttctctttcggagaacaacttcaaatcgctggacgaattgattaccacagtgctcgacgccatgggccacgattggaaagcagttcagaaggccgtcattagcccggagtgggctcaatgagtgccaagacactttttcttcgcttagaaggaccgcttcaatcctgggggggtcaggaatcgaagtttgtcattcgtcgtacttcgcggtctcctactaaatcgggagtgttcggaatcctttgtgcagctttgggaatccccagacctttggcgcacaaagaatggcttccaacacttgccacactgcacatgggtgttcgcattgatgagccaggtgtacggtggtgggactatcatacggtgggcgcacgaatgcctatggccattgctgagggggaaggaaagaccaagcctggagcaatgctcactaggcgtgaatatctctgcgatgcatccttcctcgtcgcgctacagggcgagcaaagcctcgttgaaaagctagaggccgcaatccgacgtccccaatcgacgctttaccttggacgaaagtcatgcttgccatctcgtcccatgttacaatatcctcttggagattttcctgaccttggttctgccctgaaatcagcaccttggtctccccggttaaaaactgatcttgtcccccaagttgtcgagtgtcttctcgattggcagccaactccggaccagcctcatgcaccagatgatgcatttgtttgttttgatgtgccactaacgttcgagcctccagcgcatggccctcgatttgtcatccgccagcagtatagtgtcgggtctccaggcgagattaatgtcgcatcaaaggccctccagaatccaacacccccaccacttcgaccgcgagcagattaccgtaattcagaatacacaaagatgcgggaggagcgactaagacgtgattgccacctctgtgttttctgcaaatcgcctgccaccacagttcagcatgtcacatatcgtcacgccggtggaggagagcgtcttgatgaattaagagccctctgtaggctctgccatgactcagtaactatgattgaatatggtttgggaatgggtattgatcgcatcgacccgtgtgacccaatttggcgaagactaatcatagaaaagagagaccagatcgtaaattttcgttcattagagacccgtcggcgtcgcctgaaaccagaggaggtggaatagccatgtatctgtcttgtctcttgataaacgtgggcagcaatcccgatcggcctcgccccggacgattatggcttcgaaacatgtacagggtccatcaacgtttgtgcatggggtttccatcgagagatcgcaaaacccaagaccctgattttctaaatccgtacaggccatatgacttcattcctgctcagtatccgactagccatccacaccaagacagttcctcgagagaggcaaaggcagttcatgttcctagaaataacacacaaggattcctttaccgggtcgaccctctctcaaataccggtcgagcgatgatcctcgtacaatctggtgtgatgcctgactggcattatgcctttcagaacgcctgccatattcttggggcaccaccagaagtgaaaccataccaccctcagtttgaggctggccaatgcttgaggttccgcctcgttgccaacccgttaaggaaagtgagcaggaattctttgggtgcatctggcaagccttttgacgaaggctggcagggcaaagaagtacctgtgcccactgcagagcttgacaagtggttggagcgccgagccgagcccagctggacttgtccgaagaattccgaaagcactcaacgaccaccgggctttcgattgcagaccatcagtattgtacgaacaggatacgtttacgttaaccacggacaagatcaaactggcgggcgtagaattcggttagctcgatacgagggaagcctgatggtaaccgattccgaaaattttcgaaatacgatctcccgtgggattggccccggtaaagcctttgggtttgggctcttgtcagttgctcccatgtaactccaaatttagtagagactacatgagaattcaggatctccatttactgccaaaattcagggacggttggagctatctctacgtagagcactgcaagattgagcaggaaagtaggtcagtagctctgtttgatgcttcgggaaaggtacctgtcccctgcgcaactctttgtctgctgatgctcggcccaggaacgagcattacccacgcagcagtgacggctttggcagacaatggttgtttggtttgctggtgcggcgaacagggtgttcggttttacgcctacgggcagggaaaaacccgtcgcgcccataatctacttcaccaagcaagactctgggcgaatgatgagttgcggctcaaggtcgttcgaaaaatgtattcgatgcggtttgataccaccctagaggactctctaacattgcgccagattcggggcaaagagggagtaagggtccgcgatgcgtattctcgagccagccgtgagaccggtgtgccatggagtggacggaactatgaccggacgaactggaattccggcgatcccgtaaatcgtgcgctctccgcagcaaacagctgtctctacggtatttgtcatgctggcatacttgctctggggctctctccggccttgggtttcatccatacagggaaaatgctctcattcgtctatgacgtagctgacctgtacaagacggaagtctccgttccgatcgcctttcaaatggcgtcccagggatccgaccagcttgaaagccgggtaaggaaagcgatcagagacaagttgaaagaaaccaagcttcttaagagtattgtttcagacattcactctgtcttggatctcgggacaaaggaccgctgtctacgagaggatgcagatttcgatgccgacccttcagtgccgggcgggttgtgggatttgggtggagaaacaaatgagggtgggatgaactatggagatactatcgacataggagaaaacggtgacagtggttattcttgaaaaggttccgggcggtctccgaggggaactgacacgatggatgcttgaggccaaagcaggggttttcgtcggtagcgtttcagggatggtgagagaccttttatggaagaagatctgcgaagaatcacgaggtggctctgttgtgatgattttcagcgacaacgctgaacaaggattttctgttaggatgatgggagagccgagcaggcatgtcgttgacttcgaggggctatcgctcatacgagtcccctgttgatgcggcttttgtcagtatgttccccacgcacgtgggggtgaaccgttacgagccccttatgccccttttcatgtaggatgttccccacgcacgtgggggtgaaccggacaaa

SEQ ID NO: 582 - DNA, 15252 bp, Artificial Sequence
  Synthetic Oligonucleotide
  misc_feature (1632)..(1641): n is a, c, g, or t
  misc_feature (2475)..(2484): n is a, c, g, or t
  misc_feature (3424)..(3433): n is a, c, g, or t
  misc_feature (14958)..(15042): n is a, c, g, or t
cgaaccgatcccgtggatgatagtttcccggaaacgcgcggggtcagtgacattaagtacaccgtcataacggacggagcgcagacgatgcccatcactgtttcttgtcttgctcacataaacgtagcccggctcgatagtgacggaatcctgctcaacagagaagccccccttttcagcccgccgagtcagccactcgaagagtcgatctgtaggcacgggaacacgcttacctatccctcttgcaatcggttgaccgtctgctcccagcgattgcttcgaaaggcgcctggtcgggttcgcaaccaggcggaagcggagacgctggccggtctggaaacagggatgcaagggctcgacctgcgggggagccgccagaagataaccggcgttgtgaaaggcgtagttccagtcgggcttcgcggcggattgtacgagaatcacaacccggccgccgggcagcgggtcaatgcgaaagagaaaaccggactccgggctacgctggcggtgcacctgtttcaagatagatggatcgacttcggtcttcttcttatcggccaggtggcgttgctccgggaagtcgtccggtgcatagggcgcaagaaagtcaggatcatgttcttttctcgggcgggaaggaaacgccatgcaaaggcgctggtggacatgatagaggtttcggagccacaagcggccggggcggggccggtcggggttgtcgccgacgtcgattaagagatgggataggtacatggctcttacacctcctcggcagtaagcttgcggcggcgcgtctccagcgagcggaaacggatgatttcttcccgcttctgaataatcatgtcgcgccagcgcgcctcctcgggattgatgcggtcgaggcccatgttcaagccgtattcgatcatggtcacggcatcgtggcagtagcggcagagcgcacgcagatcttcgggaatttcgtcgccgccagcccgccgataggtgacgtgctgcacggtggtggcccgagacttgcagaagacgcagaggtgatggtcaaggtcgaggcgctcttggcgctttcgttcgtattccgtgttgctgtaatctgcccgtgggcgcggtggagctggcgtctcctgttgtgccggctcaggtgctagcatgaccccgtcatcggcgcccacctccaattctctgcggacaacgaaccggggagaatgcgagggcgggtcgaaggtccggggcacgtcgtaccagatgacggcgtcatcgggcgcttcgggctgttcgggcgatggctgccagtccagcaagcaactgacggttcgcggtacctgatctcccttgcgccgtcggcgccaaggaaccgcttgaagcgctgaaagcaaatctgggaaatcgccaggctgatgctccagcaaagggcgcgaagggggacagcacttcctgccaagatatagcgtccactttggggctttgacagcactctccagttcagcaatcaaggtctgttctccttgaagagcgaccaggaaggacgcgtcgcagagatactcgcggcgggtaatgagcgtttcaatttcgttggttgtggccgtccgcttgatgcccttaccatctgccctgagcacaccgaccttggccccnnnnnnnnnntgttgtcatgccaattcctgcaccgaccgtgtggtagtcccaccagcggacacccggtgaatcaatgcggacgcccatgcgcagggcactgagcttcggcagccactgtttgggggcctccgcacggggaatccccaaggctgcgcagagcatcccaatcactcccgatttcgtcggagcctcagccgtccgacggataacgaacttcgactgttgatcgccccaggcctgaagaggcccttcaagacggagaaagagggtgttggcggtcatcaggccacctccgagttgacgacgaccttcttaacctcctcccagtcatgaccgatcgccttgataacggcggctatcaactcatcaagcgacctgatgttgttttcgctgagctcgacttcacgagtcttctcttttccgttctccttttccttgatggaaaccgtcaagggatagcggagattgggagagaaccagaagcgctgcgttggcttgctatacccgttgtccaggtcgtgcatgtattggcccagttgggcgatgctctgcgcgacgatgtcgcgttcgccttggggggctaccggtttggcgaaagcattggcataactaagcggggcgtttctgatctcgactaggattccgtcgggagggttgtgggcggcgaagctgttctgcttgcccgtggggttggcgagcgctgcaccgcgaaggaacgcgcccacggtgtgcgcggccagcttctcatagtcttctccgtagcccttaaggtttctgcgcagcgtatcccagtcgatggagaagtacttatagaagcaggctgatgcgaacacggcttcgtcnnnnnnnnnnagccccggcatcttcgccgggaatatcgtcggccgcgacatagtaatcaaccacagggcgggcctcgtgagtggaaatagcgtgggcaacttgaagggccgcttccacggtcgtatccttgagtacccccgtttcaagcatcctcccggtaagtgccatatcgggcacggctaccttttcgctgatgagtttcccaaaggcggttgccagttcctcgtccgtctttccatcctcgttttcgaggagcgctgccatctcctggatggcggcaagggtggtgtaaacaagcatgtcgcttcggtcatcgttgtcgctcctgggattgatgccgcacgcggccagaatcttggatgcgcgcttcttcgcatcggccttgcccgtaaccttctcggcgatcaatttcgccaattgccgagtgcggaccccgccgagcaacggctggaagtaggggctacggcggatgctgcgtttgaggcactggctggagatgcgggagcgtaatactccgccgaaatagcaggtcttgggtgcgcccaggtcgtcccggttaagattcgccgggctgtggttctgaatcatatggatttcgatcaacatggctgtcctcctgcgttggtctcaagaattcttccgcccacttgaggcgggtagattcgcgttcccaaatggaaaggtcatccgtcagtttaacccagtcgagtttgaggtcctttgaagcgagcaggtcaagcacccattgcagggcgggttcaatcttgtcgaggggcagggtaagcatttcgtcaaacttctggcgaaagcggctttttctccgttcttcatcaggctggcatcgtctcagttggcaggcgagtgtgtcgccggacgaatgcggaatcggacggaaggcgtaaagttttgctatcagccaggccacttgccggcggggggcgctttggtnnnnnnnnnnattggttctgtttacgcagcggccaccagaggccggtgaagaggtcgaagccgtccaccgtctcatcgagcccctgcccagcatgtgtgcgcagcagcccgagttcacccgccttcaaacccgtcaggcgttcaatgtactgctcggtaggagtcattcccgcgctcccttctgcgaagctgggttcttggccgctttggtttcccctcgcatattcggcttcatgcgcgcaatctgttggcgcgtctcgaccgcgactgtcgtgtaaccgggcgaaagcgattgggcgacagccgccatcatcggactgtattcgcgggccgcctgctgccacgcctcctcctgcccggcaagcagctcgtccagcttcgcggtgaccttgccttcgataggcgggcggatggcggcaaccattgcccggacctccacatgttctctcgggcgaaatgctcgctggaggctttcctcggtgcgtcgcaatatcttctgaacttttccaccgagtcttgagccctctttctgccacgtctgaatcttgctgatgctctcctgaagcctctgctcatcggttgcagacagaaggggaatctcgtattccttggcctctaagtacttgttttgtctgctagcaaagccaacaatccagactctgcgcgtgcctgtgggtacgggcttctggagcactccggctgctaccgttgtccaatcaccagccgccgcgtcggaagcggcgagcgcattgctaggtgtcatcacaacacctttgccgtcgcgaatgacatgcgggtcgcgccagactcggccctgggcatccgacttggtgctgccgatgccagcaaagatgcatcgccgaatcaaaagttccttacgcgcgcaggagatgcagtttgcttccggtctctcggggtcatctagccaaacgcgccgcggtagccaggtgagtccggttaggagggggatgtcgccagtcttggggagttgcagatccggcttttcccatgcgggcgttcccaggttcgattctgggcgccaggaaagccgtaaggtctccgcgagcgaaactccaaggggtatgacatacaccggcggcttggcgttgatcccaggagatttcccttggcccccttgggtggcgaataccggaaggcgcaacaaccctatggcgcaacatgcccgacaaagaccgtcgactccgtccaaggaatgccggaagtgccggacgttggttcccgtcggcacctcgtggatgaggtaattcgcgggaagctttccgtcgttccgtgagcttgacttgtactgatagaagcgcttgccttcggtcagaagattgaagcaatccttcttctggtcaagtttggtgaaccactctcggggaaaggattcggccatgattgggccgtctggcggattgcccttgcaccaataaagaagtgcgagcaggaaacgcaatatcgccatacggtccatgggattgctggcggcgatttgacgaatccggcctgcttgcgtcagcgcctcgataatgcccacgcgatcgctgtttccccggttccagagaacaggaatccatttctctaggagtaagttatagttcactgcttcctccccggagcgtgccttgccgtttccgttcgttctgtgatctgggttggcgacaggattatatacccgtcaggctcttgatatgagaggagaccatcggaaagccttacgccttttttcgtcccgggccgagaggcctcaccttgcttgtaggcggctccttcgcgcgcacgtacgcggtccccgtgcctgctgttcagcactatctaagctgcgccaggtcacctagtttcctgctagtagtcacccgccggggcgcttttctcaagtcgtttagctgcgcgaacgccaagaagcctgagacactcacgcggcgtctgtcacgctcttgccacggcgggagtggtagccgctgactagcaccttggccatctcatcgcgctggatttggttggtgccctcgtagatttgagtgatcttggcatcgcgcatgtatttttcgatggggtagtcatgcatgtagccgtagccgccgaagatttgcacggcgtcgatggtgacttccatggccacgtcggaggcgtagcatttcgacatggcggaatagagcgtggggcgttcagtggggttggtgtcgatgtagcgtgcggtggcgtaggtgagtgcgcgcgccgcttcaatcttcatggccatatcagccagcatgaagcgcacgccttggaatgagccaatgggtgcgtcgaactggcgtcgggtgcatgcatactcaagcgcaaggtcaaaggcgccttgcgcgatacccacggcctgcgcggccacaccgggccgcgagacatcgaaggtacgcatggcggtgatgaagccggtgccttcgcgccctagacagttttcgacgggcacgcggcagtcctcaaaaaccaactcgcgggttgcggaggcgcggatgccaagcttgtcttctttcttgccaaaactgaagccaggggtccctttctccaccacgatgcaagaggcgccacgcggacccttggcaggattggtgagcgcgatgacagaatagatttctgcttccccgccattagtgatccactgcttggtgccgttcagaacgtaatggttgccctcgcggatggcagtggtcttcactgcggcagcgtctgaaccagcttgtggctcggtaagggcgaaggcggcgaggcgcttgcctgccgccacatcgggcagccagcgctgcttttgctcctcgctgccggcaaggattatggggatcgctcccagggccgtgccagcaaagctcaaggcgatacccgcgcaagccttggagagctcctccgtcaccagcaccatgttcatgataggcgtgccttgcgccatgccgccgtatttctcatcgatgaagacgtggaacagatcggcctcggccaacagcttcacaatgggccacgggaacttcgcctcgcgatcgtattcggcagcaacggggcggatctccttttcggccaactcgcgcgcgagatcgcggatagcggtctgatactcggtcaatccgtactccaacatcaatgagcctcctcaggagtaacactggcttaagtgaaggtgaatcgtgtgcgtcggcaggcggtttgtcaagtagggtgctcatcctgagccggcacaaggcgccaaatgtcgatgtcggattgacaatgtgatgactttagtggttagggctggcagcagttggcttgtgccatcgattctcgcgtggcatcgtaagtttgtcccaagaggtcagggcgtgagcctccgcggagcaggatgccgcaaacgcgccctccctgacttttttctcccagcagcagtcttcgcgcactcaccgcttgttggtcactgtttctgtaacagcacctctgcgatcgtttcttctagttcgacaacaccgcggaggcgtcggctgttcacaaagtaggccggtgttccatccacacccgcctcacgcgccgtctgaacatccgctcgacttcctggctgctctcggccgaggcatgagaggcaggccagctatggcgcgcacatccagcagaggggggcggcggtgaacgactggggataacaggaacagagatttgatcaggaggcggcgagagtctcaagcaccgtgcatctttctccgtctgtcgcctcacgctcggccagaggaccctgctttacctgctcgccattttggcagccaataccgaagtgtcaagacacacttccccggcttgtcctgctgcatctctggaaattccagatgggcctgtgtgctatcaggcgcgatgggcagaacgccccgccgacccagcgctccgcctccaggccgctgtggggcggcaacacggtgcaactgtctctcggtggcgtcccagttgaccgcagaacggcaatcggctccgaggcacccctagcttgcaacttggaacgtcagccgggcgctgatggcttgaatctgctccagagagcgagtgttctcgacggcggcaatctgaagcgcgacgttaccgatggccgatgactcgctggagcccttgacgacttccagtcctgtaagctgtcctgtgagcgtattcagggtctggttgcgcacgcccccgcccacgatacacacgcggtcgaaggtctttcccgtcgtttggcaaaggtccttgatcacttccgcgtaactccgtgccaagctgcgaaatatggccgccgccacgcccacgggttgggtctctggcgcgaagccctgccgctcgagcgcagcgttgatgcgggccaccatgtttcccggcgccaggaactccttttcctcgatgggaaaataaggcccttccggcgggatgcctgtgcagtcttgggctaattgggcggcagttaggctcagtccctgcgcattccattcgcgcaagcactcctggagcagccacatgccgatgacgttgcggagaaaccgaatggtcttcccgacaccgccctcgttggtaaagttgtgctctagagcctgcgcagagacgacgggattgttgagcacggtccccaccagcgaccacgtccccgaactgataaaggcaagcctgtcgtgggggaagggaatgccagccacggcgcaggccgtgtcgtggcaggcgggcgcgattatctgggtgttgttcaggccaacctcgcgcgcaatctccgggcgcagattacccaacaccgtcccaggttgagcgatgggcgggaacttttcgaggtcaaggtcaaatgcggttgctagctcgcgcgaccaggtgcgcgcgaagacatcgagcatctgcgtggtactggcgttggtgtactcgtcggtggccaccgcactgagccgatattggaagtattcgtgcaaattcagccagatagcggtgcggtcccattcggcgggaaactcgctcttatgcgcgaggatctggtagagggtgttgagcggcatgaactgaattccagtgatttcgtagattctcttgcgcgggaggatcgtgaaggcgcgttccatagcaagaatattgcgggggtcgcggtagcagtaggcgtgtcctatacgattgccgtcgcggtccaggcaaacgtagtccacgccccagccatccacggccacgctgtcgatgcccccgctggttgctgcggcggcgatacggagaccggtgaggatttccttccagatgtattccaggtcccacaccaggtgcccgtcttgctggtgcggtcggttggggaagcgatggatctctcgcagggtgcctcgacttccgtcccaggaacacagcgccaggcgcccactttcagcgcctaaatcaacggctaccaggttgcgagtttccgccatggcttcgattcctctttagttgtgtggtccgcgcgtgcatgtagggtctgttgttggcgccccaaccaacggctggtgcaggttcagcttgcccgcctcactgaagaactcaaacctcagacgcgcatcggcgatagagggtcggccatcaacgcgtacaaagccctcgtggccgcgcgcggccaaccgctggtgcccaagcaacagttctgtgctttgccggaaccagggctcgaactccgggtcgagcgcgaaggggtcgagcagcggccgggcctcgggagtattatgttcggttccattgaacactggccaccaccgacgctttgccgctcgaacgatctcttgtaggcgctcacgcgtattgcggttgggaatgacctcgatcgcatagatgcctaactcttgcagacggtccaacagcgcttcgatgttgcgctcggcctcagtaacaggattccccaagaccggataagtgggaatggctccaaaggcaaggaagatgtcgcgcagttcctcaagcgagacgaaggccgcttctgattcgggtacaaagcaaggcgcaccggccttcaacaacttggcgcgaacgtagatttgtagtgtcgcctcgtcgtcggccgggggtgcggcgccgcaacattgctcgagaagctcatccagcggccgaccacgctcggcagcgagctggcgaaggcggttcagagttgcccacgcaacgtgccgttcagttacattcccacgcggggtaagggaacgtatatcgttccacgccggtccatctgcctgcaaacgatcatggaatagagcgttcacctttgcggccatctcgcggttccgtttctccagcgccgcgcgcatggtcgccaagctttgcatggcgggggatgaatcgggaggattcctggtgacgcctttaccaggcggctgatttcggccgcgcgatccatggccactgcctcaagtgagaaggtggccgcgatactggcgatttcgcaagcttgccggaactcttcatgtccggccaccgtgtagtggtcgttgatgccgagtacggccaggccctcgcgcgcggcctgccagacggcttcggtaggggagcggaaaacgctgaaggattcgttggtgtgaatgtgagagttggtgccccggcggggtcgtggcccaagctgcgcgcatagctcgcgcaaggctcccaggcgctcatctagggtgccggtgtaaaggataggttctagttctcggacgctgtgggtatgaggggacttcatcgcaccatgacttgtccgctgtccaccaccagggtctgaccggtaatgcatcgcgcggactccgaacataggaagacgacggccgccgccacatcggagcgtttaatctcgcgcttcagggcggtaagcgacgtgtaataagggattacttcttccggcttgataccacgcttgcgggcgcaggcggcgatatattcaggattccagatcttggatccctcgaagacgttgccgggcgcgacggcgttgacgcgaatgccgtccggtcccaactccagtgcccagccacgcatgagatgcagctccgctgctttggtggcgttgtaggcggagttggctttcgaggcgtccaggccagtcttagaagataccatgaccatcgcgccgccgcttccttgcgcgcgcatgatgcgcgcggcctcgcgcgccgcaaggaaatagccggtgaggttgacctccaaggccattcgccacttgtccaaggggaagtcaactagatcatacgggggggcgatgccggcggcacagaccagaatgtcaaggccgccccaatggcggaggagccggtcgaatccgccggctacagcctgctcattggtaacgtccatggcgagagggagggcacgccgtggttcacaggaggaggccgcagcggcttccgcgccgggcaaatcgatatcggcgaagccgacagcagctcctgcctcgaccaagccttgcgcgatgcccaagccgagtcccgaggccgctcccgttaccagtgctgtcttgccggccaggggtgcggcagccgattgcatgagccgagcccgatagtgttccgcctcccagttgatgataaagtccgccgcagagggtgcaaggttgcgggcgccgcctcgtctggcggccaaacgcacaatcttggccgcagccaccgcaagttcttcaactgcatccagtttgatggggtcgtcagcaagtaggaatgcccctaaatcctccaccaccgccacccgtggcgggggattctgacgcaacgcgagcttgagtttttcccccagctctcccaacgattgcaccatgagcgcatagggacccatatacacgatgtgatcgggcgtgagggcgccctcagcaagcaccgcggcagcgtcactcaaggctgcgcccgccaaatcggactgctccgagaggcggacaaaggccggctcaccacgaacctcccgccacgtccggcggagttcggccatcgtcctgcgcgtggtggctgagtcgagtggttgagggagcgagggagcgggcgcctccccctcaaagtaccgctcgcaccgcctcacccattcttcgtgcagggctacacacatccgcgcgtcgggggcgcagacaagcagaccgtggttttcaaggaaaatgacgtttggaaggaacccgttcttttcttcatacgctctgaccacctcgcgtaccgtcgtagccaggcgccagccaggatcggtataggggatccacagcgggggtggctcacccggacgggccaaatcccgcagagctttctcgcctggaccgcaattgagcgcattgaccgccaccggatgagtatggatgaccgcctttccaagcatggcatgcaagacgctttcaacagagggtcggccactgccacccaccaccgccgaagtgagatgctcgagcacacgagcctcgcgctcgctggtgtcgagcgccgcaagatcttggcggtcgaagatagccagtagggcgtgcaggtcgagctcgacccagccggtgcttgcggtcatggcggtgagcgcggtcccgcttgccttgattgccatagtgcggccgtcaggcgatttgacggaggtgttgccccctccggcctgcacatagtccggggtgcgcccgaccgcgtgcgacatctcgatcaattgcgcgagcgagtccttatccatagacattctggctatcgcagtttactactgtcttgattccttgccctgcctcgacgacggcgtaggccctgtgaatctcgtccagtgtgaaccggtgagtaatgaagcggtcccaggcgaggtcgtcacggcttatcatttctaaggcttgatgatagtgacgcaggttagaagcaaaggcgccgaagatggagatttcgtgatagtgaagatggttggtgtcgatcggcaatagggggtcgctggcggggatgccagcaaagaaggagactcggcccttctttcgcaccaggcgaagcgcgtcggcctgcacggccttcactgggcaggcggcgatggcaacgtcaaacttctcgcctccggctgcctcgagaattctctctcctgcgttcccttcggctgtattgactggcacccccaggccgaattcatgcacataggcaagtcgctcttgggaaacatcagcaatgaccacgggctcacagccacgggccttcaggatgctggcgtgcatcaggccgatgggaccggcaccgaaaatcactcctcgatccccaacctgaggttgtaggtactcttggccattgagacagcaagacagtggctcgatgagcgcggcccgatccggcggcatcgattccggaatgggaatgacattaccttgcgcgacggcccgtgccggaaccttcatgtactcggcgaatccgccggcgtagtcgtagcccagtgcggtaaacgactcacacagattgtactgcttgcggcggcagtaaacgcagcttccgcagcctacgaccgtggctacgatagcccgctggcccaccctcaagcctgcgacgccagcaccgatctcgtgcactatacccacaatctcatgaccggtgatggcagggggaacgacgtttttttgtccatacatgaagatgcgcttgtctgtaccacagactgcgcaacggagcacgcggagcacaacttctcccggtcccgccaccggttgtgagacgggctccacccgcacatcgcggggaccgtagaacactgcagccttcatgggatgccctttctgtggattcaggcgcttcaactatatggtcacgcaaccgctcatcttagcttcggacttcctcagggctcaactataggcgagtgtcgtcgcctcccaccagacacctgcctctagcgcgcccgttccgggcgcaggggaatctgctgcctttcctcggcgacgcgcctcggcagcagagtccgggcagcctgccgctcggcctcgtagcatgcgcctcacgcgtagctacccccagaagcttggttcctctccctgcgctcctgcgtgattcgctcaatgtagcccgactcacggaatgccttcagtggatcctcgggaagacctcttgcccgacgccactcgcgaagcaacggccgcacgtcggtggcgaaggcgcttcttaggcattcttcggcatcgatcagctcgcgtctctcctggtagtgggctaggcgactatggtccaccagcgccgccttggcatagagctcctgcgccgtcatcacggtttggatcatttcctcgatcttgcctttcagattgtggctctgatctaccatgtaagcaatgtcagcaggccggccggtttgccactcgaagaagatgatttcgtggaagacgcggaacagttggtaaggatcgatggagccaagcgtcaggtcgtcgtcggcgtaccggcggtcatttaggtgaaagccacccaacatgtcttcggccagcagccaggcgacgatttgctcgatattttgcgcctgatagtgatgtcccgtatcaaccaagaccttcgcatgcgggccggccgcccgtgccagcaacaacgccatcccccagtcggcgatatccgtgtggtagaaggcgggttcgaacggcttgtattcaacaagcaggcgctgcccggctgccaggtgggcatgaacctgtttcagaccttcctcgaaccagcgctttcgctggcggatattcgccgtgccgggatagcttgacccgtccgcgaaccagagcgaaagatcccggcttccagtctgcttggcgatttccacagattcaaggatgtgctgcagcgctgtctggcggatagaagggtcagggttcgccagcgagccgtatttgtaaatctgatcctggaaaacgttgggattgatagcgccgacgcggacaccgtatttctgcgccatcttcttgatgtccgccgcgctcttcaacccttcggggaagtcccaaagcacatgcacggctaccgacggacagcatcccgtaaactggtgcacttggccggcatcgctcagtttttcttcgatggtggtggctgccgccggttgaatgaatttcccaaatcgcgttccagtctgtgcgaacgcccaggagggaatctcgatccgcaaggccccgaggctcctcgagaccgtttcctcttctcgggcaaccacgcgtcacctcctaaggaactgagacgggagtctaaggggaagggtcgccaaacgtcaagcaggtgcagcactcgcgtgtcgcggcggtcacgagacctgggaggactgacagacccacaagcggagtgcgcgtcaagtcactggcaggggcgccggcactctatgggagcaactcgcgaggattggctgctacggttgactaacgggcttcgcttctctcggcttggcggccgattaccctgcctctcctgaactgcgcgtagggaggaaaaagcaaaagggtgaacccgccacaaacggattcacccccttggattatgacgcactgtcagcttagacccacgagcgccgctttcacgtgcgtttgcgacggcgtaacaaggcgcccacggcgatcaggccggtgccgaacaacgtcagcgtcgctggttccggcacttggtgcaaatattcttgcttgannnnnnnnnnnnnnnnnnnnnnnnnnnnnnnnnnnnnnnnnnnnnnnnnnnnnnnnnnnnnnnnnnnnnnnnnnnnnnnnnnnnncacggtgctcgttcacagcggtctgagcctccccccaccagtatgcgtagaagctactgtagtaattaggtgcaggcggatagaacaggttccaaaccgcccactgaatctgcttctgctcttcgagggacctatcgggatagatcgagaacaggtaggccgcctgcgcgtacttgttggcgtcatcgtaataagttgccgagatgtcag

SEQ ID NO: 583 - DNA, 15169 bp, Artificial Sequence
  Synthetic Oligonucleotide
gttcacccccacacacgtggggaatacgcaaacgcctgattaccatctgcctgatactgcggttcacccccacacacgtggggaatacactggattatcccaactggaggatgaacagtccggttcacccccacacacgtggggaatacaccttccccgtcaataaatcccgctatgtaggcggttcacccccacacacgtggggaatacggttgatgaggcttgacgaagcaggcagttcccggttcacccccacacacgtggggaatactttcgcatttacggcgaatgtaaaagcatcgtggcttgttatgaggtcggttcacccccacacacgtggggaatacaactggatacagatactttcgtacaccgtgaccggttcacccccacacacgtggggaatactaccgccttttgtcccaacacgatgcttgaactggttcacccccacacacgtggggaatacgtgtgcgctggtatagcccgtcccagtccagtgcggttcacccccacacacgtggggaatacgtagtcgggtaaaaatataccctgtcgggggacggttcacccccacacacgtggggaatacgttttcactggcgaatcccccactataaggtgcggttcacccccacacacgtggggaatacatcgcctatcaggtctcgaaccgctcgcagagcggttcacccccacacacgtggggaatacgaactcgtgccagagtccggccgaccacttacctggttcacccccacacacgtggggaatacttaattttcttaacatctccaaactcatagtccggttcacccccacacacgtggggaatacgacctggtgtgccggaaccaccggccggaatggggttcacccccacacacgtggggaatacacttaatgttacgactgcgccgattaccatctcggttcacccccacacacgtggggaatacttcagccttgacgcctttagcggccgcctgcacggttcacccccacacacgtggggaatacctccactcctggagctttacccaactcaagagcggttcacccccacacacgtggggaatactcccttccaaaggcagagcttcccgcagtatcccggttcacccccacacacgtggggaatactacactcgttcccgccggcgccctcgttggtacggttcacccccacacacgtggggaatacatcaagccctgccttttgggcgttagagaatcctggttcacccccacacacgtggggaataccactccttagagcaataaatacggtcagcacgcggttcacccccacacacgtggggaatacacagcctttgagtaattgggctggccatcgtccggttcacccccacacacgtggggaatacggcaacatccaacttggcgctgtgtgtaccgcacggttcacccccacacacgtggggaatacggtcacacgatcgctttggtccactcccatcccggttcacccccacacacgtggggaatacgcactaggggttcacacgttggcaaaagagtccggttcacccccacacacgtggggaatacaggccatgcggaacaccgtcacgctgtgctgacggttcacccccacacacgtggggaatacatgaacctttccaattccagaaggacggtattgcggttcacccccacacacgtggggaatactatattgaaagtaccagaagttaaaacaacgtgcggttcacccccacacacgtggggaataccttaccaggaagccaaagccaccgcatgggttgcggttcacccccacacacgtggggaatacttaactgattgtattcgtccggccagtgtgtttcggttcacccccacacacgtggggaatacctgcccagggcaggtcagacatgcagagtatgcggttcacccccacacacgtggggaatacgggatatgccatccagaatgtgcgccacgactatggttcacccccacacacgtggggaatactctgcaatcccaaagctaaccggtttatgcctcatgcctagctagggtgttctagtgtcagaaaaattgcttttgacaatctcttgagcgcgtttgaactcaaccaatgccagaccatccaggtcaataaatctccgatccctttcaccagtttgccggtaagaaaaaccttgcgggttctggtctgtccagatttgcattaccacgccggtatcctttgcctttttcaccgctgttgcccaaagttcgtctctaactctcgcgctcgggttcccaagaaaaacccccgtcttcggttccaacagccagcgtgacaatgcgcccttcaagctcgtcggcgttttctccagtatcatcactaacacccagcacctccgcgatgtcaggcaagagcctatccatcagtctgaattcgtggaacacctttcggcactccatgcgtactactctttctaattccggtggattttgagcagctatcctgaaagcagtagggattgtaacctcggttttgtagaggtctccgatgtcataaacgaagcttagcattttacccgtgtgaacaaatcccagagcggatgaatagccagctgaaagaatacctgcgtgacaaactccatagagacaagcgttcgccgcggatagagcgcggttgattgggtcacctttgttccaatcatcctggtcatactggcgacctttccattccaccccgtatttagctgaagcctcggcataggtgcgacgcacgcgtatgccttccataccccggatttgctccagactaaccacctgaggaaccgcttctttaaagcggaaacggtacatacgccaggcaacttccagacgtttctcctcgtcactaaccagtttcgcctggcgaatcatcctccgtgcgctgtaggtgccaccaatgcttgccgcatagagccgaataccatcctgccctgtccatgataataagcagttattctgggaaagggatttcaccgccgcatgagtaaccgtggagccgggtcccagcataatgatgcttaactggtcaattggcacccgcacgaagctctcaccctgctggaataccaacccattcgcatcaacatccagccgccccatttccatgtagaggtggctccatctatcacggaaacgcggcaattcatgtaatgtacgcatagctactccttgatacgcgctagagaaagcagcccgaagccgaagcctttggcggagccaatgccctgaatgacggaatcgtgcagatgctcagcatccgccacacggagtatgccgtcgtagcgggcgtagaagaaccgcttgagttcgtcatctttgccattggaagcgccgacgtagcccgtttgcacgttgagcaactgctcgacggtgaacccggacttttcggcatggcggatgagccattcatcgaggttagccttgtccacggggactcgcttaccgttgcttttggtgccatcctggcgggtcttcgtatctatcttccgtgtggggtttgccagcagacggaacctgagaagctgctggttctggaattgtggttcataagtcttcaactggggtggcgcggcaagaagatagccagcgttgttaaaggcatagtcccagtccggcttcattccagattgcatcacaatcgcagcattcccgccgggtagagggtcaatgcggaaaagaaatgcttgttcctccgtgcgcgggccgtgaacatgctggaagtcatcaggacgaaagggttccaagaacggagggtcgccctctttgcgcgcggaggatggaaacgccatgcacaggcgctgatgaacgcggtaaaggttacggagccagagccgtccgggggcaatgtccaagtcaactttaagaagagaaagaaacatccctaactccttatccggcattgcgccgggcgctatgtcaaaaaataccttctcaggtcgaccgcacagctttaagcaattcgcgccgccggccaggatgttgctctttgagattacgattgatttgttcgagaatggtcgtgcgttgagccgggttgcaagggtcaactctttcttttcggccatgaccgtattccagcatcgtacacgcatcgtgacaggtcttgcataacgaccggagatcagagtcggtctcgtgtccggcattttcgtaggacacatgatgcacttccacagcaggggacttgcagaagacgcaaaggccgttatcaagtttcagacgactcggcctcgcgactgtatagaagtgttcactgtaagggttgccatgacgtgcgctcagtcgctgtgtttgggttgcctgtcccattggcaccgtaacctgattcttgataaccaaacgcggagcataattatagaaaccgaaggctacgggcacatcggaaacgagccgggcacccatgggcacaagtctctctggcggctgctccaaatatgtatcgagtgttacagacgccccgctaccctcgcggtcaatggcgttgattctggggcgccaggggaccgacgaaagcgcttgggtcagcgtgtcaaaactttcggtgccggcgtaaacaggctcggccgggacgcagcactttcttccaaggaacaaaggccaggtcggatttctcagggcgttggcgcaagaggcgattatggttgaatcgccatgtaacgcaaccagaaatgaggcatcaaaaagatattgacggcgcgaaagcaaggtttcgtattcgccggtcgatgcggttatcttgattttgccgtcggcgcttcgaatgcctaacttggctcccgctgtctggtaatcccaatcaagatttccagtccggtcgacgcgtactcccatgagtagtggtgtcagcagcttgagcggctgccgtgaatcttcacgattaacacccatggcacagagcaacattcccagtatgccggacttgctcgggtaaaggtcagtgcggcgcaactgaaaacgggatgaggtgccccacgcctgcatgggaccggccaagcgcagaaacaaagtattgtggtcactgctcatgcggtaccctccacgagtttaaccacggatttgataaggtcttcgagtgtgttaactcttttagcttttgcgatatctaccgaagcagaccccactgccaggagcgctcggctcatgtctgtcggcgagaaggctgctactacggtgtcgatgtaattactcattgccgccgctgattcacgcatgaggttaataccgtcaacgggttctaggaaggcatttgcatagctgattggacactttgcttccgatacttcgacgaggataagttcaggaacgccgtgcgcggcaaagctgttctgtttgcctgtgggattggatagcgccgcggcgcggacaagcaccccggctgcaagagctgccttatcgctttgccaggaaaggtgcttcttcaaggcatcgatgtcgagattgagatacttgtagtagacggctgaattgaaaaacgtttcggtatcgccagagccgagaaaggcagcgcctgttttctcggtctgagttgatgcgaattcctgcttcttttcatccatcgcggtgaagtagtcgctctcgattagcgtctcatgcgtgctaatggcatgcgccacctgacaggctgcttccacgttcacgaccaggtcactggtagtcattctgccgaaaaggccgatgtcaaccgtgagcttcttgctcgccgcggaagctcgctggacaaactcatcaaccgttttgtctagagccttctcttcagctttagagagctttgctttggtcccaatgaaccggttgtatgccggaggggtgcgcccacgcagttctacgacaagctcagcaatttctttagcaaagggtggtgggaaaaagaccagttgacccgtccggtctgctccatcgctcacagcagaagagctttcgggctgcgcttgtgcctcctcaccctctgctgcttcgtctgaattgcctccgcgcttttcagccttgaatttgctggcaagcgcggccttgactttgttcaattcgtcatcggtaatgcttgggtcgctcttcctcaattcgtcggccaccatacgtggcaggtatgtcgttctggttgcgaggtcatcgccgaacacttctttgaattgtatagaatggcggatatttcgcttgaggcactgactgctgatgcggccgcgcgtgacgccgccaaaaatacactttttcggctgcccttcgtcatctcggtttaagtttcctggtggcatgctctggaggatatgaatctgtacaaacataatgtttctcctttttcgattctcttaattagtcgagtaattggtctagtccgtaacatagacgtgtccagtcaacaggttcgggatttctcttgcgcagattgtcaacaagtgcggcgctaagtgcggcctcaagccgacgaccgcgtgggaaagaaacagggtagggggacgccatgtcgcgctcattgctctgtcgtttcggcagtctctgcagcgggcagaattcggcgttgggatgaagagtgcgggcacgtgcggggactgatgccatcagtttgagcatcaaccacgccacattccgcgacggaagtcctttggtcttcttgtcacgaagtccccaatacaagccgctaaaaacatcgaacgccgctggtgaatcgtgcatatccatgtaggcagcgttcgatagcgtaacccaatcggtatgcgtaagaagcctcaccgcagccggcacaaaatgctcaacgtccttgcgctcgactctttcgggttctttccaaccgtcgatgccctgtctcctggacggggggacggcaggcggtaaggagcgaatcgtctctggtgaaagttgtgccagctcaacctgccgatgatcgtaggttttgttgttcgcgggatttgtgcatggaacgaccaggagccaaccctcatgcttggggttcttcacgactacggtagattcgggaaacggatcgtcatgcgccaggcgctgcaagtctcggccatcggtagccaagttctcccgggaactttttatcgttttatacggcacgttcttgactttgtcatatttcttactcacatcgtatagagcataaaaggcagccggatcctgccattcgaacaatttctcgtctgcacgcttttttgtgttttcgtttttcatgtacacgattttcccgaccgtgggtacattgctttcaccgcagtaccagcaagtgccttcttgggctgaggggagaaggatgcgccggggattccaagttagcgcctcgagataggggattggactcgtcgaatcagtcggcgtaaagtagccggaccactgcgctttgcccgctttagtatccaacggtacaaggttcaaaccaagcgtggccgccaagttatcgccagttgccattgccataattggcggcgcattgtgtaccgagggagtctttccttggccgcctgattggctccacggaaccacacggagcaggccgatggttgcgcacggcaggcatagccgcatactctcatcgtcgccgtgatgaaagtgggctatgttagtagccacagctaattcagcaaacaaagagccgaccgacttcttttctttttccttggagatggatacagacgtgtcctgcaggaatggcgattctttatcgaagaggtcaaaacaatggtcttccttgttgataccgccgagcaccgcgctcggcaattcgctcttcagcaacgacgcccgaacctcttccaccccacccgctaagtctgctttccaataaagcaaagtaagcaggaaccggtgcacggcgaacatgtcgagtgggcttgctaagcagatacaacggatgcgccctgcatgggtcagcgtatccttgatacccacgtagccaagcttcccatcggttccgagaacaggaatccagtgctcctcaagcaggttgtatttcaatgttatcctccgcgcgtgttgttatacctgcaatgtatcttttcttggcagagctaatcatacatttgttctattttcgttgtcaaaacacctattcgtgatacaatctgtaaagtgtttcgctccagtctcggaattgctctttaagacgcaacggttcaattacctcgacatccggcccccaactacgtatccagggggttatttccaatgcactgtttacctgtaaagagagccggcatccgccatcgggagtttcctcaattaattgtgaaatatgccacactgattcctttacgcggcgtgtcacatgtggtgaaaatttcagaacaatgctaattgcatctccggtgaaaataccccagcttgatgctaacaacttcccgatatttatatcagggggaatctcgaaccgcttgttcaagacctccaaatctttcatacgttcaagcttgaaggtaataatgccttcctttccttccctcacagcatgcccgatgacgtagacggagaagccaacacccgtcatatcaacgaaataaggttccagaaaccattccttgatgccttcgctttcaaaagactggtacttcattctcacctggcgttgtgttgtccatgcgattgcaatcttctcaaagttacgtataaactctaagtcttcctttttatcgccaaccgaactggcgctctctttcaaacgtatcgcaaggggtgaaggcaatacggaggaaatctttgtaagagctttttcgatatgcgggttgttctcatcggtctgacggagcgctagacggcacgccagaaatattaccattgcctcataaagtgagagggaaaccggtggcagaatgtagccttcagtaatcccataccggtctccgttctgcgtcagaggtatcttaaggtcagtatcaagtgattgaatatctctttgaatcgttcgcatacagactccacaaagatcagctaattctttgctcgtgagacctgacggattactgtagagaaagtgttgtatttggctgagacgaactgcccgggcgagactatctttatctttcacttgctcctcctttttcatttgtccgcaggtggaattgcaatttctgccctagtataacacagacgagcgacagatacggtcgtttacgacaaaactaaaaagaagggatttcaaagacaggactccgggttagtaaatagttagccagcagccaagtcgaaaactcaaggtcatattacaattgaaaatattaattgacatgctggtcgttgcctaactccctcagtccacaaccaagaccagagttatccaatggtaatctcaaacgctacctcagctcaacttcaggccatgttttatcgtattacgaatttttcccagttttgtagtcgcctgactttgaggccgcttgtcccatataatagtacattatatttcggtataccgaagacagtctaaattgaacgttattatccctttttgaaaagtattcaattttttatttgttacggttcccgggtaattgctctgtataatcacggaaatatcccctcggatagaaagaaacttgaaatatatatattgttgatgtatagtttattacatgaaaaagaagtgtattcctcagaaagaacagccgagacatagaataaacctcgccctcgacggcgaattgtgggaaaagttccaacctacgctaaaagacgattggggagacagtttcaactcttgggtagaatatgcaatgacctgctacatgcatgaaacatgtgatgactgcccatttatcgcagaggaagataaaggcaagggatttaaaccatctggcgtaggtcggaattcaaatgagtagataacagggtaaaaagtgcggtagcctgctgaaacaagctaccgccttggggcaatcaaaaacgacgcaatcggccttgacgtacccatttttattttagcacggaaggagtaagcaatgaagacattatcaagaaaagcaaaggcattatccgtgttattactttatcgtgtctcttctggtcctgttggtaatgaatatttttcgggcatactacaacaaatcttttgtgatcgaattaaaaacgttcacattgactctagtgccttaaccagttccctgctacaagtcgatttagatagattagtaaagaaaaaaagatttaggcgaaaatccgagggtcttcagcgtgtctttcagcaatacgttaaacaaaccaaccagtctggcgataataccagtttaaccattggggacatcgtgaacggctgggccgatctaacccaccaagacaaagctgaattcatgttaagggttcatccaaaaataactgcattggttgctgagcaaggcaatgttggagcaaatcaagatcccgagaaagatcaaaccggagccgcctttaaatttatgaacaatttattacttatcttgttagcagaaacgccacaggataggaaggatgctttagttgaacagatgagggacttcattctgaatataggtaccatgtcggatattgacttaccagatgaaatcttcagcttaagctgcaagctgctgatcggtgacgtggtaacaaaaatggaggaggcattttctgttaatcctgccgctaaagtgtctttgcagaaaccattattcggagctgttatcgagataatggcaaagaagtatggctgggaaagtggggtaccggatgacaacaatgccaaactccgggccgaactgaaagaaaagggactgtttttcaatgagaggacacaatctcgcgctttaaaggaacttgccagaagaaatattctccttaatattgatagcgccttggacgggacgctcgtgaatgatctggcaaagatcattttgaaccagaggaccaaccagcaaaaccagacacaaagtgtatttgtttatgaaccaatttcacctgaagttgacgccgaagcaaagaaaaaaatactagaactgatttttaaaaggagaaacgaagatggtaagccagatagaaattattagcgaagaacgtgtcaacaactacattaaagaagcagcccgtctcgcagggtatgaagaaggctttggtgttactgggtgcgatctcacaaaacgggattggtgggtagcctataacaggcaatccaccagagagcaatctgaaaatgaccgtctcggagaatactttctaacctgtgctaagttggcaaaagaatacggagcgattgtgcctcgtgaatatattatttatgatgcaaggtcgagtgaaaactttgaccgtcccggcatgaagtatttgcgacatgaccttattacgggcagaaaaatttccggagttattgtcccatttcaggggagactttcagctgacccattgcaccagattaccctcgaacgtgaatgcattcactatggggtcaagcttgtctgcggcgactcccccaccggtaacgactgggggagccagactaccagactgattcaagcccaagccaactcgctcagagtaaagtccaaccgggataatgtgcttgccggtaacatctcgcgtgttatgaatggaaaagtaccctgtcaccgggtgccttatggatacactatgattgcggataaggttatagaccagcgtaccggcagggttaaggtaaatagtgctaaatggcaaattgagaaggctgatatcgatggtagtcttttccccaattcaccggcttgggtagtgcacaacattttcatctggactggagaacaggggcgaacttgttattgggtggccgctgaattaaataaactaagaatcccaccaccgcaacgtgaaacgtggatgccccgtacggtgattaaaatagtcaatcgcaagtgttacacaggcaaggcggagtataacgtcaacggcctcttcaataacccagagcgtcctttcggtgaccctactatgggtgttaaacgaacgctaatacgccccaaaccggaaaaggaaagaataccttacaatgtacccgctctcaccacagaagagctctggcgtctggcaaaccagagcatcaaagaaagagggaggggcagaggtaaacaggggaaatccattaaagcattactgcgcacccggatactttgcccaaagtgtaataaaccaatgtctgtaatgcgcaaagaagctggcagtgacgaggtattctattattgccgggctcactattgttcctggataaaggatccctgcaactaccggaaattcattcctgcaacctgggatgatagtgtctgggaagaagtatgccacttgctgcacgatgatacgtggctgcaggcacagctaggcgaagaacaaaatcggcttcaggacaaagataaattaattcggctggaagaaaacaaaatcaagcaatctaaccagaggttatcaaggatacaggacggttgggaaaagggcgtctattcggacgcggaattggggatcaaagttaaagaattgagacaaacaattgccagtgccgagcaagaaatagagcacatcaatgacatgtacatgagggagaatttcaatccggaatctgtccgtaaggatcttttatctttacgttcgcaaaacctggaatatgctagcttcgaggataaacaagagctaattgcccgactgggggtaactgtcgttcccagtgaagatcttaaaacacgtcgaatcagttgtcgattaaacttgaatgatgatttaaaaaagggggtggaaaacggtttaacaaaagtaacctttggtgggctacagcgtacaatacgcagaaccaagacctttgaattggctttcaatctagccaagtcaggaccgtctcgtcttcaccttggtcatgcaaagcgcgacacgcaagatctttgattcgatagcttgttattacgtgcttagaagggtacgttttacacattatttaccgttaacaagagagagccagcaatcgattgcgaaaaatcacgagttttaccactattttaccgctggtcgttctgcaaaagacgatatttaaggtggctggaaagtcgcctattccgccattttgcggtgcggcgagtgaacgaaacgatgaattgttgagtcactttcagtcattttgcgatatttctgcagcctatttctggccaagtctatgacgtgaggcgattgcgatgctcaaatatgcagagacgtttcggaccggcgttgacttggccccaaaacattacggattctaggtggataagaggggccaatgccgaaattgacaggtcacaccatacttggtaccattctcctgcacggtgttcgcgtgcacgtcaatcaaagcattttgaaggaggagcgctatgggtttgctggaacttaatgtcgacctgacagatgaacagaagactatccgcagggaggcgaggaaattcttcaaagaggtgtggaggcccgcgggcatcaagctagacaggatgcctgacccccaggacgtcatcgccaagaattcgatttactgggatgtcatgcgggagactttccgacaggggtaccaccgcaccggtttctcaaaagcacttggcgggctggaactcgacccgctgacccgtaacctgttgactgaagaggagggctatgccgacctcggtctttgtatcagcctcgggtgccacgggttcccgtacttcatgggactggggtcgggcgtgccggccctggtggagcttggcatgaactatataaaggataatgacgcgaaatacaccgggtgttgggctatcacagagccggaccacggctcagactggttgtactccgccggggaagcggtgtccagccccagggttacgccccaggtccgcgcaaaaaaagtgggcaaagaatacatcatcaacggtcagaagtctgcctgggtatctaatggaacgctggccagtcatgcggcgctgtttgtagccatcgaacccgccctcgggcttacaaactgtggcgtggcggtcgttcccctggacaggcctggagtctcgcgaggcaagccactgaacaagctgggacagaggtcgctcaaccagggagagatattcttcgatgatgtgcacatacctgaagaatacatggtctggaaagacccgaagacgtatccggcgcagtacgaatcactgctcacgggcacgactgccggtacgggcttgcctgcaatcggctgcgctcaggccgcgttcgatgaggcgtaccagtactgcatgcagagggtacagggcggcaaagtcatcttcgagcaccagagcgtgaaagcaaggttgttcgatatgttcattcaggtcgaggcggcacgttcgctgagtcggcgcgtgtccgcatacaactctgccaatccacctggggcgcttcagtattctattgcagtcaagatattgggtacggaaacagccttccgtgttgccagcatggctatccagcttttcggcgggtatggcctgagcaaggatttcctggtggagaagttgttccgggacgcccgcgcttctatgatcgaagacggcgtaagtgagacgctggcccttcaaggcgccgaaagattgagataggggcggacgatagccatgcccatatatgagtttcgctgtaaaggatgcgataggaagttcagcgtcctttttcgcacctattcggcatcgccatcgcataactgtccggagtgcggccgtggcaagatcgagcgggtcatgtcctccttcgcctaccaccggtcggcaaacgacgtactggaggaagcaggagaacccacactaacaccccgacatgactactacaaggacccgcgtaacgtcggtcgatggacagagaagcggttcaaacagcttggtctcgatgttccccccgaaatcaaccgccaaattcaggcagccagggagggagaacccccaggaccggaaaacgagatgctcgggctctgaattgaatcatccctaaaagccagtgccgtcatcgtgcggatttgccccgggacaggaacctgaccgaaggttcttcaatggggcagagaaacaggtctgttcaaccacgcggcacgacatccggtaacgttttgacgatttgttaccacagcgtctaaagaacccgaagggcagagttccacgggctgtgcccgtgggtgaatgtatgcgatggcgatatgaggtagtagaatgggtgcgtggaaatccgactgtcc

SEQ ID NO: 584 - DNA, 14647 bp, Artificial Sequence
  Synthetic Oligonucleotide
tgttggtcgtgttcgtggatttttcggttcatccccacgcgcgtggggattaccacaacaaaatttgaggcggtcgctataatattcggttcatccccacgcgcgtggggattacgcgaaccggagagacttcagaacgctattgctcggttcatccccacgcgcgtggggattactcctaaattattgaagtatcgtatcggaacaaccggttcatccccacgcgcgtggggattacaattcaatgtcgaacgcgcggaattttaacgccggttcatccccacgcgcgtggggattacctcaacagttttgataaaattggagtgttcaacggttcatccccacgcgcgtggggattacccttcgtaatcattgaagttagatcacgaaaagggtgttaagtatcagtggcaactgcatcctctttaggaagatgctttacagcaaaccacaatccttctttttcctgaaaattccttgatgtatcgccattcgaccgcaacgaaaacccttgctcattgttgtcgttccagatttgaatgaccgctggtgttccacgacgacccacacaaagatcccaaagcttatcgcggactatcgcggaaacctttccgataaagacaccggtctttgcttcgaacagccatcgtgtcaattcaccgcgcaatgacgcaggaaccttctcaagaatcatcactaccatttgtcaattccttttccacttccggtgggttccaatacggagttggacgtgccgggtcttcatcgatatcccaaccgaaagattcgtcgtccaagttgaaatcaaacaaacggtcgatatcaggtaaaatacgttctaataatttgtactcgtggaagtaatctcgacagagatgccgcacccgactttccaagttgtcagtggattcctgtacgacgcgaaacgagagtgggatcgtcgtctcaaccttgtatagatcgccaatatcgtacacgaatgagagcgctttaccgacatggacgaaaccaagaccgggagtatagccgccactcacgatggcagtatggcacaacgaataaaggcaggcatttgctgccgaaagtgcgcgattgactggatcggaattctcccaatggttccggtcatagcttcgaccgacccactccacaccggtttcgttcgaggcaatcgcatacgcttcgcgtacacgaacaccttccattccccgaatttgttccaatgataaacccttcggtaatcgttttcggaaacgcatccggtacattcgaagcacgattcgttcgtgtgactcagggtcagcccacagtgccgcttgtcgttcgaggtgccctcctttccgggtttcaccgataccggtcgcataaaaccggatcgcgccttcacccgtccacaataccatacaaccattgtcagcaagcgctttcactgccgcgtgggtaatcgttgagccgggacccaacaacaatacaccaagtgaagcagcaggtacgggtatgattccttctttcgtccaaaccgcaatcgacatttcgtcttgttcgacccggcaatgttcgaagtatgcatacgataaaccatcacgtaatttaggtagggcacggagatcgttcattggtgatctccaattgggaagacagaaagtagaccaaatccgaatcccttcgccgatccaattcctgcatttatcgcagcatgaaattccatagcatcggtgacagtcagttttccttccaacaatgcagaacgaaagcgcatgacgtgttcgtcaccctttccgttcggttttttaccaactacccatcccaagttcacgacatcgcaactaccgacagaaaaacctttctgcgatcctttgcgagcaaaccaatcaaggatcgcatctgttggttttgtctctttgtcccaaagagtaacacgtttcccttgcgacttggaagaagggtttctatctgcaccattcgatccgtaggtagcactctttttcgtcggattgacacgaatccgaaatctacgaatgtccccattctgaaatgcaggagtgtactcgtatggctttattggtgctgctagaaccatatctaagttgtggaacgcatacttccaatctggctccgtttccgattggacaatgatgatcgtctgttgataattatctcgaacgatttgatcgatacggaagagaaaacgagagcggtcaaacccgtttggatcgaatgggagaagaaaattcggatcgactttttgcgtcgtggacatgggaaatgccatcgacaatcgttgatgaacgtgatagatgttacgcaaccataaacgaccggggcgaggtcggtctggattatcgccgacatcgatcatgagattggaatgatacatcactctacctcctcgatggatagccgacgacgacgggtttccaatgaacggaatgcgacaatttcagagcgtttttcgatgataagttcacgccaacgttcctcttcgggattgatgcgatctaatcccatcccgaccccatactcgatcatcgtcacggcatcatggcaaagtcgacaaagcgaacgcaattcgtcgggcttttcttcgcctcccgcgtgtcgataggtaatatgttgcacggtggttgccggagatttgcagaagacgcagagatgctgatcctgagatagccgttcgcgtcttttcgctttgtatttcgtattagtgtaatcggcgcggggtcttggtggtcgcggtgtttcgtgctgcaatggttcatttgcaatgcttatctgcccatgttcgccaacagtcaactcttcacgaatgacgaatcgaggtcgatgcgagggcggatcgaaactaaccggtatatcgtaccagacctgtgcatcgtcaggggcgtcgggttgttccgaagtgggttgccagtcgatcaggcagacgaggttctttttgggttcgttatcacgtttgagtcgtttccgccacggaatcgaacttaacgcagagagcggatcgggaaagaacccagccggatgttccaacaatggtcgcgacggaacacagcatttgcgaccaaggtagagtgtccactgtgggtatttgaccgctttttctaactcttgaatgagagatgggtcgccctgcaatactaccaaaaaactggcatcgcaaaggtactcgcgtcgggtgagcattgctcccgacttacattctccctttgcggttcgcatttgcatttcggcaccgacggtgtggtaatcccaccagcgaattcccggtacatcaattcgtacaccaattcgaagttcacttagtttcggtaaccactcgtccggcgcttgttgacgggtaatacctagcgcagcacagaacaatccgatgactcccgatttcgtcggcgcttcggcagttcgtcgaactacgaatttcgattcgtgtacaccccatgattgcatggaactttctaggcggagaaagagcgtattgggcagatcgctcatgctatgcctcgttgttaacgattgcctgttgtacctcgttccagtcgaaaccgattgcagctataaccattggtatcagttcatcaagtgacttgatattatggtcggttagtgcgatctcttgtttgttttcaaccacgtagaggggatagcgaagattgggtgaaaaccagaagcgctgtttagggatgccaaacccagtatcaaggtcatgcatatattgacctaattgagcgatactttgtgaaatgatttcccgttcccctttggctggcactggattcgcaaaggcgttggcatagctgattggcgtgcctttgatctcgatgagtatcccatcgggaggattgttcgcggcgaaactgttttgcttcccactcggatttactactgcggcagtgcgaataaatgtgcctactgtatgagcggctaattgtttgttatcgccgagattctctacaagttgctcaaaattaatggagaaatatttgtagaaacacgcggaagcaaatagttgttcaccgattaaatcggcaccagcttcttctttttcctcgcgtgtttcgtctcccattgccacgaagtaatcagtttcaggaaaggcggcgtgggtcgatatagcgtgagccgtttgcaacgatgcctcgacattcttttctagtttttcccaaattttcttcgcagatttgtcgggttcaagcatacgtccacttagtgccatatcgggcgcttgtgtgtaaagagcgattgctttcgcaaattcttttgctaactcatcatcagatttgctgttccttgattggaagagattcacaatcttctcaatggcttgttgggtcacgaagagcggtgccttgcttctctgactggtttcatcggattcatcggtctctccttcttcgcctgcagtggtgcgcggtttcttcgcttttgattcagtctttggtttgaaaccgcaaactttgagaatgccttcgactcgttttttgtcgtttgcatcaccttcgatcttgtcaagaatcctcttagcgagatcgcgcgttcttactcctcctaacagtttcgcaaactctggactcatccgaatacttcgcttgatgcattgactcgagatgcgcgagcgtaatacaccaccgaaataacaggtttttggtgcgccgaggtcgtccctattaagattcgccgggctgtggttctggatcatgtgaatttcgatcaacatggttgtaccctttcgttgatgctgagatattggtttatccattcctgatgcttggtctcctgttcccaaaaggagagatcatcggtcagttttacccagtcgagtttcaattcatgggaagaaatttcttgaagcgctcttcgcaatgtgggctcgatttgctccaagggagtggttatcagttcatcgaatttctgtcgaaaccggtttcgcgcacgttcttctcttggttcgcatcgctgtagttggtgtgcaaacaaacaatcagactgatgttcaatgggacactttgcatatagtttagcgatcaaccacgcgacttcccgtcgcggtgcaaactggttcttttgccgtagcggccaccacaaaccggtaaacagatcgaacccatcaacagtctggtcaagtcctttattagcatgggttcgcaagagtcctaggtcacctgcttttaatgtttgtaagaccatgataaaatcattggttgaactcattctgtagccgactttctacgtttcgttttctccggtgggtcatgttttgctcgcatatcgggtaatgcgttcgcgatactctttcgccgtatcgtcgctgttagtgtagcgccgggtgcgagtgatttcgcgatcatctcctgcattggacgatattccgatgctgcgttttgccattccgtttcacccccggatagaagattcccaacagctgttgagacggcatgctcgacatgaggacgattggaatcgtaggttgctttcaggtgatcgagtttccgtttcactcgcatcgtcttaggcagacgctttacgaattcgttgttcgatgtctctttctgccattgctcaaccgtagacaccgctgcttcgggtactgaattatttgatggtaactcaacaattcgttcccaaacatcgacatacttcgcattatctgtaccgagaccgatgatagcaaaagtggtcgaagttggataaatcgttttagcggcttcgataacaggtgcaagtaatttccataagggtcgatccatcttaaattttccagccgaaaccggatcaggtgcttttatcgatttttgagaagtgctactgagataaagtgcgtgtgggtctctccaaagggcagtttcctgcttacctggcgattgaaattcacaactgcggataatcgtatcggattttactccacagttgtagcaagtttgatggctctccgtttctgccaaccaaactttacgggcgagcatcgttagccctttgagtagtggaatttcggcagtgtcgcccacattaaaattgaggtcgatccaagatggttcaccgaaaggaatggcgcgaggtatccagtttttgtggagagtctcgaacaacgaattgcccaccgacattatgtaaacaggcggaactccatttattcccggataaaggtatggtttagtattgccaccaaaagtcataaataatgggagccgaagtagtcctattgcacaacaggaagcgcacaacccctcttgaaaatcggttgtgtgtttaaaatgccaaaaattgtgtccagttggtatctcttgatacaaatctgtcgtgggacgagaacgtcttgcatcagcatcctgataaaaccgctttccgtttccaagtaaattgaagcaatcccgattctctgtctcttcaagtttggaaaaccactctgctggaaacgaatcgatatttgtttcatcagggggattccccttgcaccaatacaaaatggcgagcaaaaaacgcatcactgcaaacctgtccatcggattcgatgcggcgatctctcggatttgaccggctttaattagcgcgtctttgatcccgacccggtcgaattgtccgtttcgatagagtaccggaatccattttttctctaacaggttatagcacataagcgctcccgtagttgaaagatataacgtagttcattattcgtggttgccaagttcatcctcaatttctttaatcgacggcaggcttcccttcagctcctttggaagtgttttaacgattttagtctcccaaccggcaacaccaattggtttcttcaaactgcgtagtgcatactccactaccaactcgtttttcgtcctacatagtagcaatccgattgtcggcttatcgtcgggatgacgtagtagatcgtcgacagcagataggtaaagatttatttgtccaatgaaagcaggatcgaatggtacagcttttagctcgattacgacaaaacaacgcaatttgagatggtagaataataagtccactaagaattcttgatccccaacttccaatcgaacctgcctgccaacaaaggcaaatcccgctcccagctccagtagaaaactctgaatatggtcaaccaatgcctgctcgatttcatgctcacgccggggatcggcagtacccaaaaagtcgaacaaatatgggtctttgaacacctgtgcagccatatccgattcagttggagggagcgttaccggaaaattcgtaattgctttgccttggcgtttgtgaagttgtgagtcaatctgtaatgcgagaatgttgcgggaccacccatgctcaacggttttgttaatgtaccacaagcgtgtttcaggatcgtctaatttttccaataaggtgaggttatgataccatgtgatttgtgcaagtgcctcttgcacaattgtccggtcagtccatgcagaggcaaatgcccgcatgtatttcaggttgcgtggcgagaagccgcgcatttctggaaacgatttttgtagatcgacagacaatcgatcaattacttgtgctccccaaccctcctgttcctgacgttcgagaatcgtccgaccgatatcccagtaaagtaaaaccatagcggcattcgcagcaagaaccgttttcaatcgttcccgttgaatatgttgtttgatctgctggaaaaattcgttgtaaccttttggcatccctgataggggtgctgcgacaggaaaagttgcctcggctcgagtccgacctaaagcacgacgtttctcattgggttcaactatttgtcgttttttactaggcataaatcgctctcaatgactgaaactcatcagatcatgaatgtactcaactacaaattcgctcagtagtattccttgatatatgcatacgccttctcaaacagttcttcctctttatgaagctgatactttagaagagtcttgcgtagcgatttctggacttcgcgctctcctgcaatcgtagtctgccaaccgtcaaaccgaacaattttcacgatctcatcgatatcgttgacaatgcgttcgactactgacggtgtcttatctgtgcgcatttcaagaaaaagttctgtaagtgctgtcttggcagttctccgttcgtctgcagaaaataactcacgctcggtctctaacgtatcgcgcgcgatttggcagaggtgcttgataaaatcgatactgctaatcaacccttgctcagcacgattccgcaattcctctaaccgctcgctaagtttcttaaacttaggattacctggatgtttccctaatcgaccgacaagaataagaacgatctgtttggctcgcttagtgtccttactattcatcaatccgtcgattaactcggcatcgagcaccatctcttccatgtcatcgtgaatgccggagacatgaacatgctcgtgaatcaatttttccgtctgcggtccaaacgcatgccagagtaatcgtccgttgtcatccgaagctggtcgaacagaggtatagacttgcgataaccatttgtagtcacgctgaaaacgattgagaattgaatcgggactcagtgcttcccacacttttgatagagtgacgtagtccttagcaaacgcatcgcgcatttcattcgagttgatacaatcctgcgcccgactcagaccttcgaatccttcaatcgtacgatcaactccgggaaaatgggaacacgctttctcgatcaattctggaagtttgtctctcaattcctgcaggttcgttattacagcacgcacagtcgcttcgtcaaactctaacgccttcgcagtatcatcgaaaaccccaaagtaatcgacaatgcgaccgtaagttttatttggatagacgcggttggtgcgacagatcgcttgtaataatgtgtgatctttcagcgatttatcgaggtacatcgtctgcaagagttgagcatcgaatccggcaagtaatttagcggtcacaatcaagaactttagttgagaatccggattgttgaactgctcaataactttctcttgctggtctttatccaatccccatttttgtttgaattcgagtgggtcgtttgcggtcgttgaaatgaccactcgactggcatccacaccgagttgttcatcgagtgcttctttgtaagcaacacaagcgagacgatccggagtcacaatcatcgctttaaaactgtgcggttcgacatgtgtgcgataatggttcgcaatgtcttcgacaatcgttctgatccgctctggcgatttgaggaagagcagcatcttcgcagctttttgactcaatttgttgcgatcttcttccgttagatcattagccatttcgcggaaagcaatatcgagcccttccttgtcaatgtgaacattggggagtcgcggttcgaagtgaagtggaagcgtttgtaaatcgcggatactttcctgaaatgtatagcggctgaggtatccaccctcatcctccggtgcaccaaatgcccaaaaagtgttcttgtcggaacgattgatcggagtaccggtcataccgaagagaaacgcattcgggagtgctgcacgcattttacgaccgagatcaccttcctgtgtgcggtgggcttcatcgaccataagaatgatattatcccgcagattcatgtcgggataggcatccttgaatttgtgaatcgtcgtaacaataatcttacggatgtcgcgttcgagcaggtcgtgtaacgcttggatactatcagcattgaccatattaggaacttcggcagcaccaagagtattggttatctgtgtatcgagatcgacccgatccacgacaatgatgatagtaggactcttgaggtcggctttctttcgcagtttctgcgcagcaaatagcatgagtagcgatttaccagaaccttggaagtgccaaatcaaccccttcttgatatgtccttcggaaacccgctgtacgattgcatttgcaccttcatattgctggtagcgacagacaactttgatcttgcgtttttgcggattggtcgcataaattgaaaaatgacgcaggatatcgagcaaagtttccggtcgtaacaaactgttgagttgtttaccgacttcattcagtccggaaaaaagtgcaagagtactattggattcatccaatcgccatgggcaccaaaattcaagtggtgtgcgaacggcaccatagaagaaatcgcgaccgtcggtagcgaaactgaggatgttgggtacaaacagattcgggacagtattctcgtaaaccgcatggatttcgtgcgcaccatcgacccatgttactgccggtcgtactggcgttttcgcttcgccgactactaccggaatgccgtttatgaacagaacgatatcgggaatcttggtctcgcgggcacgaattttgaactggttagtcaagatataggagttgttttcaggatgatcaaagtcgattaggtttacaccaacgtgcttaccgtcgatgccgaacggcatcgtaatctcacccttgtaccacttggcaaactcttcatttgactttactaatcccacattatttactgtgatgaggatggcgcgtagtttgtgaatcaattcgtcggcgcggtcgggttgttcggcgatttcagggttgatccgaattagtgcctgttttagctcgctttcaacaagaacttcagtaatctcgcggtcgagtgtgtcggtaggcatatagcgccagacgtgacgaccagtgtctggagatgaaacaaccccatcaccggcattcagattgacaccggtgagttgttgcacaatgaaatgttcgacgctattcatttcggtaaaaggcatattagaacaccttgtgaattaaattcttgattacattctcagttttggtaacatggtttttggcttcagtaattaactcttcgattctgcccaaattttcgacacatttttcttgttcttttttttcgataaccggtactgaaatattgtagagatctgatccagtaataccggcaacagttgtatatccgactattctctttattctttttacaccctcagaagaccggaaaaaataatggcagtacattgggagtattaattttgtgttgagccgtagtctgataatcgaagattcaaaagtcattttctcttcatcagtcatcacaatcgaacacttaccagctccttcgatgactaacgaacgtctagcgaaaagtaagtcgcctttttgaagtaagaattgtttttcctctttatcgcttaacgtgattctttgcatatccgggttatacagtttaggataagcgaataattctcccatatttaccaattttatcccatgcccaagatattcttttgatttataaattccattaagcagttttgtgcttaacaaatccgttacgggacactcttgatacccatccaaatttctgacgttattaatagttggtttctttgtgtatgtttcaaaaattagatctgatgagagttttagaagttctcctagcccatttaccaacgatattgccttttgtgtggcgttatccgctgcccacaacaattcagcgattttcgcttgttgttcttttgggggaaggaggaactcgaattgagcaaggtcttgaaactttgttcgaggtgaaagagccccagccgatgtattaaccgcatgctccaagaaccgctcactctgtaataagaaagggaacaaacttggttcgattcgtttctcattggcttctaagaccagaatatcactagaacaaattccatcgaactctgcaaacgcaacttttttctgatacgaacgacgtttaccgaacagtacttgaccgggtttgaatcgtttcgaaaaagttataccatcagcgatattgccccacgacttaagatgtaggttttccggttcgatatgctccaatccaacaaatcggtcgatcccattcgataatggatcacgctcggcaatattcaagttgcggcatacttcaccgaacttgattcgtttccaaccttgcttgtcgaatgtttgcttcactgtagtttcgctatcagcttttgaatcgactgtcgtaattcatctgcgctactattccattgatcaattgcatcgtgtaagttctcaccattaccggttttctgcattgatccggtgtaaagcgtaatgttcaaattagctttcttatcaagcacaccttcaaccgatataaccttgctgaagccgtctatcgtttggtagtcatgatatgtattgaaaatcttctgaatgtgtttctcttccaagtaactcgtcgctttttctttatgaacttctttcacggcattgataaagagaatttttccttgccgcgttttcggtttattgttcctacagatcaggagataactctccattggtgagttatagaagagattcggtcccaaaccgatcacacattccaccacatcactttctatcattttacggcggatagcagattcggcatctctatagagaataccatccggccaaagaataacacacctcccgttgtcaggatcgagagatgtatggatgtgttgttggaatacgtaatcggcatatccctgaggaggcgtcccccagatatttctgccgaatggatcgctcgcaaatgctttctgatcccatgccttgatactgtatggaggattggcaagtatcacgttgaatgtcttcagtcggtcgttttccagaaacgcggggttgctgagagtattgccgcgaacaatctgaaaatcctcgataccgtgcataaacatattcatacgagcaattgaggaagtaatcaggttgatctcttgtccgtacaatttcagcgtccggtattccttacccgtgtctttcaactggagcgcacagttcaataacaacccgccggaaccgcaagttgggtcgtacacactctctcccggttgcgggtcggaaattaacgtcattaaccgaacgacggtacggttggtataaaattccgcggcggtatgcccgctgtcgtcggcgaatttcttaatcagaaactcgtaggcatcaccaagttcatcttgggggacattaccgatgctgagactatgctgactgaaatgctcgattaggttggtgagcgtctcattgttcaaccgatccttattcgtccacgatgcatctccgaatattccgaataattgttcctgattcgctttctctaattcgcgcatacccttctgtagcgcttcgccaacatttcgagtcaccgagcggacatcattccaatgcgaccctttcggcacctgaaaccggtgattttcggcgaaggatgcatactccaggtcaccgccactctcggctaatgcttgctggtactcctcgtcgtaaacatcacaaattcgcttgtaaaacaacagagggaaaataaactgcttgtaatcaccggcatcgatatggccgcgcagataggtcgctgcaccccaaagataactttccagctccttgcgtttcatcatgatagcaacccgaattccatgagcaactctttaaagcgatcttcagcttgccatgccgcttgtgctgcaatttcgagttcggcaatcgcctcttccatcgaagggaggttgtcgactatggttttctcaatatagagcggaatattgaggttgtactctttcgttacgatctcttcattatcgacgactcgtacatgatcaggaagtgatttgtactcacgataccatttatagattgtttcgacatgctgtgcttccaggaaattttgtgctctaccgactctgatttgatcggacgcatcgataaacagcaccttccgttttcgttgcttgggtttcttcgcccggaaaatcagaatacaagccgcaagtgtcgctccataaaatacattagctcccagtccgattatagtatccaaccgatcgctatcaatcagtttttgacggatacgaccttccgcaccctttcgaaagagcgcaccatgaggtaacacgacagccattcgcccggtatcgggtttcatggattgaatcatgtgttgtacccaagccatatccccatttcccttcggtggcacaccggcgatgttacgtccgtagggatcattcacccattgctccgcaccccattcttttaaagagaagggcggattggcaacaacacaatcgaattgctggagttgatcgttttcaacgaatgccggttgacgcagcgtatcgccacgctcgattcggaaatcctcgatgccgtgcaggtacatattgatgcgagcaatggtggaagtcgtcaagtttttttcctgaccgtacattttgagcgttcggtaatcccggttggttcgccgcaagtgctcgatactctccagcagcataccaccggttccgcaggcaggatcgtaaacggattcaccttcttggacatcgataatgagcccgatcaaatggacaaccgaacgtggcgtgtaaaattcacccgcctttttattagtaaggtcggcaaattggctaatcagatattcatacgctttaccgagaacgtcgggttcgactgcctcgtttgacagattgtattgggaaaagtgttcgatgaggttggtaagtagcgaatcaggaagtttttctttgtttgcccagttcgcgtcaccgaaaataccgtataggagctgctggttggctttttcg

SEQ ID NO: 585 - DNA, 14489 bp, Artificial Sequence
  Synthetic Oligonucleotide
cacgcgcgtggggacaacgttggccgaaaacgcggtcgcaagcttgaaagcggttcacccccacgcgcgtggggacaacatcttgatctgctcctgaatgtaggggtcctccggttcacccccacgcgcgtggggacaacctggtaggccagatcgtgtcgtttcagcagggcggttcacccccacgcgcgtggggacaacatcgcgatcagcccggccgatgtgtatcccaccggttcacccccacgcgcgtggggacaaccggtcttgccctcggcggcaagcgccttgagccggttcacccccacgcgcgtggggacaacgggccacccacctcgagccaggacgcatcccacggttcacccccacgcgcgtggggacaactcgtctgcaatgagcggccctggaaactcatccggttcacccccacgcgcgtggggacaacacttcccaagctattgattctgcggcatacgcacgagaaaaaggccctcgaagtcatcgatgcagcgcgctgttctgccccatgttcggacacggaatccctgctcattatcgcttgagtggagaatcaggcatccgcctcctttggcttgggcgcaagccttttcccataaccgatcgcgaaccagagcggagacgcgtcccacaaacacccctgcctgaggttcgagaaaccaccgagtgagctcgcctcgcaatgctggcgggacgcgctcaagaatcagaaccaccatggttgggctccgtttcttcctcttctacggcgtgcaagtggccgccttccacggcgccctgcaaatcgtcccagagggagccgggggcggcggcatcaaggtcaaattcagagtcgggcgccgccgcttttgacagcatcagggcagattggatatccgggatgatcctttccaaaagccgtgtggatacaaacctgtcgcggcaggtgatgcgcacccgccgctcgagttgatcttgcgcttcggcggcggcgcgaaaggccatcggaacggtgatttcagttttgtacaagtcggccacatcgtacacaaaggagagcatcttgcccgtatggataaacccgagggcgggggaaaacccagccgagacgacggccgcatggcagataccgtaaaggcaggaattggcggcggacaaggcccggttagcggggtccgcctggctccactcctggcgctgatagtttcggccttcccaggcgatgccggcctccttggcggccttcgcgtaggcgtctcgaacccgtacgccctccatgccacgtatctgttgcagggtcaaggcggggtcgaacttctcggcaaaacgcaactgatagaggcggcgcaccacctgcatgcgaaaaccctcgtgcgcccacaggcgcgcctgatggagaaaattggcggcgttgcgcgtctcgcccatgcccgtggcgtagaagcggaccccctcttctccgcaccacgccactaggcacccatggtccgccagcacggaaatggcggcgtgagtgatggagacgcccggtcccagcatgagcaaggccagatttgcgcaaggcacgggcgtcttccccgcttcattgtgcagggcaatggcccggtcttcctgatccaccttgcagcgctcgacgtacaggtaactccatccgtcgctgaacttcggtagaatatgcagatcttgagttcgcatgtcaccaccacgggtctggcttgcgccgtgggctacacgtcgccgcccgctgagcgggcttcgggggctactgaaagcaggccgaaaccgaaggccttgccgggcccgatgccgtgaacgacggcttcacgaaatttagcagggtcctcaaccgtgagcgttccttcgagcaaggcggagcggaatttcatgcgcctgtcccccgagcggctgtcctggacggcaggcgtggagtccgggtcatttccagcgccccagccgatgtgcagagcgcgcaaggctcccagcttgaagccgccgttctgggcctttttagcgaaccactcccgtatggcgtcctgcgggtcctggtccttatcccaggtgagcgccacgcgtttgctttgggccttcggtcggccctggggatccgtccccactcgcggcctggtaagatcgatgcccgctgtgctggtctttatctttttgctcaggttgacgcggattcgaaagcgaagctgctgaccggcgctgaaacagggatcgagttcttttacctgagggggagcggcgaaggaattcaccagaagatggcccgcattttgaaaggcatagtcccaatcgggtttggtggcggactgcaccacaatcatggcccggccgcccagttgcgggtcgatgcgaaagagaaagccggaatccgcaccgcgctccacatggacttgcttcccgtcaaagtccgcgggcttgaagggcgcgaggaagtggggatctttttggggatgggagggaaaggccatgcagaggcgctgatgaacgtgataaaggttgcgcagccagagccgcccggggcggggacggtcggggttgtcaccgacgttgattaggagacaggaaatgtacatcctattccacctcctcggcgagcaatcgcctgcgggtttcctccgagcggaacctgacgatctcgtcccgcttgtcgataatccggtcacgccattgcgggtcctcgggattgatgcggtcgagtcccatgcccaggccgtattcaagcatggtcacggcgtcgtggcagaggcggcagagggagcgcaaatcgtccttcaactcgccgccacccgcgcgacggtaggtgatgtgctgcacggtggtggcgggagacttgcaaaaaacgcataagtgatggtcatcgtcgagccgctctttgcgccggtttttgtactcggtattggtgtaatccgcccttgggcggggaggcgccggcgtggcgctctgtgcgggcagaggtgcaacggtcacgccgccttcagccccgacgcgtaattgcttgcgaatgacgaatcgagcttcgtgcgagggcgggtcgagactccgaggcacgtcgtaccaaacgagcgaatcatcgggagcgtccggctggtctgcggttgggtgccagtcgagcagacattccagcgtttggggctgtgggtctccctccagccgtttgcgccaaggtaccgattcgagggcggagagcaaatcggaaaattcccctggcggatgctccagcaaagggcgcgagggcgggcagcactttctgccgaggtacagagtccatcggggcgacttgaccgcggcgtcaatttcagcgatcaggcccggttcaccctggagtgcaaccaagaacgacgcatcgcaaaggtactcgcggcgggtgagcatggccccgggcttgcttccaccctcggcagtgcgcatcggcatgccggcgcccacggtgtgataatcccaccagcggactccgggcgcgtcgatgcgtacgcccatgagcagccggcttagccttggaagccactcctcagcggcctctgaccgggaggcgcccaaggccgcgcacagcatgccgattacgcccgatttggtcggggcctcagccgtccgccggatgacaaacttcgattgctgatcgccccaagcctgaagaggcccttcaagccgaatgaacagcgtgtttgggctcacggggcacctccggattcaggaccactttctcgacctcctgccagtcgtggccgatttggttgagtacggccgctatcagttcgtcaagagacttgacatctttgtcggcaagcgggacctcacgctgtttctgttttccgttttcgctttccgtggtggtagccgtcaacggatagcggagattgggagagaaccagaaccgcttcgtgggcttgccgtatcccgtatccatgtcgttcacataatgggcaagctccgccacgctctgcgagatgatgtcccgttcgccctgaggagccgccggtttggcgaaggcgttggcgtagctgattggagtgtttctgacttccaccaacattccgtcaggaggattgtgcgcggcaaaactgttttgttttcccgtggggttgaccaacgccgctgcgcgaatgaactcgccgacggtatgggccgccaacttttcgtgatccgcgccgaagggctcgaggttcctgaccagcgtttcccaatgaatggagaaatacttgtaaaaacatgctgagccaaacatggcttcatccacgtaagctgcgcccgcgtcctcgccggggacatcatcagcggccacatagtagtccacctccgggcgggcctcatgggtggaaatcgcatgggccacctgaagcgatgcctcgacagtggtgttttcgagtactcccgtttcaagcatcctgccgcacagggccatgtccggcacggcgacggattcactgatcagcttcccgaactccgctgctaaggcctcgtccgtttttccgtcttccttctggaggagttcggccatccgtacaatcgccccttgcgtggtgtaaaccaacatcttgctcctctcggcactttcttgttcaccctctccttcctgcttttttgcctttttaggctccaggccgcaggccttgagaatgttctcggcgcgcttcctgacgtctttgcccgtcaccttttcggcaatctctttcgctaactggcgggtgcgcactccgccgcgcaattggctgaactcctcactcatgcggatgctgcgcttgagacactggctggaaatacgggagcgcaagactccgccaaaaaagcaagtcttgggcgcgcccaggtcatcccggttcaggttggccgggctgtgattttgaatggcgtgaatctggatcaacatgattctcctcctattgaacagctcaagaattccgtggcccatttgagccgggtggattcgcgttcccagatggaaagatcgttcgtcagccgtacccagtcgagtttggggtgcttggcagcgatgaggtcgattgcccattgtagggcgggttcgatttcagcaagcggcagcgtcagcatcctatcgaagcgttgctcgaaacgctttcgctctgttttgtcgccgggccgggagcgcgcgagttggcgagcgagcgtctccccgggtgaatgctcgaggggccggaaggcgtagagtttggcgacaagccacgccacctcacggcgaggcgcccgctgggtttgcgcccgcagtggccaccagagtcctgcgaaaaggtcaaagccctccaccgattcgtcgagcccttgtccggcatggttgcgcaagagcccgagctcaccgggtttcagccgactcagaacttcgacgtactgctccgttgcagtcacttgtccctcccttcgtttttgtggtttttcttcggccgcatgtccggctttactgcggcaatttcttgccgacttcggagagacgcgcttgtgtaaccgggtgaaagcgatttggcgactgcggccatcagcggacgatactcctgggcggcttcttgccatgcgtcgccgccttgggcgatcaattggtcaattcttccggaaaccgttctttcggcttggggacgaaccgcggcgacggcggagagaatttcaaggtgtccccttgtttgggaaatctctcgcggtttggttttgccagggagcttccagccttccctctgccacgccccgatgctttctatactctcctgaaccttcatgtcgtcaagcgcggtcaggaacggaatctcccactcggttgcttccaggtatttgtcattctgcactgtcgcaaagctgacgacccacaacctttgtttttccttcggcttttccccgcacaggattccagccacgactttcgtccacttcccagccgcagcatcggccgggccaagcgcgctgaaaggcttcacaatctcgtcgccttccctgatggtgtgcgggtcgttccacactcgtgccggactcccttcgtctgttcttgtgctgccgatacccgcaaagacacatcgacggatcagagcctctctgcgcccgcaggcgatgcagttggactggggttcctcgggagcgtccaaccacacgcggcgcggcacccacgttaatcccgttaataggggaacattgccgtgttgagggagggttatgtccggcttttcccatgtgggcgtgcccaggttcggctccggtcttttccgccacgagagacgcagggtttcggaaagcgagtcgcccatcggcacgatgtaggtcggcggtttttgattgacgcccgggggcttgccgcgcccggccgaggtagcaaagagcggcaggcgcaacaggcccattgcacagcacgccggacataagccgtctctcaaatctgtcccatgccggaagtgccagaagtttgtgccggtgggcacctcctgcatgagatagtcggccgagagtttcttctcaagacgcttaggcttctgttggtaaaaacgcctcccatcgcccagcaggttgaaacagtccttattgtcatcgagcctcttgaaccaatccgagggaaacgaagagatcgagtcggtttcgtctggaggattccccttgcaccaatagagaagcgcgagcaggaaacgcaggatggccaagcggtccatagggttgctggccgcgatttcgcggatgcggccggcttccgtaaacgcctcaatgacattcacacgtgtgctgatcccgtccttgtatagaacgggaatccacttttcttcgagcaggttatacttcactgcttcctccttcacggggcaagaggcgggtggtggggccgttgggtgatcgcgacccggccgcccgccaggtggctaccacaggataaacatgacgaaggtatacacctgggagggatgaaaggcaagtccgggagcagaactgtagcgcccctttgtgccgcgaagaaaaaaggctggctggcgcagagtgcaactctgcgttttggcgagacggtgaatcgtagagctgtgctcgccctgcggcagcccgccgaacttgcgctgcgcgccccgtgcgtgatatttttcgatgatgggcgcgaatgaagtattggagtacgtgaaggccttgccgcctcgggagcgccggaaattctttgaaggcgttcacgaactggaaacggcgccggaagtggggccggcggctagacggggacgcccgattcgctggcccgacgctgccgctcggcggcgtcgaatttgtggcgacaaaattctgcccaatttagttctgctggcgcgggacgaggagagctactaagcccgcatgatcctctacgcggacaccggtcttctgatctcgtattacctcaacgattcaaacgagcggtcccgcgatcatcgaagtgggcgaagaggaagagctaaagtgccccgcttgtggcaagacaatcgtgactgctgaggaggtggtagatgttcataccgaaacggacgcccctctcagctttagtgattctgttgccgcttccagcaatttgacaacacgcaatccagccaaaccgtcgttaaggggcgtttggttggtttcgatacactccaagaagtactccagttcgaccttcagtgcttctgtctgctcgatcttgggcgcccacatgtctcccgagcggtagctgacaagcaattcatagactccttccctgctggccatttgcacgcccctgtcgtagaccttaattttctcgacggcttccaagtcgttccacaccagcatctttttctctcccccgaccagcgtggttcggatcttcacgggagataaccagttaacgttgatgtgagcaatagtgttggacgggaaatacacagtgataaatgccacgtcggcatggacgttcaagtgagcctggccggtcgcgacgacagcctcgggttcctttcggatgaggtggtccattatggacaaatcatgaggcgcgagatcccaaatcacgtcaaggtcgtgttggaaaaggcccagttggaccctcgtggagtcgaaatagtagatgttgcccagttcaccttgatcgatcagttggcggatcttcttcaccgctccggtaaacagaaacgtgtggtccaccataatcttgaggtttctcttctctgccaattcgatcagcctctcagcctggatcgcattcgaagtaaggggcttttcaaggaaaacgtgcttgccgttttccagggcagccattgccagctcgaaatgcgtccagacgggagtgacgatggccactgcatcaacggatggtgaatgcaagatttcagatgcgtcggaggtaacctgcacatccggatatgcttgttttgcccggctttgaccttttgggtcactgtcgcaaacggcagcaacccgggtcgaatcgagggagtgcaggtttctgactatatttggaccccagtagccgtagccgatgaccccgatccgaatcattgtttcttcccgccaagttagagtcgtgactgccttcgcatatgcggcacaaccggatacggccgatcctctgccatcctgctgagctgcccccgagcaccaccccttaggcggtcagcacggtgggcactctattgttcgatcccccatcctctgggggggattgttcacactgctagtttcgctgccccatctcaaagcgtcaaaagcaccaaagtaccgagtaccctgttcacaactgtgcgaggacccatttcggaatatagctcgcggctggggactcatcccgtggactctttggctaaggggcgattcgggctgcttgggagtggcgttgtttggagtgaagcgaggcacagcgaatggccaagcgaggtcctaccgattgctcagatcccgctcttagcgaaggcgcattcgtgccaggtccacgctggcctggcctcagatgttaatccagcagccggacggcggcaaacccatagccaggcacatcgagtttgaactccccatcctccatgcggaggtccctgaggtttcgttccagtaggtcggtttgaattgctctccgaaaacctcgaacgctaagagccactggcccagacttcccgccgacttcccaaacccgcaaaatggtgcctccaaaggacgggtcatccgtcggcttcagacaggttgcgacaacatgcgatgggtcaacagcaacgcgtttcacggaatccggttgcggcaaattccccaggactgccaggagcggcgaacggaagccgcggctccactcgaatgacgcaggcccgctgaaagctccggcgtgtgccctgagcgagtaacggaaacggaagtgtgtggccccgttttgatctttggttgagtattgcggccccctgctgataactcgcttttagagatgcccaggtatccatcaccagccatcgcggtgaccatccctgacacagtttgggtgtatgctcttggcaggcggcccccgcgtacagttgcggtctggtaggcagtcgtggtcttgctaaaccggaggatccatggggctctcaaaatcaagattcatcgccggctggcagtgcctcaagcgcctgtacctggaggttcatcagccggaactggcagcggagcctgacgaacaatccatggcggtcttcgagcagggtcacgaggtgggccgatgggcccagaggatgtttcccggcggagcgctcatcgaggcggggcgcgaggagatggacaaggccctccggcaaaccgagcaggcggtagcggacaggcaacatcccgccatcttcgaggcgactttcacacacgacaacattctggccagagttgacatcctggaaagactgcaccggaacaaatggcggctaatcgaggtaaagtcgtccaccagccgctttcattgaagagcgtcttgcctgcccttgtgcccgacatgtcctacgacgggatggaagtggccgaaggcaacgacgccggccttgcctgggaaaagatggttcatgctgaggcgggaaccgaagagagaaggcggcttaaagaggccctcctggcttactgcaggcaggacacgctggcaatggtgcggctgctggaagttctgcaagcagcatgaaagggcattattagaaaccagggctgacaaattcttggatggctggctcagcccactacgggtcaaccgaatgccaccacccagaggaggcattatgcaactgattaccgatactatttccagtaccaggcttggcaaacccaagacatttcgaaatctcacgatctttcctgtattcggcaagggcatcgcgcccgactacataaccttggacgaagctctgaccaacaagtctgccaaggttgccgaggtgtccgaaggcggcagtgttccggacctgaaattcatcaacgacagcgaccacccggtttttttgatggagggcgaagaactgatcggcgccaagcaaaaccgcacgctgaatttgagtattctcatttcggctaagaaagccgtcacaattccggtttcctgtgtggagcgcggccgctgggcacgccgttccgtggatttctctgcggcaccgcgtgctcaatatgccgaaggtcgggctaggaagatggcgcaggtttctgcatcgctgcagtccacggggaccagatactcgaaccagagagcggtctggcaggacatcgacgagaaattccaccggctgaatgccacttcccgcacgtcggccatggcggatatattcgagcaacactcggcggggctggaggaatacgttcgttccttgccgccagaggaggggcaggttggggcagtcttcacgatcgagggcgaggtgagcggtttcgagctctttgacagccctgacacgctgagaaagctctggccgaaactcatgcgcagttacggactcgatgcgctggatcgggcgggctcggctggagagaaggggaggaatccaacccctgatgcgggacgtgatgacgtggacgctttcctccaaagaatatcaggaggcgaagcgaaacagtacccggccgtcggagagggggaggatatccgcctttccaatatcggcctgacgggtgctgctttggcagcgcgtgggcgcgtcatccacctcagtgcgtttgccacctgagggggaaccgagggggagggtttagaaggtttcttcccgcgggaccctcatgtagcttggttttacgacggcaaccaccgccaacgcagcagccatgcgtaaactccaaggaaatttgcccttctccccatctgacctatcagaagtcggagaacctgccggccacgggacacgttgatgcccaaacggcaggcaaactgggagcggggccggagtcggcccgaggcgacttcaaagccgccggcaaagatgtgggaaggggcggcgagggaatcggccacgagatgaagcaaggtgaacccatcgcggcaggcaaggatttgggtgagggtgtaggcaagggggcaagaaagtcggcaaaggagtcaagaaagctgcctctccccatagcgacagcagtgacccagaaaagaagcaacagcctgagaaaccgaacaacccgcagtggttgatttttccattgtctcgtcagtccggcgaagcaccgagacgcgcgaaagctgggggagctacaaactcctgccttcatcgcgccgccggcggctcctggtcggtgggaattccaaccaagttgcgatagaacgcgaaggcccgattgaccgtggaagactcatttcccaggaccaggcggttcgcgttctttcctgtgcgcaccatgccgtagcatcgccagacgttttccgattcgcgatccagaaagtagatcgattgcatctcacccggttggaagatggttataaagagatagcgcatcgtgctgacgttctcgacatcgaagacgagacggtccgccgaagcctcagcaatatgcattcggtagatggctttgccagaaaggttatcgacctgttcaaagtagagtaccgtgccttccttcatctcatcgggcgtaaagtcttcgcggcgttgactaggctgcaagctggtcatagcgtaggcgtccacaattagtgtttgccactgcttgtgagtggtcgaccagtagcgcatgcccgcgagttctgaaattgccccgatgtggcgaagcaagccctcagtttccgaggtatgacgaaaccgcgcgactgtggtcaccaacgttgtaaagcccaccgcagcccaaccggtgcatgcgggcggtctccagtcgcggccgaaatcagacttgctccatgacttcacgatggccgaatcatccagaccaggatagggcggaacggcttccttaccgcatggcggctgcggtcctaattgcgcataggagtgcgcctggcaaagcagcattgccgacaatacaaaccgaacgaggcgccaggtccaagcccggaggagcgtctcatggcgcggatctgcgctcatcggaccatcatagttgttgcacggggtccgggtctggtgcagaaaacgcattcgaatacaacttgatcggcaaatcggaattcccgctcttaaaaagtgtgtagggctcacgaccaatatgactttaaaccgaggcttcccctctgtctgagcaatttcgaccacatgtcagagcactattgaactaacgagcaaatcacctgggcatacaaaggcggtacaggttaattcgaaattacgggaacgggcgacctgccagatccgtccaaacgcaggagtgagtagcgccgttcgccggggcttcgatacctcacctggcacggttgttaagaacacggttcagaatactaatcgctcccacccaaacaagggcagcgcaatagccgcctaagacatcgctcgggtaatgtactcccagatagatgcgtgaaaatccgataagcccgacaagcagtgtagcgcatgtccagataaagaatcgtgccctcggtgttgaagcgtgcgcggaaagaattcctgccaacgccccatagaaacaaagcgatccgaaagcatggccgctcggaaaactatacgagcttggggccgtcccgaaaaaggggacgggacgcccacggtggaatgcgtgcttcaacaacagatcaagagcgaccgcacctgccatggtaatgcccatcaaatgagccgatcgagggcgatggatgtataaaaatattacaatcgtgaggagactcagcgccgccaggagtgttcccgaaccgagaaatgaaaaaacttgcatcgcgctggtcattcccggcgacgcgagtcggtggattgctgcccgcacggcatcatcgaatgcctgcgtctctgattggagcacctcttccgccagccagccgaatgataacagggctgcggcggcaacaacgaagctgccgatgaggaagaaaccgagtttgacctttttgggttcggtcacagggagtccataatacgtggaatcgggcactacggcgaggtcgtttttccttgcgctcgcttattaccggggcagaatcatgaagtatatgggcaattagaatagttctggcattgacggattgttcgctataatcggggccatattttgcgcttgagggctggttcaagtgggactatgaccacgcggtcgtttgagcatcagtgtgcctccagaattatccccattttacggcgactctgactactctcaacccggattttcccgtcacggccatgaccgggcgcggacaaaatccttgaaaacgaactcggccggagttataaacgattggacccgcgccggtcgtgggccgaagttatccaggaaacccggtattatgtccgttcacgctcaaaaccacgttagtctgcatcagcttccaggccacctgatccacgcgctgcgccgccacgccgatgaacgcccgcgacaaccggccttcgtccatctgctcgaaggccagggtgatcacgccagtctgacctacgcccagctcgatcggcgagcccgagccatcgcggctcgtttgcaggacatgggcgttgccggccagtgcgtgctgctggtctatccgcccggcctcgacttcattacggccttcttcggttgcctgtacgccggttgcgtagcggtgccgacctacccgcctcatcgccaccgcatactcgaacgcttccaggccgtcgccgccgatgccggggcccgcatcgctctgagcaacaccttgggcgcggctcagttccaggccagaatggaagcggaaaaaagcggtcaagcggccacttcctcccagctctcgtggctcgccaccgacgagattcccgacgccttggccaagcgctggcaagaaccggccatcgcccccgacacgcttgccctgctccagtacacctccggctcgaccagccggcccaagggcgtcatgctcggtcacgccaacctcatggccaacatccacaccatccatcaggctttcggcatacagtacgaggacagcagcgtgttctggctgcccatgtaccatgacatggggctggtgggtg

SEQ ID NO: 586 - DNA, 14381 bp, Artificial Sequence
  Synthetic Oligonucleotide
tttgccgccccgctggatcacttggacggtggaatgataacccatgcttggcctccccgccggaagtgcggtcagaggctaatatatcatagctgtatagctaagacaagaaaatttcttaatttttcgattttcttgattttttcacagcttctttttgtcgggatgtatgcgccacagggacgatatattgttggggtgggttctacgacatgaacatctggagccccaagaagcgagacgagaaattgaatcacaggcgcgacaatcccgtcaaacgagtgctggtcaagcacccgggcgactggccgtggtcgcgctgcggcgggaggttctatttctggaatgatggttcgatcttgagcatggacaagaggctatgaaggtgtcgacatgccgaggggcgcatacatcccgacaaaaacccgtcgggacgtatgcgccacccgcgaaatcgatcgcaagattccctccgaatcggaacgccgcggaggcatcaaagcttctgcgcttagtcaacggcgcgccttgcagcctgtgaagtgtgggctaagcggacgcgataaccgttgtcgtggtcttcgggccttgcctttgccgcgtcccgggtgtataccttcgccatgattgtcctgtggtagctacgcagcggacggtccggtccccccggggcgcgacgggcctgccacccgcctcttgcccaggcaaggaggaagccgtggagtacaacctgctcgaagaaaagtggattcccgttctgtggaaagatgggcacagcggtcgcgtgggcattagtgaggcccttaggcaagcaggccggattcgccaaatcgcggccagcaacccaatggaccgcctggccatcctgcgtttcctgcttgcgttgctctattggtgcaaagggaatcccccggacgacaagaactcgatttcttcgtttccctctgattggttcaagaaactcgatgacaacaaagactgtttcaaccttcagggcgatgggaagcggttttaccaacgcaagcctaaccgacttgagaagaagctgtccgtcaactatctgatgcaagaagtgccgaccggcacaaacttctggcacttccggcatgggacagatttcagaaacggcttatgtccggcatgctgcgcaatgggcttgttgcgccttccgctctttgctacgtcggccgggcgcggcaagcccccgggcgtcaatcaaaaaccgccgatctacatcgtgccgatgggcgactgcctttccgaaaccctgcgcctctcatggcggaagacgtcggagatgaacctgggcacgcccacatgggaaaatccggacataagcctccctcaacacggcaatgttccattattgataggattaacgtgggtaccgcggcgcgtctggttagacactccggagacaccagagtccaactgcatcgcctgcgggcgcagggaggctctgatacgtcaatgtgtctttgcgggtattgggagcacaaagacaggcgaaggcagtctggcacgaatctggaacgacccgcacaccatcagcgaaggcgacgagattgtgaagcctttcagcgcgcttggcccggccgacgctgcggctgggaagtggacgaaggtcgtggcgggaatcctgtgcggggaaaagccgaaggggaacagtaagttgtgggtcgtcagctttgcgacagtgcagaacgacaaatacctggaagcagccgagcgggagattcaattcttggccgcgctcgacgacgtgaaggttcaggcgagtttgcaagaaatccaggcgtggcagaaggaaggctggaagctcgttggcagagccaaaccgcgagagacttcacgaaacagaggacaccttgaaattctctccgcagtcgccgctgttcgtccccaagccgaggcaacggtttccggaaaaatcgacgagatgatcgcagaaggcggtaaggcatgggaagaggcggcccaggaatatcgtccgttgatggccgccgtcgccaaatcgctttccccgggctacacaaccgcttccctccggaggcgacaagaaattgccgctgtaaagccggacatgcggccaaagagaaacaacaaagacgaagggggggacaagtgactccaacggagcagtacgtcgaagttctgactcgactgaaacccggtgagctcgggctcttgcgcaaccatgccgggcaagggctcgacgaatcggtagagggctttgaccttttcgcaggcctttggtggccgctgcgggcgcaaacccaacgggcgcctcgccgtgaggtggcctggcttgtcgccaaactctacgccctccggcccctcgagcattcaccccgcgagaccctcgctcgccagctcgggcgatcccggccgggcgagaaaacagcgcggcagcgtttcgagcaacgcttcgacaggatgctcacgctgccgcttgctgaaatcgaacccgccctacagtgggcaatcgacctcatagcttccaagcacctcgaactcgactgggtgcggctgacgaacgatctttccatctgggaacgcgaatccacccggctcaaatgggccgaggaatttttgaactgtccaagaggaggagagtcatgttgatccagattcacgccattcagaatcacagcccggccaacctgaaccgggatgacctgggcgcgcccaagacttgcttttttggcggagtcttgcgctcccgtatttccagccagtgccttaagcgcagcatccgcatgagtgaggagttcagacaattgctgggcggagttcgcacccgccagttggcgaaagagattgcggaaaaggtgacgggcaaagacgtcaggaagcgagcggagaacattctcaaagcctgcgggctggagcctaagaaagcaaaaaaacaggaaggagaagacgaacaggaaagtgctgagaggagcaagatgctggtttacaccacccaagaggcgattacacgcatggccgaactcctccagcagggcgacggaaaaacggacgaggccttggcagcggagttcggcaagctcatcagtgaatccgtcgccgtgccggacatggcgctgagcggcaggatgcttgaaacgggagtcctcaaagacacgacggttgaggcatcgcttcaagtcgcccatgccatttccacccatgaggcccggcccgaggtggactactatgtcgccgccgatgatgtccccggcgaggacgcgggcgcaggttacgtggatgaagccatgttcggttcggcatgtttctacaagtatttctccattcattgggaaacgctggtcaaaaacctgaagcccttcgggacgaatcacgaaaaactggcggcccataccgtcggcgccttcattcgcgccgcggccttggccaaccccacgggaaaacaaaatagttttgccgcgcacaaccctcctgacgggatgttggtggaagtcagaaacactcccatcagctacgccaacgccttcgccaaaccggcggctcctcagggcgaacgggacatcatctcgcagagcgtggcgcagcttgcccattatgtgaacgacatagatacgggatacggcaagccgacgaagcggttctggttctctccaaatctccgctatccgttgacggctaccaccacggagagcgaagacggaaaacagaaacagcgtgaggtcccgcttgccgacaaagatgttaagtctcttgacgaactgatagcggctgtactcaaggaaatcggttacgactggcaggaggccaagaaagtggtcctgaatccggaggtgccccatgagcgcaaagacgctgctacttcggcttgaaggtcctcttcaggcatggggcgatcagcaatccaagttcgtcattcggcgcacggccgaggcgccgaccaagtccggcgtcatcgggatgctttgcgcggcattgggcgtttcccggccagaggcccgcgaaggctggcttccaaggctggcccggctgcgcatgggcgtacgcgtcgatgcgccaggggtccgctggtgggattatcacacggtgggtgcggggatgccgatgcgtaccgccgaggggggaaccaagtccggagccatgctcacccgccgcgaatacctttgcgacgcctcgtttctcgtcgctcttcagggcgaaccggacctcattgaggaactggaggcggcaatcaaagcgcccaagtggacactctacctcggcagaaagtgctgccccccttgccgccctctgctggagcatccgggaggtgaattccccgacttgctttctgccctcgaatcggtcccctggcgtcggcggctgaaggacgatccccagccgcgacccgtcgattgcctgcttgattgggaacccaccaacgagcagcccgaggcgcccgatgatgcgctcgtctggtacgacgtgccgttgacattcgagccgccgtcgcaccaaccccgattcgtcatccgcaggcagttgcgcgtcggagcggacggcgacgtaacacttgcggtgcagccaccgcagagcgacacgccaccgcctccgcgcccaagagcggattacacgaacacagagtacaaaaaccgacgcaaggagcggctcgacgacgactatcacttgtgcgttttttgcaagtctcccgccagcaccgtgcagcacatcacgtaccgccgcgcgggcggcggcgaactccgggacgatttgcgctccctctgccgcctctgccacgacgccgtgaccatgatcgagtacgggctcggaatgggcttggaccgcatcaaccccgaagagccccgttggcgcgacaagatcatcgagaagcgggaagagattatcaggttccgctctctggagactcgccgcagacgccttgccgctgaggaggtggaatagccatgtacctctcctgcctcttgattgacgtcggcaccaaccccgaccgccccaggcccgggcggctctggctgcgaaacctccatcacgtccaccagcgcctttgcatggcgtttccatccaaagaccgaatatcccacgatccccacttcctcaagcctttcaaacccgcggactttgccaacaaccaggtccatgtaagacgtgacggcgactccggctttctcttccgcatcgacccgcaaccgggcgggcgggtcgtgatcctcgtccagtctaactctgccgtaaagcctgactggggctacgccttccacaacgcccgttttcttctgaatcctctagccgctccccctcaggtgcaggaattcgacccccgctttgagaagggtcagcggcttcgcttccgtatccgcgccaatctgagtaagaagataaaaaccagcacagagggcgttgatcttacgaggacgcgagaggggacagataagcggggccgcccgaaggcccaaggcaaacgcgtggcgctgacctgggacaaggaccagaaccgcgacgatgtgatacgaaaatggttcgccggcaagggcggccaaggtggattccaagtggaaactttccgggtcttgcagatcgggtggggcgcaggagaccgatccgacccgaggccgacgggcggccgcatgaaatttcgctcggcgttattggaggggacgcttacggttgaggacgcggacagcttcagagaaaccatcgtgggcggcgttgggcacggcaaagccttcggcttcggcctgctttccgtggcgccgctctcgctgtagcggcggtctccgaccgccggtacgtcgatcggagatcgacgctacaatcccttgtcgatcggggatccgtgcaacatttcttgagcggagatcgagccaatatgaaattcaaaccccgcttgcggcgactggactggctctatacgggcagcccaatctactatctcacgctgtgtacgcaggaccgcaaacgctcgttggcaaatcctgcgattcaccgggaattcacgagattctccgaacgggcgagcgattttcttgtttgggtcgggttcttcatgatcatgcctgatcacatccatcttttcgccggcttttgtcgtgagtccccacctttagggaaatggatcaaggcgctgcgcggggatttatccaaagtcctccgggaagatgagggcgagggcacacattgggagaaagactttttcgatcacgtcctgagatcgcaagaatcctatcgggagaaatatgaatatgtccggcagaatccggtccgggccggtttagtcaagcgcccggaagattggccgtaccagggtgagatccatcgcctggttttgtagcggcggtctccgaccgccgtaacgtcgatcggagatcgactacaaccccggtcgatcggagatcgacgctacaaccgccgtcgatcggagatcgacgctacagcacgggctggaggctctgtgagaattcaagatctccacgttctacccaagttcagtgacgggtggagttatctgtacgtcgagcattgccacgtcgatcaggaagagcgggccattgccgtccacgatcaagccgggaaggtgccggtcccctgtgccaatctggctctcctgatgttgggtccgggcgtctcgattactcacgccgccatctccgtgttggcggaccatgggtgcctggtggcttggtgcggggaggagggagtccgcttctacgccgtgggcatgggcgagacgcgcaacgcggccaacttcctgcatcaggcgaggctgtgggcggaccagggtttccatatgcaggtggtgcgccgcctctatcagttgcgattttcggagaagttcgaccctgccctgaccctccagcaaatccgcggcatggagggcgtgcgggtgcgcgatgcctacgccaaggccgcccaggaagccggcatcacgtggtcgggccgcagctataaacgcgatgagtggagcaaggcggaccctgccaaccgagccttgtccgccgctaactcctgcctatatggaatctgccatgctgccatcgtgtcagcaggtttttcgcccgcactcgggtttatccacaccggcaagatgctgtccttcgtctacgatctcgccgacctgtacaaggctgaaattaccgttccagtggcatttcgcgccgccgccgaggggacgggacagttggaacgccgggtgcgcatcacctgccgcgatcagttcgtatccacgcggcttctggagagaatcatcccggatgtccaaagggcgttgatgctggcaaaagcgacggcctgggacactaccttcgacctggatgccgccgcccccggcttcctctgggacaatctggaaggagaggtcgaaggcggccgcctgctagcccccgaaatcggtgaaacggagcccggcgatggtggtcctgattcttgagcgcgtccccccagggttgcgaggcgagctgactcgctggtttttggaacctcaggcgggagtgttcgtgggacgcgtctccgccatggtccgtgatcggctctgggaaaaagcctgcagccaggccaagggaggcgggtgcttgattatctattcaagcgacaatgaacagggctttcgagtccgaacctggggccaaacagctcgggtcatcgatgacttcgagggcctttttctcgttcgcatgccgcagaatcaataatttagtaagtgttgtccccacgcgcgtgggggtgaaccgccggggctgaaggtttcatgggctggaaagaagttgtccccacgcgcgtgggggtgaaccgatatgctgcatgtgccggggctggcgcttgatgttgtccccacgcgcgtgggggtgaaccggtatcggcgagtggcaaggcgaatccacttaggttgtccccacgcgcgtgggggtgaaccgacctccgagggcgcggggcgcgtgctggcgatgttgtccccacgcgcgtgggggtgaaccggctggggccgacgcgcgcttgtgagactgcgggttgtccccacgcgcgtgggggtgaaccgcgggagaactttgaaggcacggtcctcgatcacgttgtccccacgcgcgtgggggtgaaccggcgcaggttaaggctgaggccaaggccgatgcgttgtccccacgcgcgtgggggtgaaccgtaatggtggcttgcaccttctgctcgaccgatgttgtccccacgcgcgtgggggtgaaccgcagcgggccgtgttggaggagaaggtcgcggagttgtccccacgcgcgtgggggtgaaccgttcccagccgcaggcaggatcaccgtaccccagttgtccccacgcgcgtgggggtgaaccgcaaaacaatatcaagaccaagcacttggatgtgttgtccccacgcgcgtgggggtgaaccgcatcgggcagcacagcggccttataccccaaagttgtccccacgcgcgtgggggtgaaccggcagctcgcggcgattcgcattgccgctgaaagttgtccccacgcgcgtgggggtgaaccggggagtcgtgagtgtagttacaggcagggttcgttgtccccacgcgcgtgggggtgaaccgcttctgcatcttataaagaacgccagtttgaagttgtccccacgcgcgtgggggtgaaccggtacggttcccaggggaattatttcttggggtgttgtccccacgcgcgtgggggtgaaccgatgtagcttgatatgggtgtggtgtcgcagaagttgtccccacgcgcgtgggggtgaaccggcggcgcgcacattccaacctcgtccgtatccgttgtccccacgcgcgtgggggtgaaccggcggacacggcggatgtgacgaatatggagtcgttgtccccacgcgcgtgggggtgaaccggtctctcgaaaaggaaagccaactttcagcttgttgtccccacgcgcgtgggggtgaaccgctcttggcatagagcttagtgagtttgatgaagttgtccccacgcgcgtgggggtgaaccgcctttgccctccgagacgcaacagctccattcgttgtccccacgcgcgtgggggtgaaccggcgagcgcaggtctaagcgaccgcgacaaagagttgtccccacgcgcgtgggggtgaaccggtgatggacacttcctaaaatggcattaagtcgttgtccccacgcgcgtgggggtgaaccgcagcgggtagcgcagacttcgtgcatatcgaagtctgcggcttttgccgccgtgaatcttgaaaagccgcagacctgcaaaaagcgcaggtctgcgctacccactgcctggccatcctggagaattgaaagtccctccagtaaagcggcgaagcgcaggatttccggctgcttcaatcgcttgcgacgctcaccggtcagtagcgcgttggtaatttcgagcccccatacggctggaacaacgagcgtctgcccttcagtgccaccaggaccccgtccgcgtattcgctcgcttcatccggggagcaccaggcaagcgccaccgacgcatgcaccacaacgccgctcaaaatcgccgtccctcaattatcatttcgcggacgctcatggtgtggggctttacgcgcttgcgcaacgcgcgcatgccctcgacaatctcctcgtgcgtcagctttcgatccgagtctcgaaccggcaccagcattgccgccggaacgccgtgtcttgtaatcgtgatcctttcgcaacccatcttgtccagctaaagctccgcatcagctatagtctccctctggccgtgcggcccgccccttgcggcgcaaccaaaccgaagctcaaaacgcgacatcgtcctcgtagcgcgaccggacactgaaggtaaaggttcgccacccgtctcccctgcaaaaccgggtcgcggagtactattgctttgcacagcgggggacgaccgaggcgctacggaagaggttggttcgcgaaactgagcaagagacccctcacccgtcccgctccggctggtggaagcgccggagcgggacacgctcagccccaagggagagggctatggattcagttctacgcgcggtgtccagtcaaagatgtgggacacgctcagccccaagggagagggctatggattcagttctacgcgcggtgtccagtcaaagatgtgggacacgctcagccccaagggagagggctatggattcagttctacgcgcggtgtccagtcaaagatgtgggacacgctcagccccaagggagagggctatggattcagttctacgcgcggtgtccagtcaaagatgtgggacacgctcagccccaagggagagggctatggattcagttctacgcgcggtgtccagtcaaagatgtgggacacgctcagccccaagggagagggctatggattcagttctacgcgcggtgtccagtcaaagatgtgggacacgctcagccccaagggagagggctatggattcagttctactcctggtgtccagcgaaagatgtgggacacgctcagccccaagggagagggctatggattcagttctacccctggtgtccagcgaaagatgtgggacacgctcaggcccaagggagagggctatggattcagttctacccccggtgtccagcgaaagatgtgggacacgctcaggcccaagggagagggctatggattcagttctacccccggtgtccagccaaagatgtgggacacgctcagccccaagggagagggctatggattcagttctacccctggtgtgcagcgaaagatgtgggacacgctcagccccaagggagagggcagagacccaattccctgccattctccccgggaaatgggcagaggttggaggtggggccgcagtgtccagcggaagatgtgggacacgctcagccctcggaagagggctgtcctttctggcgcgcgtggcagttgccaaaaccgccctctctcttggtgagagggcggcgatctcgcagtcgcgggagagccgggtcgggggccttttcgggtgtagcgcatacacctggccactcgcgaccttgacgcactcctggccggatgcgctaccatttactttcccggcgaggtccagtagcatttgggccacgcggccacggacgccgcgtaggggcgggcgttgtgcccgctcaggtcctgatttggcgaacgcggtcgcgcatgctggtttggcgatgtaaaatcgccgctacgggcgaacggacttggcccacgcggccacgcatgccgcacaaggaggaataaccgtgttcacactcgctggtagaagattgcagaccgttgcccttatgcttttcgtccttgggggcgtccctgcggcgcgaggctccttcacgctcgaacaagtgatgagctcgccattcccaaccgagctcgtggcttcgccttcgggcgggcgggtggcttgggtgttcgatgcgcgcggccttcgcaacatctgggtggccgagcccggtgggggcggaggctatgtgtcacggcagctcacccggtacacccaagacgacggccaggagatcggagagctcacctggactcctgacggccgggcgatactctacgttcgcgggggcgacttcgagaccggcggcggctaccccaaccccgccagcgcccccgagggtgtcgaacaggacgtctgggttgtctcactcgacggtggctcgccgcgcaagctcgccgagggctattctccggcggtttctccgaagggcgatagtgtggcgtacatcttcaaggaccaggtgtggctggttaagctggccgaaggcgccaagcccgaacaattgatccacgacaagggcaaaggcagctcgctccgttggtcgcccgacgggtcgcgccttgctttcgtcagccgccgtggagatcacagcttcgtgggggtgtacgacgtggggggcaagagcctgctgtatctcgatccgagcgttgaccaggattccgagcctgtctggtcgccggacagcaggcacgtcgccttcctgcaccttccttcctcacgcgacgaccttatcttcgggccgaaacgtaccggccagccgtggtcgatccgcgtggccgacgctgccaccggtcagggtcacgaggtctggcgcgccgatgccggtcgcggcagcgtctttcgcgagattgtggccgagcatcagatcttctggggcgccggcgataacctggtgtttccctgggagcgcgacggctggactcatctttattctgttccccttgcgggcggcacggcaaagctccttacgcccggcgatttcgaagtggagttcgtttccctcagtcccgatcgccgccagttgattttcgcctcgaaccaggatgacatcgaccgccgccacctgtggcgcgagccggtcacgggtgaccacgccactccactgaccaggggtgaaggaatggagtggtcaccggtgatgatgagcgacggcgccaccgttgccctgctccattccgacgcccagcgcccagctcggccggcaattctggctaactcgggcggaattcgcgacctcgctcccgaaacgcttcccgccgactttcccgccgctgatctggtcaccccgcaacaagtgatctttcccgccgctgacgggctgcgcatccacgcgcagctttttctgcctaaggaggaggcctccgggcagcggcacccggccgtagtattctttcacggtggttcgcggcgccagatgctgctgggctggcattatatgggctactatcacaacgcctatgccttcaaccagtatctcgccagccgcggttacgtggtgctatcggtcaactaccgtagcggcatcggctatgggctggactttcgcgaggcgctcaactacgggcccagcggggcgagcgagtttaacgatgtcgagggcgtcggcctctacctgcgcctgcgccccgaggtggatccgaatcacatcggcctgtggggcggttcttacggcggatatttgacggcgctgggattggcccgagcctccgagctattcgcctgcggcgttgacttgcacggcgtgcatgactggaacctcgaaatccagaactggattccttcctacgatcccgccgcacggcctgacgcggcacgactggcgtgggagtcctcgccgctggcctccctcaagacatggcgctcgccggtgttgctggtccagggggatgatgaccgcaacgttcccttcacggagatggtccgcctggtggaggggttgcggaaacagggtgtggaattccaacaactcgtctttccggacgagattcacgatttcttgcggcagcgcacttggctggcggcctatcatgcggctgctgatttcttcgaccattacctcaaaaagagagccgtgcccgcgctggggagcccgcgctagaaaatgcgggtggcgcagagcaggctgttccactagttttcatcttcttctcgcgccgcgaagattttttctgctgtgcgtagtgtctccgtaacctccgtggtcagaagagcttcaacacggaggtcactgagaggctcagtgtgctccgtgttaaagcctgagaggcacggaggacgcagagagcctcgttttggttgcggccaccagccgcgttgtactactgttggtgaatctctttgccgcgcgcaaagattcccccttcgagggctcgttatcaccccaacttaatgcgttcaagagcctttcttgcgggcccggcgaggacgacggtccaactcgcggaaatattcatcgagggttatgtaatctccccgccggtatgcggcctcaccacggcgaatggcacgaagctcggaagacgtggggctctcttgggggagcaaacgaattgagatgtaggtgcggagcgcttcgcggacgagttcggagcgcgtccgatgctccgttttcatggcgttctcaacctgctccgccatttcgggtgggagtgaaatcgtgatagtttggcgtgttctcgtagaaatttggtgctacctggtaacaccttctctcacacatgagcacagaatctgaacaaaaaggtttttcagcgtccagttgctcggtgtacggccgcggcgcggttacgagacaggagtcgcgctctgatttgctcgagtggaagcaccgtaacccttttgtccaaatcgtaggcgtcgcggcccggatagaccacgaagagttgccgcaatcccaggtcagcaagggccacacgcatggacttggtgatgcccggggcgtcgccgtacttcacctcgaccccataacgcgagccgtccaggaaaagcaagaggtccaactccgcgcctgattgcgtcgcccaaaagtaagcgctgcgttcgccgaccaactgaaggagttcttcgatcacgaatccttcccaggaggcgccaagtttgggatgcccctctaaga

SEQ ID NO: 587 - DNA, 14330 bp, Artificial Sequence
  Synthetic Oligonucleotide
ggctggtcgagccggaggtgtactggagcagggcaagcgtgtcgggggcgatggccggttcttgccagcgcttggccaaggcgtcgggaatctcgtcggtggcgagccacgagagctgggaggaagtggccgcttgaccgcttttttccgcttccattctggcctggaactgagccgcgcccaaggtgttgctcagagcgatgcgggccccggcatcggcggcgacggcctggaagcgttcgagtatgcggtggcgatgaggcgggtaggtcggcaccgctacgcaaccggcgtacaggcaaccgaagaaggccgtaatgaagtcgaggccgggcggatagaccagcagcacgcactggccggcaacgcccatgtcctgcaaacgagccgcgatggctcgggctcgccgatcgagctgggcgtaggtcagactggcgtgatcaccctggccttcgagcagatggacgaaggccggttgtcgcgggcgttcatcggcgtggcggcgcagcgcgtggatcaggtggcctggaagctgatgcagactaacgtggttttgagcgtgaacggacataataccgggtttcctggataacttcggcccacgaccggcgcgggtccaatcgtttataactccggccgagttcgttttcaaggattttgtccgcgcccggtcatggccgtgacgggaaaatccgggttgagagtagtcagagtcgccgtaaaatggggataattctggaggcacactgatgctcaaacgaccgcgtggtcatagtcccacttgaaccagccctcaagcgcaaaatatggccccgattatagcgaacaatccgtcaatgccagaactattctaattgcccatatacttcatgattctgccccggtaataagcgagcgcaaggaaaaacgacctcgccgtagtgcccgattccacgtattatggactccctgtgaccgaacccaaaaaggtcaaactcggtttcttcctcatcggcagcttcgttgttgccgccgcagccctgttatcattcggctggctggcggaagaggtgctccaatcagagacgcaggcattcgatgatgccgtgcgggcagcaatccaccgactcgcgtcgccgggaatgaccagcgcgatgcaagttttttcatttctcggttcgggaacactcctggcggcgctgagtctcctcacgattgtaatatttttatacatccatcgccctcgatcggctcatttgatgggcattaccatggcaggtgcggtcgctcttgatctgttgttgaagcacgcattccaccgtgggcgtcccgtcccctttttcgggacggccccaagctcgtatagttttccgagcggccatgctttcggatcgctttgtttctatggggcgttggcaggaattctttccgcgcacgcttcaacaccgagggcacgattctttatctggacatgcgctacactgcttgtcgggcttatcggattttcacgcatctatctgggagtacattacccgagcgatgtcttaggcggctattgcgctgcccttgtttgggtgggagcgattagtattctgaaccgtgttcttaacaaccgtgccaggtgaggtatcgaagccccggcgaacggcgctactcactcctgcgtttggacggatctggcaggtcgcccgttcccgtaatttcgaattaacctgtaccgcctttgtatgcccaggtgatttgctcgttagttcaatagtgctctgacatgtggtcgaaattgctcagacagaggggaagcctcggtttaaagtcatattggtcgtgagccctacacactttttaagagcgggaattccgatttgccgatcaagttgtattcgaatgcgttttctgcaccagacccggaccccgtgcaacaactatgatggtccgatgagcgcagatccgcgccatgagacgctcctccgggcttggacctggcgcctcgttcggtttgtattgtcggcaatgctgctttgccaggcgcactcctatgcgcaattaggaccgcagccgccatgcggtaaggaagccgttccgccctatcctggtctggatgattcggccatcgtgaagtcatggagcaagtctgatttcggccgcgactggagaccgcccgcatgcaccggttgggctgcggtgggctttacaacgttggtgaccacagtcgcgcggtttcgtcatacctcggaaactgagggcttgcttcgccacatcggggcaatttcagaactcgcgggcatgcgctactggtcgaccactcacaagcagtggcaaacactaattgtggacgcctacgctatgaccagcttgcagcctagtcaacgccgcgaagactttacgcccgatgagatgaaggaaggcacggtactctactttgaacaggtcgataacctttctggcaaagccatctaccgaatgcatattgctgaggcttcggcggaccgtctcgtcttcgatgtcgagaacgtcagcacgatgcgctatctctttataaccatcttccaaccgggtgagatgcaatcgatctactttctggatcgcgaatcggaaaacgtctggcgatgctacggcatggtgcgcacaggaaagaacgcgaaccgcctggtcctgggaaatgagtcttccacggtcaatcgggccttcgcgttctatcgcaacttggttggaattcccaccgaccaggagccgccggcggcgcgatgaaggcaggagtttgtagctcccccagctttcgcgcgtctcggtgcttcgccggactgacgagacaatggaaaaatcaaccactgcgggttgttcggtttctcaggctgttgcttcttttctgggtcactgctgtcgctatggggagaggcagctttcttgactcctttgccgactttcttgcccccttgcctacaccctcacccaaatccttgcctgccgcgatgggttcaccttgcttcatctcgtggccgattccctcgccgccccttcccacatctttgccggcggctttgaagtcgcctcgggccgactccggccccgctcccagtttgcctgccgtttgggcatcaacgtgtcccgtggccggcaggttctccgacttctgataggtcagatggggagaagggcaaatttccttggagtttacgcatggctgctgcgttggcggtggttgccgtcgtaaaaccaagctacatgagggtcccgcgggaagaaaccttctaaaccctccccctcggttccccctcaggtggcaaacgcactgaggtggatgacgcgcccacgcgctgccaaagcagcacccgtcaggccgatattggaaaggcggatatcctccccctctccgacggccgggtactgtttcgcttcgcctcctgatattctttggaggaaagcgtccacgtcatcacgtcccgcatcaggggttggattcctccccttctctccagccgagcccgcccgatccagcgcatcgagtccgtaactgcgcatgagtttcggccagagctttctcagcgtgtcagggctgtcaaagagctcgaaaccgctcacctcgccctcgatcgtgaagactgccccaacctgcccctcctctggcggcaaggaacgaacgtattcctccagccccgccgagtgttgctcgaatatatccgccatggccgacgtgcgggaagtggcattcagccggtggaatttctcgtcgatgtcctgccagaccgctctctggttcgagtatctggtccccgtggactgcagcgatgcagaaacctgcgccatcttcctagcccgaccttcggcatattgagcacgcggtgccgcagagaaatccacggaacggcgtgcccagcggccgcgctccacacaggaaaccggaattgtgacggctttcttagccgaaatgagaatactcaaattcagcgtgcggttttgcttggcgccgatcagttcttcgccctccatcaaaaaaaccgggtggtcgctgtcgttgatgaatttcaggtccggaacactgccgccttcggacacctcggcaaccttggcagacttgttggtcagagcttcgtccaaggttatgtagtcgggcgcgatgcccttgccgaatacaggaaagatcgtgagatttcgaaatgtcttgggtttgccaagcctggtactggaaatagtatcggtaatcagttgcataatgcctcctctgggtggtggcattcggttgacccgtagtgggctgagccagccatccaagaatttgtcagccctggtttctaataatgccctttcatgctgcttgcagaacttccagcagccgcaccattgccagcgtgtcctgcctgcagtaagccaggagggcctctttaagccgccttctctcttcggttcccgcctcagcatgaaccatcttttcccaggcaaggccggcgtcgttgccttcggccacttccatcccgtcgtaggacatgtcgggcacaagggcaggcaagacgctcttcaatgaaagcggctggtggacgactttacctcgattagccgccatttgttccggtgcagtctttccaggatgtcaactctggccagaatgttgtcgtgtgtgaaagtcgcctcgaagatggcgggatgttgcctgtccgctaccgcctgctcggtttgccggagggccttgtccatctcctcgcgccccgcctcgatgagcgctccgccgggaaacatcctctgggcccatcggcccacctcgtgaccctgctcgaagaccgccatggattgttcgtcaggctccgctgccagttccggctgatgaacctccaggtacaggcgcttgaggcactgccagccggcgatgaatcttgattttgagagccccatggatcctccggtttagcaagaccacgactgcctaccagaccgcaactgtacgcgggggccgcctgccaagagcatacacccaaactgtgtcagggatggtcaccgcgatggctggtgatggatacctgggcatctctaaaagcgagttatcagcagggggccgcaatactcaaccaaagatcaaaacggggccacacacttccgtttccgttactcgctcagggcacacgccggagctttcagcgggcctgcgtcattcgagtggagccgcggcttccgttcgccgctcctggcagtcctggggaatttgccgcaaccggattccgtgaaacgcgttgctgttgacccatcgcatgttgtcgcaacctgtctgaagccgacggatgacccgtcctttggaggcaccattttgcgggtttgggaagtcggcgggaagtctgggccagtggctcttagcgttcgaggttttcggagagcaattcaaaccgacctactggaacgaaacctcagggacctccgcatggaggatggggagttcaaactcgatgtgcctggctatgggtttgccgccgtccggctgctggattaacatctgaggccaggccagcgtggacctggcacgaatgcgccttcgctaagagcgggatctgagcaatcggtaggacctcgcttggccattcgctgtgcctcgcttcactccaaacaacgccactcccaagcagcccgaatcgccccttagccaaagagtccacgggatgagtccccagccgcgagctatattccgaaatgggtcctcgcacagttgtgaacagggtactcggtactttggtgcttttgacgctttgagatggggcagcgaaactagcagtgtgaacaatcccccccagaggatgggggatcgaacaatagagtgcccaccgtgctgaccgcctaaggggtggtgctcgggggcagctcagcaggatggcagaggatcggccgtatccggttgtgccgcatatgcgaaggcagtcacgactctaacttggcgggaagaaacaatgattcggatcggggtcatcggctacggctactggggtccaaatatagtcagaaacctgcactccctcgattcgacccgggttgctgccgtttgcgacagtgacccaaaaggtcaaagccgggcaaaacaagcatatccggatgtgcaggttacctccgacgcatctgaaatcttgcattcaccatccgttgatgcagtggccatcgtcactcccgtctggacgcatttcgagctggcaatggctgccctggaaaacggcaagcacgttttccttgaaaagccccttacttcgaatgcgatccaggctgagaggctgatcgaattggcagagaagagaaacctcaagattatggtggaccacacgtttctgtttaccggagcggtgaagaagatccgccaactgatcgatcaaggtgaactgggcaacatctactatttcgactccacgagggtccaactgggccttttccaacacgaccttgacgtgatttgggatctcgcgcctcatgatttgtccataatggaccacctcatccgaaaggaacccgaggctgtcgtcgcgaccggccaggctcacttgaacgtccatgccgacgtggcatttatcactgtgtatttcccgtccaacactattgctcacatcaacgttaactggttatctcccgtgaagatccgaaccacgctggtcgggggagagaaaaagatgctggtgtggaacgacttggaagccgtcgagaaaattaaggtctacgacaggggcgtgcaaatggccagcagggaaggagtctatgaattgcttgtcagctaccgctcgggagacatgtgggcgcccaagatcgagcagacagaagcactgaaggtcgaactggagtacttcttggagtgtatcgaaaccaaccaaacgccccttaacgacggtttggctggattgcgtgttgtcaaattgctggaagcggcaacagaatcactaaagctgagaggggcgtccgtttcggtatgaacatctaccacctcctcagcagtcacgattgtcttgccacaagcggggcactttagctcttcctcttcgcccacttcgatgatcgcgggaccgctcgtttgaatcgttgaggtaatacgagatcagaagaccggtgtccgcgtagaggatcatgcgggcttagtagctctcctcgtcccgcgccagcagaactaaattgggcagaattttgtcgccacaaattcgacgccgccgagcggcagcgtcgggccagcgaatcgggcgtccccgtctagccgccggccccacttccggcgccgtttccagttcgtgaacgccttcaaagaatttccggcgctcccgaggcggcaaggccttcacgtactccaatacttcattcgcgcccatcatcgaaaaatatcacgcacggggcgcgcagcgcaagttcggcgggctgccgcagggcgagcacagctctacgattcaccgtctcgccaaaacgcagagttgcactctgcgccagccagccttttttcttcgcggcacaaaggggcgctacagttctgctcccggacttgcctttcatccctcccaggtgtataccttcgtcatgtttatcctgtggtagccacctggcgggcggccgggtcgcgatcacccaacggccccaccacccgcctcttgccccgtgaaggaggaagcagtgaagtataacctgctcgaagaaaagtggattcccgttctatacaaggacgggatcagcacacgtgtgaatgtcattgaggcgtttacggaagccggccgcatccgcgaaatcgcggccagcaaccctatggaccgcttggccatcctgcgtttcctgctcgcgcttctctattggtgcaaggggaatcctccagacgaaaccgactcgatctcttcgtttccctcggattggttcaagaggctcgatgacaataaggactgtttcaacctgctgggcgatgggaggcgtttttaccaacagaagcctaagcgtcttgagaagaaactctcggccgactatctcatgcaggaggtgcccaccggcacaaacttctggcacttccggcatgggacagatttgagagacggcttatgtccggcgtgctgtgcaatgggcctgttgcgcctgccgctctttgctacctcggccgggcgcggcaagcccccgggcgtcaatcaaaaaccgccgacctacatcgtgccgatgggcgactcgctttccgaaaccctgcgtctctcgtggcggaaaagaccggagccgaacctgggcacgcccacatgggaaaagccggacataaccctccctcaacacggcaatgttcccctattaacgggattaacgtgggtgccgcgccgcgtgtggttggacgctcccgaggaaccccagtccaactgcatcgcctgcgggcgcagagaggctctgatccgtcgatgtgtctttgcgggtatcggcagcacaagaacagacgaagggagtccggcacgagtgtggaacgacccgcacaccatcagggaaggcgacgagattgtgaagcctttcagcgcgcttggcccggccgatgctgcggctgggaagtggacgaaagtcgtggctggaatcctgtgcggggaaaagccgaaggaaaaacaaaggttgtgggtcgtcagctttgcgacagtgcagaatgacaaatacctggaagcaaccgagtgggagattccgttcctgaccgcgcttgacgacatgaaggttcaggagagtatagaaagcatcggggcgtggcagagggaaggctggaagctccctggcaaaaccaaaccgcgagagatttcccaaacaaggggacaccttgaaattctctccgccgtcgccgcggttcgtccccaagccgaaagaacggtttccggaagaattgaccaattgatcgcccaaggcggcgacgcatggcaagaagccgcccaggagtatcgtccgctgatggccgcagtcgccaaatcgctttcacccggttacacaagcgcgtctctccgaagtcggcaagaaattgccgcagtaaagccggacatgcggccgaagaaaaaccacaaaaacgaagggagggacaagtgactgcaacggagcagtacgtcgaagttctgagtcggctgaaacccggtgagctcgggctcttgcgcaaccatgccggacaagggctcgacgaatcggtggagggctttgaccttttcgcaggactctggtggccactgcgggcgcaaacccagcgggcgcctcgccgtgaggtggcgtggcttgtcgccaaactctacgccttccggcccctcgagcattcacccggggagacgctcgctcgccaactcgcgcgctcccggcccggcgacaaaacagagcgaaagcgtttcgagcaacgcttcgataggatgctgacgctgccgcttgctgaaatcgaacccgccctacaatgggcaatcgacctcatcgctgccaagcaccccaaactcgactgggtacggctgacgaacgatctttccatctgggaacgcgaatccacccggctcaaatgggccacggaattcttgagctgttcaataggaggagaatcatgttgatccagattcacgccattcaaaatcacagcccggccaacctgaaccgggatgacctgggcgcgcccaagacttgcttttttggcggagtcttgcgctcccgtatttccagccagtgtctcaagcgcagcatccgcatgagtgaggagttcagccaattgcgcggcggagtgcgcacccgccagttagcgaaagagattgccgaaaaggtgacgggcaaagacgtcaggaagcgcgccgagaacattctcaaggcctgcggcctggagcctaaaaaggcaaaaaagcaggaaggagagggtgaacaagaaagtgccgagaggagcaagatgttggtttacaccacgcaaggggcgattgtacggatggccgaactcctccagaaggaagacggaaaaacggacgaggccttagcagcggagttcgggaagctgatcagtgaatccgtcgccgtgccggacatggccctgtgcggcaggatgcttgaaacgggagtactcgaaaacaccactgtcgaggcatcgcttcaggtggcccatgcgatttccacccatgaggcccgcccggaggtggactactatgtggccgctgatgatgtccccggcgaggacgcgggcgcagcttacgtggatgaagccatgtttggctcagcatgtttttacaagtatttctccattcattgggaaacgctggtcaggaacctcgagcccttcggcgcggatcacgaaaagttggcggcccataccgtcggcgagttcattcgcgcagcggcgttggtcaaccccacgggaaaacaaaacagttttgccgcgcacaatcctcctgacggaatgttggtggaagtcagaaacactccaatcagctacgccaacgccttcgccaaaccggcggctcctcagggcgaacgggacatcatctcgcagagcgtggcggagcttgcccattatgtgaacgacatggatacgggatacggcaagcccacgaagcggttctggttctctcccaatctccgctatccgttgacggctaccaccacggaaagcgaaaacggaaaacagaaacagcgtgaggtcccgcttgccgacaaagatgtcaagtctcttgacgaactgatagcggccgtactcaaccaaatcggccacgactggcaggaggtcgagaaagtggtcctgaatccggaggtgccccgtgagcccaaacacgctgttcattcggcttgaagggcctcttcaggcttggggcgatcagcaatcgaagtttgtcatccggcggacggctgaggccccgaccaaatcgggcgtaatcggcatgctgtgcgcggccttgggcgcctcccggtcagaggccgctgaggagtggcttccaaggctaagccggctgctcatgggcgtacgcatcgacgcgcccggagtccgctggtgggattatcacaccgtgggcgccggcatgccgatgcgcactgccgagggtggaagcaagcccggggccatgctcacccgccgcgagtacctttgcgatgcgtcgttcttggttgcactccagggtgaaccgggcctgatcgctgaaattgacgccgcggtcaagtcgccccgatggactctgtacctcggcagaaagtgctgcccgccctcgcgccctttgctggagcatccgccaggggaattttccgatttgctctccgccctcgaatcggtaccttggcgcaaacggctggagggagacccacagccccaaacgctggaatgtctgctcgactggcacccaaccgcagaccagccggacgctcccgatgattcgctcgtttggtacgacgtgcctcggagtctcgacccgccctcgcacgaagctcgattcgtcattcgcaagcaattacgcgtcggggctgaaggcggcgtgaccgttgcacctctgcccgcacagagcgccacgccggcgcctccccgcccaagggcggattacaccaataccgagtacaaaaaccggcgcaaagagcggctcgacgatgaccatcacttatgcgttttttgcaagtctcccgccaccaccgtgcagcacatcacctaccgtcgcgcgggtggcggcgagttgaaggacgatttgcgctccctctgccgcctctgccacgacgccgtgaccatgcttgaatacggcctgggcatgggactcgaccgcatcaatcccgaggacccgcaatggcgtgaccggattatcgacaagcgggacgagatcgtcaggttccgctcggaggaaacccgcaggcgattgctcgccgaggaggtggaataggatgtacatttcctgtctcctaatcaacgtcggtgacaaccccgaccgtccccgccccgggcggctctggctgcgcaacctttatcacgttcatcagcgcctctgcatggcctttccctcccatccccaaaaagatccccacttcctcgcgcccttcaagcccgcggactttgacgggaagcaagtccatgtggagcgcggtgcggattccggctttctctttcgcatcgacccgcaactgggcggccgggccatgattgtggtgcagtccgccaccaaacccgattgggactatgcctttcaaaatgcgggccatcttctggtgaattccttcgccgctccccctcaggtaaaagaactcgatccctgtttcagcgccggtcagcagcttcgctttcgaatccgcgtcaacctgagcaaaaagataaagaccagcacagcgggcatcgatcttaccaggccgcgagtggggacggatccccagggccgaccgaaggcccaaagcaaacgcgtggcgctcacctgggataaggaccaggacccgcaggacgccatacgggagtggttcgctaaaaaggcccagaacggcggcttcaagctgggagccttgcgcgctctgcacatcggctggggcgctggaaatgacccggactccacgcctgccgtccaggacagccgctcgggggacaggcgcatgaaattccgctccgccttgctcgaaggaacgctcacggttgaggaccctgctaaatttcgtgaagccgtcgttcacggcatcgggcccggcaaggccttcggtttcggcctgctttcagtagcccccgaagcccgctcagcgggcggcgacgtgtagcccacggcgcaagccagacccgtggtggtgacatgcgaactcaagatctgcatattctaccgaagttcagcgacggatggagttacctgtacgtcgagcgctgcaaggtggatcaggaagaccgggccattgccctgcacaatgaagcggggaagacgcccgtgccttgcgcaaatctggccttgctcatgctgggaccgggcgtctccatcactcacgccgccatttccgtgctggcggaccatgggtgcctagtggcgtggtgcggagaagagggggtccgcttctacgccacgggcatgggcgagacgcgcaacgccgccaattttctccatcaggcgcgcctgtgggcgcacgagggttttcgcatgcaggtggtgcgccgcctctatcagttgcgttttgccgagaagttcgaccccgccttgaccctgcaacagatacgtggcatggagggcgtacgggttcgagacgcctacgcgaaggccgccaaggaggccggcatcgcctgggaaggccgaaactatcagcgccaggagtggagccaggcggaccccgctaaccgggccttgtccgccgccaattcctgcctttacggtatctgccatgcggccgtcgtctcggctgggttttcccccgccctcgggtttatccatacgggcaagatgctctcctttgtgtacgatgtggccgacttgtacaaaactgaaatcaccgttccgatggcctttcgcgccgccgccgaagcgcaagatcaactcgagcggcgggtgcgcatcacctgccgcgacaggtttgtatccacacggcttttggaaaggatcatcccggatatccaatctgccctgatgctgtcaaaagcggcggcgcccgactctgaatttgaccttgatgccgccgcccccggctccctctgggacgatttgcagggcgccgtggaaggcggccacttgcacgccgtagaagaggaagaaacggagcccaaccatggtggttctgattcttgagcgcgtcccgccagcattgcgaggcgagctcactcggtggtttctcgaacctcaggcaggggtgtttgtgggacgcgtctccgctctggttcgcgatcggttatgggaaaaggcttgcgcccaagccaaaggaggcggatgcctgattctccactcaagcgataatgagcagggattccgtgtccgaacatggggcagaacagcgcgctgcatcgatgacttcgagggcctttttctcgtgcgtatgccgcagaatcaatagcttgggaagtgttgtccccacgcgcgtgggggtgaaccggatgagtttccagggccgctcattgcagacgagttgtccccacgcgcgtgggggtgaaccgtgggatgcgtcctggctcgaggtgggtggcccgttgtccccacgcgcgtgggggtgaaccggctcaaggcgcttgccgccgagggcaagaccggttgtccccacgcgcgtgggggtgaaccggtgggatacacatcggccgggctgatcgcgatgttgtccccacgcgcgtgggggtgaaccgccctgctgaaacgacacgatctggcctaccaggttgtccccacgcgcgtgggggtgaaccggaggacccctacattcaggagcagatcaagatgttgtccccacgcgcgtgggggtgaaccgctgatcatcacccagcaccggaagaa

SEQ ID NO: 588 - DNA, 14036 bp, Artificial Sequence
  Synthetic Oligonucleotide
aacataatgattaccacaggatgtggggtattgataccggttcacccccacgtgcgtggggaacattaacagcgttttctgcgtggtttgatccaatccggttcacccccacgtgcgtggggaacatcacattatccgggtcgggcgccacaattacggcggttcacccccacgtgcgtggggaacatactgacaaaagccgcatcaacaggggactcgtatgagcgatagcccctcgaagtcaacgacatgcctgctcggctctcccatcatcctaacagaaaatccttgttcagcgttgtcgctgaaaatcatcacaacagagccacctcgtgattcttcgcagatcttcttccataaaaggtctctcaccatccctgaaacgctaccgacgaaaacccctgctttggcctcaagcatccatcgtgtcagttcccctcggagaccgcccggaaccttttcaagaataaccactgtcaccgttttctcctatgtcgatagtatctccatagttcatcccaccctcatttgtttctccacccaaatcccacaacccgcccggcactgaagggtcggcatcgaaatctgcatcctctcgtagacagcggtcctttgtcccgagatccaagacagagtgaatgtctgaaacaatactcttaagaagcttggtttctttcaacttgtctctgatcgctttccttacccggctttcaagctggtcggatccctgggacgccatttgaaaggcgatcggaacggagacttccgtcttgtacaggtcagctacgtcatagacgaatgagagcattttccctgtatggatgaaacccaaggccggagagagccccagagcaagtatgccagcatgacaaataccgtagagacagctgtttgctgcggagagcgcacgatttacgggatcgccggaattccagttcgtccggtcatagttccgtccactccatggcacaccggtctcacggctggctcgagaatacgcatcgcggacccttactccctctttgccccgaatctggcgcaatgttagagagtcctctagggtggtatcaaaccgcatcgaatacatttttcgaacgaccttgagccgcaactcatcattcgcccagagtcttgcttggtgaagtagattatgggcgcgacgggtttttccctgcccgtaggcgtaaaaccgaacaccctgttcgccgcaccagcaaaccaaacaaccattgtctgccaaagccgtcactgctgcgtgggtaatgctcgttcctgggccgagcatcagcagacaaagagttgcgcaggggacaggtacctttcccgaagcatcaaacagagctactgacctactttcctgctcaatcttgcagtgctctacgtagagatagctccaaccgtccctgaattttggcagtaaatggagatcctgaattctcatgtagtctctactaaatttggagttacatgggagcaactgacaagagcccaaacccaaaggctttaccggggccaatcccacgggagatcgtatttcgaaaattttcggaatcggttaccatcaggcttccctcgtatcgagctaaccgaattctacgcccgccagtttgatcttgtccgtggttaacgtaaacgtatcctgttcgtacaatactgatggtctgcaatcgaaagcccggtggtcgttgagtgctttcggaattcttcggacaagtccagctgggctcggctcggcgctccaaccacttgtcaagctctgcagtgggcacaggtacttctttgccctgccagccttcgtcaaaaggcttgccagatgcacccaaagaattcctgctcactttccttaacgggttggcaacgaggcggaacctcaagcattggccagcctcaaactgagggtggtatggtttcacttctggtggtgccccaagaatatggcaggcgttctgaaaggcataatgccagtcaggcatcacaccagattgtacgaggatcatcgctcgaccggtatttgagagagggtcgacccggtaaaggaatccttgtgtgttatttctaggaacatgaactgcctttgcctctctcgaggaactgtcttggtgtggatggctagtcggatactgagcaggaatgaagtcatatggcctgtacggatttagaaaatcagggtcttgggttttgcgatctctcgatggaaaccccatgcacaaacgttgatggaccctgtacatgtttcgaagccataatcgtccggggcgaggccgatcgggattgctgcccacgtttatcaagagacaagacagatacatggctattccacctcctctggtttcaggcgacgccgacgggtctctaatgaacgaaaatttacgatctggtctctcttttctatgattagtcttcgccaaattgggtcacacgggtcgatgcgatcaatacccattcccaaaccatattcaatcatagttactgagtcatggcagagcctacagagggctcttaattcatcaagacgctctcctccaccggcgtgacgatatgtgacatgctgaactgtggtggcaggcgatttgcagaaaacacagaggtggcaatcacgtcttagtcgctcctcccgcatctttgtgtattctgaattacggtaatctgctcgcggtcgaagtggtgggggtgttggattctggagggcctttgatgcgacattaatctcgcctggagacccgacactatactgctggcggatgacaaatcgagggccatgcgctggaggctcgaacgttagtggcacatcaaaacaaacaaatgcatcatctggtgcatgaggctggtccggagttggctgccaatcgagaagacactcgacaacttgggggacaagatcagtttttaaccggggagaccaaggtgctgatttcagggcagaaccaaggtcaggaaaatctccaagaggatattgtaacatgggacgagatggcaagcatgactttcgtccaaggtaaagcgtcgattggggacgtcggattgcggcctctagcttttcaacgaggctttgctcgccctgtagcgcgacgaggaaggatgcatcgcagagatattcacgcctagtgagcattgctccaggcttggtctttccttccccctcagcaatggccataggcattcgtgcgcccaccgtatgatagtcccaccaccgtacacctggctcatcaatgcgaacacccatgtgcagtgtggcaagtgttggaagccattctttgtgcgccaaaggtctggggattcccaaagctgcacaaaggattccgaacactcccgatttagtaggagaccgcgaagtacgacgaatgacaaacttcgattcctgacccccccaggattgaagcggtccttctaagcgaagaaaaagtgtcttggcactcattgagcccactccgggctaatgacggccttctgaactgctttccaatcgtggcccatggcgtcgagcactgtggtaatcaattcgtccagcgatttgaagttgttctccgaaagagaacattcttgcttattttcgatcacggtcaaatggtggcgcagatttggggaaaaccagaatctctgttgcggtttgccatatcccgtatcaagatctctaacgtattgccccaattgggcaacgctttgggagatgatgtcacgagtaccataggctacaggactcgcgaaagcattagcatagcttatgggagcttccttgatttctaccagcattccatctggtggattatgtgctgcgaagctgttttgtttacccgagggattggccactgcagcagttcggatgaacctaccaaccgtatgggctgccaactgctcttcctttccattataaccttgaagattttttatgagcgtctcccagtgaattgagaagtacttatagaaacacgcggaggagaacatggcttcgtctacatagccggcgcctgcatcatggcccgggatatcatctgtagccacatagtaatcgacctcaggacgagcttcgtgtgtggaaatcgcatgagcaacctgaagtgcagcctccactgccgtgtcttggagtacgcccgtttccaacattctgccactgagggcgatgtctggtacagctgtccgtccaactatcactttgccaaactcctctgccagttgttcatctgttttgccatggtcactctgcagaattcctgccatctcgctgatcgcctcacgagtggtatagaccagcatgtcgctcttagaatcgtccttagttttaatcccacacttttcaagaatccttgccgcacgtttcctggtattggcttgaccatcaactttgtcgccaatgacttttgcaagctgccgggtccgaactccgcctaggagttgtttgaactcatcattcatacggatacttcgtttaagacattggcttgagatgcgggagcgcattaccccaccaaaatagcacgtcttgggagcgcctaggtcatcgcggtttagattagcggggctatgattttgaatgacatgaatctcaattaacatttctatgccctttcgttgattcttaggaatgctgtagcccatttgaggcgggttgtttcccgttcccaaatggagagttcatccgtcaggttgacccaatctagtccaaaatctctggttgatgcgaccctaccaagcgcccattgcaaggccggctcaatctggttgactggaagggccagcatcctatcgaatgcttgccggtatttttgttgtgccctaggttcgattggctgagaccgtcccaactgaagagcaaggtaagtcccagctgaatgcgggatgggacgaaaagcgtagagcttcgcaatgagccatgccacttctcggcggggaacccgttcgtttctttgtcgcaatggccaccaaaggcctgcaaagagatcaaagcctctcaccgactcatcaagcctcttgcctgcgtttgctctcaaaagtcctaagtctcctaacttgagccgagttaagacatgaatgtactgatccgtcggagtcacttgtctcctcctttgctgcctttcggctgttcaccctccttttctttcggactcatatttggcttcagaccagctattcgaatcctctttagtaatgctgatgaggtgaaaccaggtgacagcgatttggcgattgaaaccattatcgttttgtattcttgtgccgcttggttccatgtgccctcctctcccacaagtaactctggcaccttaaccgagaccttttcctcaatatgatggcgaatagaagagatcgctgtgtctcctttaagcttccctcccacaatcccagctagttgttttccaatccttcgcgactctttttgccatcgttcaagttgttcaaggttattaggaacctgggacggatacaatgaatatggcatcaggtattctcttgcttccaggtatttgtcgttctgaacggttgaaaagccaacaatccatgctttgacgtgcttcccctcagctccgctatcctggattccgtgatgcatggtgtctgttgattcttggttttgaagtatgccagccgcaatcattgcccactgcccagaagcgccatcacttgcaccaagtgcatcacgcacagcaagggcccgagaggagcctttagcgatgtcagtcaaaataagatggggatcttgccaagttcggcccgaatcttcaggatttgtcttggtgctcccgatgccttcgaatacacacattcgtacgagacgatctctgcgcccgcaggaaatgcaagcagccgaacaatcttcagggttgtcaagccagactcgcctcggcagccatgtcagaccgacgagaatagggaccaccccagtttttgggagttccaaatcaggcttttcccaagcgggaaacccctgattcgatgctgatagccatgaaagtctcagcgttgctgcaagtgatgtacactgtggaatgacgtagagtggaggttttccatttatacccggaggcttaccccgtcctcccgaggtggcgaacattgggagtcgcaacaatccctcggcgcagcacgctggacataatccatttgtgccatcggtagagtggcgaaaatgcctcttgttggtccccgttggtatctcatggattagataatttgcagagagcttcttggcattcttggaaggtggaaactgatagaatcgtttctcgtctctgaagagcgaaaataggctttggttggcgtccaatttcgagaaccacgtttcagggaaagaagtatgaaagcctgattccctcccttcagtcggattccctcggcaccaatacagtaaagccagcagaaatcttacaatcgcgatacgacccattgggtttgaggaagcaatctgtcgaattcggcctgattgcgtgagtgcttcaatgattccgacccggctgtatcgaccatcgttccaaagtacgggaatccaatcctctaacaacaggttatagtgatcggttttctgcgtcatggtcctcctttcgtctgagaaaatagtaaggcaagactcggtccgcaatcattatttgatctgggttccaggaattccctttttgatccttgatactcatttgttccccttgcggttgctttggagttcttcgctcaacgagtttcagtggtgactgatggaaaagtgttacgtgtgcttctatgaccgggaccacttcagatcgcccccgcacagatagggttttccgaaactgataccaaaccaaattgtcaaatgaggacacaaatgagaagttattttttaatgttgtcgtcattttttgttcgtgttggccagtacaacgcgctctaaatcgtagcaacattggaatcacagaccagagggacgggagttcttagatggcgaaaacacttgcttatttttatcttaagggcccatgggctcaagataaatagagccccctctgaggacgagagcgacaaaacttcagaagtcaaccatctgctaattgcccagtggcaagtcacttgccaatcttctctgttcttataagccgtccgttgcggtcccgaacatcaatgttgccgccgtgctgtgtccttgtttcaagcaaactaccatttttatcccgcacctgcgtggtgtttcccttttggctccaagtctccacaaggcgaccattggcatcacggacctgcttattttgtccccacccagatcctgcaaacatcgtcaaaataaccgctatcaatatcatcctcatcatcttcgcatctcctttctcccctcggggggacaaaatatcagtaacatgtgtcaaattaggacaaacgagtcatcaagtacgacaaaaaaagtcattcgaatctaaaaaagtattttagcgtttattaatgaggttttttgggaaaggaccacagaggacgactgccgcaatatggggcgatttccgggcctatgacctccgggtaaaccttgttgttgcctgggggagatcgtgcgactacggcgatcctgcgaagccgagttttccattgcgagggtcgacacgacctccggggcgacagcctgaatgcgcaaaccattcagcctcttgagagaatgtaacacggacgggagtccgcaaactggtccgcaagggaacggttgagtaccaatttcttgaaaatacgtaatgtaataagagttagaaaagatatattagttgtataagaatattgtttctgttgacaactgataagtgcgggggtatgatgttttcaatccttattatggaggtcaggcccatgagagcagcgatctattgccgggtaagcaccgatgagcagcgaaagcacgggatcagccttgaggcgcaggaatcccggtgccgtcagtatgcggcagttctgggccttgaaattgtccatgtcggagtcgagggtgcatccggtaaagacgaggaccgccccaagttcaaagagatccaagagctcgtctcaaggaagaacgtccagcacctgctcacggtgaagctcgatcggctcaacagggagactgagggggcgatccggctgggcaagcaatgcgccaaaaagggagtcaagctgcacctggtatccgaaggcggtgaagtggatctgaccgacccggcccaggagatgctgttcacgatgcgggcggcgatggccacattcgagcggaaaaagatcgcactgaatacccgttttgcacttgctcggaaacgagagctcgggggtcgtgtttcccgtcatgcgccgtatgggttccagttcgatgatgccgggaacgtgatcgagaatgctgatgagcagcgggtcattcagcgcatccagcggctccacagtcaaggatactctgagagaaaaatcatcaccaagctggcgtctgagggactgttcaacagggctgggagagagtttacgaggggcaccgtgcgacagtttctcaaggctgcataagagggaggacaccatggcaaagaaaaaacgcaggagggcgctcccaccgattgacgagagccccgagtttcaggagctactgaaggatttgaggcaacaaacacccgaccaactgggccggttaaaagaaatgctcgatgaacgaatcaggaggagcgatgacacagcggatggcaccacgagcaccgatcgttaaaaagcacaaagtggggcgccgggagaagttagccatcacgatcgacggtgttctctatgatagacttcaggagatgtaccaagacggcgtttcagtttctcatattgtggactcagcactctggcacttcttcgggcagccgaagctgtcctttgaactcgataaggacaccggatcttaagaaaatcacgacgaggaaacaacagtagaggatcatgaaaagcgagcggatcttagaacaggaaaatgcgcggaatccgaaaatgttgccggagattacacttgaggagctatccaatgcctatggggaccttatgttattcgtcagtcaggtcgatgacgattataagtgggagtattccagtctagcctccgagtgtatcttgtggtcggatcattgtatttccgggcacacagaatttctgggtcggtattgtggattcagtgacgcaaaggattttctgaaccaccatgggtatggcagcgtattcaatcttgatgattatcgcagcgctccccactccctccgcaatgcttatgtggttctggagcggttgttagacacatttgcaatcggtgagtttggcgtgatgttcaagcggcgatgttgggatgttgatagtgaacgtgagatagaagttttttcaatgagatcatggcgggagatcttgggggaatgtcggacccgtattgaaaatggagaccctgatgcccgagactatctgtatttggcagggtgcatcgaagagttcagggacgagtctgtctagtcttgctggagtgctggtcgtaaaattagtggtttggggggatgaggtatggaggggccggtcctcataaaggattcgagagaaccagcggtcgcctgggatgagtatttcaaggcccccatgatcgtcaggaagctggacacgggagactatagcgtggacgggctcgaaaccatgatcgcaatcgaacgaaaaacacttgatgacctggttggatgcctgggcaagggccgggccaggttcgagcgagaactggagcggtcacaagcattggattactttgccgtcatcctggaggagggatacgcgcaactcgcaacaggcaactatcggagccaacttaaccctagggcagcggtggagagcatcagcgcatttgaggtcagatatggcacgcattttctctttgccgggagtcaagagttggccgcaaggaagtgtgagttgttgctggtcaagttttggagagagcagcagaaacagctcgatggcctggaggcaacgatcattgcgataccgacttgaaggcattaaaaacaatcgtggaagactgaaattcagaggaggcacacatgggtagatcgctttctttcctatgccctgattgcggttacagggttgagcacatttcaggcggcattgactgcggatttgagtcagtggttcaaacggtctcatgtccacattgccatggactcagcgattgccttatttctacggaccccagcggagtgctgcggcataacccgacgagactcaggcacgatttcctcccagacttgtcatgcccggtctgtggggcaaaggatgtaacgccatggaatgatccgggcccttgtccgaggtgcggggagacgatggagatggatatcgaaggcccgatagcgctgtgggattagacacccccagaagaaaccaacaataccttcgcttcatcaactggggcaatagtccccggtcccctccgactgcctcaccccaccccctatccggaaaataccccccctaccccctatcctttggggggcgacatctcaccaaacttcccaatttccccacaacttttaattgtttgtttatcttaactgtttgtttttatatttcctttttatggcttgacaccgcacgccatagcaggtagtataatattatgaaaacgattagatcggtgacaaagacagtgtttccattcatcaaacccaacacgatttttcaatggatgaccgcaggagttttccgcccagaggtttacgtcgcccctccgtgcggacctggcagaggttgtgtcttgagcgaatccgaccaggttgttgtgggcattctgcatacgctattttcgcacggtgtccgatttaacgatgtttcagtccacggggggggaggtgggcagcaaatgaaaaagaccccaatcgtgtttgagaattttcagcctttgagtgatcggccgatgcaggaatatatcgagcaccaagagttttattgctttgcggactgtgttctcgactgggctcatgggtctcgactgcctcggcgactgatccggttcatgcccgagagcctgtttcttagtgaagcagaggactatcttgggcccggcccatgtgaatctcatctgttcgtaagtgcccgccgatggctcgaattcgttaaaaatgcccagtgattttttttaccataaaccgcctgtcatggaaggtagaagggagaagaaaaatggagatgatgctgaataaaacccaagtggcgcaaatgctgggggtcagccttcgaacgctcgctcgatggctcgaacaaggcgaggggccaacttttcgcacaaccccagggggacgtctcttgcggtgcagccgagaagacctagaggattggatccacaggttgcctgaaagaaaaccgtaaacaaagaaaaatccggctgggaggccggaacaattattacattcttgggtttttatggtgggggaagtatagcgatgaaatcgcaaaaaatcaatggaaaccaattccttgagctaattaatcgatatacgaccgtaaaatggaaagcgacaaccgatggaggtgaatacgcaggaccgtgtccaaaatgcggtggtaatgaccgattcagagtctggccgcaacagggacgatactggtgccgccaatgcgatgcaaagggtgacgggatcgagtatttgcagtggacaaagggactctcgttcaaggaatcatgtcaggaattgggcatcacgccttccgggaatggcagccacaaaacaaccataactcaaacctcaaagacgtcgcatcggcaaagaaaaatccggaacacttacacctactgcgatgaacacggccatcctctatcggcgaagatccgcttcgacactgaggttaagggtgaccggttcatgcaaactggcatcgctcctgatggatcttacacctggaaaatggaaggggtgcgacccacgctctacaacgtgcacctgctcgtgaacagacccggtgagacggtgtttgtttgcgagggtgagagggatgctgagacagccctatcttacggatatttacccacaacatttccgaaccaatcaggattcctaaagcactgcactgaagccagcattcacgagcctctcagggatagcgacatcatcatctttgcggatgccgacacagcgggccgccggtacgcgaaagaaaaagccgagttcctgagcagacactgcagatccgtgaaaatcatcgacttgcatccattcgctgacgatggctcggactttagtgactgggcacggggcaagagccgggaacaggttcaggccgagttgaacgagatcattcagcgcacttcattgtatcagcagccacaagagaaaccgaccgaaccgactgaagcatcgcctgccagcgacaaggccccttcgatcatatccttcgcaaccctcgtagagatggaactaccggagccgagatacatcatcgaggatattctcccggaaggcctggccatcctcagtggggctccaaagatcgggaagagctggctcacaatgggcctatccgttgcgattgcgtcggggatgcaggcactcgggcacttcgagacatcggttgggagtgtgctgcactgtgccttggaagacagtccacgccgcttcaagagccgcttggacaagattttgggggacgcatctccaccaaccagggcgtatttctgtaacgacatccctctcatgggcggcgggaaaggcccgaataccatagacttcctggaaacgtggatcaaggggcaccaagatgatgcacgccttatcgtcatcgacacgcttcaaaagatcaggccgatcaaggggaagcatgactccatatatgagggggattacaaagacctggagccgtttcaacaattggccgccgcatattccattgcgatcattttaatccaccacgaccgaaaacaggagtcatctgacccgttgcacaatgtctcgggcagtaccgggttgacagggtgtgcggacacattgtggaacttgaaaaagcctgaccggcatcaatcgaaagcaaccctgttcatcacggggagggataccgaggaccgcaagggcgatctgcaattcgataaagagcggggtctttggacgtggctcggggatagcgccgaacttcaaatgagtagagagagggtgcagatccgagatgtcctgaaagaagcggatcggcccctatctatcactgagatcaaagatgctctccacaaggattacggtgcgaccaaagcgcttctctataagatggaaaaggttggtcaggcgcaacgtgacattcaggggaaatggctcctccctccagaggatgccatgtacggaaaacccgagaggggcgaaccatgacccggcaaaaggggatattaccgtttccctgtttcccaaatatatattcaatcaatattaatgcgggttttaaagggaaacgggggtgtttcccaggcgtttccctcgtttccctcatgcctggaaaaaggaaacactgggaaacgggagggaaacggttttcgaacaggtgtttccctcttctaggtaagtattcatcggggttttatgaaaaaagggaaacggggaaacacttatacacactttgcaaggcaggtgtgtctgattgggggggtagatatggcgaacaagagcgacgtttataagggcatcggccaatactgccgattttgccggggcgacacgcccaacgatctcagctgttgcacgggatgtccgttggacacatatcggcggccagcgccacggagagggggagatggtttaatgaagcctgaatttcggaaagcctttattggtaagagagtacgggggttttgtcggcacgtttgcctcaacgggcatcccttgtcgatgtgtgcgagcccagaatgtcccttgcatggcatcgctttctcagggcgcaataaggccaagggtgagcggttttcaggcaaagcaccagggaggcgacccgaagccttatccgacacggacaccacctcaaaacgcattacaggtaggggtttttcaccaaatatcactgcatcagtcagcaccgtcgtaggtgaagggcggtgccgg

SEQ ID NO: 589 - DNA, 13836 bp, Artificial Sequence
  Synthetic Oligonucleotide
gaggatggtattaggaatagttttttaacgtcgttagcggggaaaaaatggagcgaagggcgcgtcggaactaatggtttggtagcttacttattaaaggttaatgaggaacgttgcaagcccccgttagataccgacgaagtagaaactattgcccggagtatctgtaataattatgaaccgggcgggggggaagaacctagcatacccgaaattttaaccgaagagactcgaaccataataaataaaatgttagaagctatccccggggatatagataaggtaactttgcccgaaaaactcctacctgttctcgataccctggcaactttagaagaggtacaagccgaagcatttttgaattacgatattaagaagcgtttcaagttaacgagtaaggatgtcgaaggttatcgaaaaatagttactcgtattagaaagaatctcagcggctcagcaatgacgataaagtattcggagacgccgccgaaaagggtatatgtagccataataccgggcctcgttgatattgtagatcaagatggggaacccgtttttttgatgaaagaaggcgacgacttaacggctgtagctgagattcctttcgatggtaaaatatatatcccgccgcgatctgaaaagatccggtggagtttacccgaagcagaggaggtcataaaccaatttaacgttgctaaaaattcttcaatagcttcctttgggagctctttatacgatgatttagttgaattccacaagtcactgtccgaacttccggacgggcggtactatgaccttttagccctttgggatatccatacttactttttagaaaacttccgattttctccggtgctatgtttttacgcaattcctgagaggggaaaatcacgaacggggcgcgggttgttgagcgtatcttaccgcccgcttcacgtcacatgtttgcgtgacgcgcatctaataaggtttgccaattgtttttgtggaacgctgtttttcgatatgaaagatgtttggaaaaaagcggaaagaagcggtagcgaggacatactgcttcaccgttttgaaaaaggagctgaggtcccacgtgtgaacaaccccgaccggggggcgtttgaagacacggattactatacggttttcggtccgacggtcattgcgaccaacaggccgatccacgatattttgggcacacgggccatcacaataaatatgccagaatcatcccgcgaattcggacacgacgcaactgtggaaagcgctatgccgttaagaataaggctactggttttaagggctctctatttagggaaagagttgcccggcgtagagaggccggctagggggcgtttaggagacgttttagaaccgctacgtcagataatccggttgataaagcccgagagagaggcggtttttatcgggcttgttggagagttagaagaaaaaagacgtttggataaagccgattcttttgaaggggaaattttacgaacgataatcaattctgaagggcaagtggaaaaaggcctcctgatgtacgcggccgtagcggaagcttataatcgcggcaaacctaacgcatcccatatagacagcagaaggattggcagcgtggtcaaagctatggggattccaaaaaaggtaacaaataaaggtacagccatgatttgggattaccagcagttagaccagctgaaagtgaaatacgggttagaccaggaggatgtcggcgattcggataatgaagaaggtgaagaaggtgaagataatatcaggtctgcggaccgtctttcacacatctctcctgagtattcgggaggtaaggtctcttaaccttaacgatgatgtggttatgcctaatttggttaaattaaggtaaaacccccttggaggtttgactagggcagcggctttttttatggtcctgccctttttaatatagaacgtaaaaaatataacaatactagaaaagtcaatatccccccaacaaaagggttatatatcgaagcataagcttataactcaaattatcttcaccttcttcactttcttcacccgtctaaaaacgaaccctcccggagaggaggggagtaataagattcatcaaaatgatgttttggggtgtttcaccccatattattttcgttcgttttttcgacgccctgcgattcgttattcgtaccctcttcaaaaaatttttttgaaaataattttccccccgggttcctgggaactatacgccaccatgttaccgtcgtgtttaggttatggaattattgttttaaaaagaggaggcgaaaaccgcgactatctactcctctctctctggatttctacactgcgtttcccggcgatcctcaaaaaaatacggttttttccattacccggtaatggaaaaccattaaggtagtaatggtacagtaatgaaaatatcgtcacgataaagaccccccatccccggatagcgcctgttacgcgggggaggtaatctaataaaagagggagccgaagctcccgattattacggcgccttagccattcgcgttccttctgcggatggagtggatttcttcgcggctttcttcttaactttcttcacaggttttctggtccttttggatttcgtagtaagaattttaatacctgccttaactttcgtcaggcttttcgagatctctttgtcgaaaagctccttcagttcgggcatgttctctctcgcctgaaatagctgccttaactttttcagctcgcttacaagaccgtctacaaccgcggtcttacttctgggttttcctctcggcatgattgctcctttcgtttgtgatctagtataagaaggaaacccgaataggtcaagaaaaatgataggtttatgctttagacgactccgggcttccgcacgttgtagaagagataacgaaggaggcgggggatctatagaaaggggacgacttaaactctttattcgtaccgccgttgatgttaatgtttaaggctattaatcgtcgagtacggcagcgactcgcccgcattcttagtacgacagatggtgttgcgccgcctacgcgagaggattcggacgtccgaccttctgcctgataggagcgtttaggcttacgttatatgtttaccatagccggagttatcggaaacataaatctccggtgtgaactttaataagaagattattaacgtaaccgacgaaaaggggtgggtaagggatagggtggaccgtcttaggtcccaaagtattattatttattatatattcgggcttagaatcaaccctacgcacccccgcgtcgcgggtggtcgtgggttaggtgttttcccgaaaaggccgaggcaccaattaaaaacgcagttttggtaacggccggtcccgggaagcgacgactctacccccccccttactaaccacggcgctgactatattatgcgagtcgcaagggaggtagagtaatggctaggatgtacggaccttatagaaggggagttaatgttactgagttaccgaagaagttcgcggagtagattcttactccagaagaggaaagggaaccggcaacgatctccgaacgtcccgacgggttttatccctccggacgttccgcggggttctctaacaaaaaaaacgcgaatttattttccattacccggtaatggaaaaccattaaggtagtaatggaccagtaatgaaaatctcgttcttcaaaaaacggcggaatacgcacgtttttttaggaataccaataaaaaacctggttttgacggaaaataaagttcgttttatttttactacgcggctgtgcctataggtaggaaaagttttaatcaaggttatcgggtacaagaagtacaagagagaagatagaagtaggagggagtataaaaaaagagccgccctccaaaaggagaacggctcaggtttagggggggtcttatttagcggtagaggctcttgattcggcctagggaggtaggagctataccttgtgtattctcgaatgttagtcttatgttaagggcccaagggtaaagatctccacggtcgtatcgatactataaggtccataacgtatggtcttggttataattgcctgcatgaagaggtgtgctcttttttccgttaccgttatacgtaacatataatattaggttatagtttttgttgtagtcgtatctcatattcttacccaatagtatgtcataccacccgctttgggctggggtttcgtagggttcggcccatcttcctatttccttcttgcttcccgctagatagttattctcgaaatagcggtcaagtttatcgttcttagtcataccgatgtttatgatggtagggtagcttggttctcctccataaaggaaactacttgtgtccgatttgtaccattctaccttcgttattgttcctgtgtagttgattctacctctgcctgtcagcgacatgaatgttatcctgatgtttgaaatccaaggtacttcgatgggggttgatccgtagaatacctcgattggattagccaaaactaaggaagtggctaggagaattaataccgttatggttattaacttcttcattttcatcatctacttatattatagcacatttctgtctgataagcaggagcgcagagggtccccagcaccccccgcggggggtctgtagcggcacgttggccgcggcacaactgtaaaaggactttccgctgtatgacctgtcggcgccgcgccgccgcgaacgtcgccgcatcctcgccccctcgccgggattttatggcccgttctatttgctcccgtttcgggacggaccgtcggccgccggccgttcgaccgccgttttcttgtcaggataatatgtgacctttacctcgctgaaaccgtccacgtcaacggagtagtcgacgaccgttagctctcgagcaagttttatttcttcctcgtctccgtccgtgtacgtcaagtatacgaagccctcttcgccggccggtattacatgcctgatgactacaacgtcgcggcgctcgagttgagtttcggcgcgcgtctgacccctttccccgggcgcggttttagtgacgatttcgaccgctttcacttccctcgcggggatgctcgtaattgcttccttcgacatctctaggcctccttttaaataactcgcagttgtggggtgaggtccgactaccgggttaagcttaaaatacgcgccgccgatttacttttaatactcctcccgaacgccgtccggcgagatcatccaccatgtgcgagttctagatctagcttgtctaccgccgcgcgcaggtcgtcgccgaggagcttcaaatatctagccgtcgtgtttacgcttgtgtgacccagtagctctttcacgacgtagacgttgacgccggccctaagaagcgcggtcgcgcagttgtgtctgaactcgccgaagcggaactctacgccggtggccttcttggcccgctcgaactttctcttgaagtcgacgaggtgagagttattacggcccgggaagaggtaaccgtcgccgtgttcgtttttacgacgggacaggacgtcaaacacccagtcgttcagcggcaggtgcaacgtcagctcgccgctacgcttggaaacttgcaccgtaagcagtcgcttttcgccgtcgacgtcggcgccgcgtatcttcaagatgtcaccccgccggaggccggtaccgaacgcgaccgctgagaggtcgtacaacaaagggtcgtttgcgcggcagtagtcgaagtagctcttgagttcgtcttccccgaggatctttataggcttcctcttctcagggaaacttttaatgccctggcacgggttgccgtcgacgaggtcgcgtcgggcggcgaagttgaagaagtgtttcaagacggttaacgtccggttattggcgggggcgttgccgtttaaagcgcggtggctcataaagtcctcgacgagagggcatttaatatcgtggatgggtacgttcccggcgaagtctacgaaacgccttaaataggttcttttgagagatatcgttcgcgccgtattccgaacggtgcaataggagatgtacgacgctattacgtcgttcagcgttacgtcctcgccggtagatggggattttttgttggccatagcaagctcgatgcgaacataagcagtttcgttaggtttccgtctatcatcgggagggaccagggttgacggcgaatggtaccaagaagtggaaataccgaatacaaccgtttaaagcagccgcgctatgatcagggtagtctccgtagcggacgtcggggcttcacttaattaataccaatcgggcaacgagtaggacgaaggcgtcggctatcagccaggtcttcttcagcgagccgcggcgctcgccggcctcgagctcgttccagtaaacgtgcgagataccacaaaggtctgcagcttctccttgcgataggccgcgtaggttacgtaggtctacgaggttatttactgatacgcgaatttccataaattatacgctatacagaagttaaataaatacctgactcgcgtctccgcctatatatataacatatccgcaagggaaagtcaagcaaaaaacttaccgatatgtcgatttttattgaaggccttgcgtatatgtgatatatagggccgtggaattaggtaaacgaataaaagagcttcgagaaaaccaaggcttatcccaagataaattggcagaagctgtcggtacatctacgactactatatctcgtatagaatctgggaaacaagtaccgagcgctacgctggtagcaaagattgcagaacgtttttccgtctccgccgactacctcctcggccgcgcggtccacgccgaagacctccccgacgattaccgcgagctgttcgagcttgccgttgaagccgggtacgcggcggacctcaaagatttcttccgttggctcaacgcgaagaggaataagctcgtcgcggacgccgagaagttcccccgggagccggacgaagaactgctggcgctaatacccgattttacgccggaacagatcaaggaagtcctgtcgaaattcgagggggacgtcgtgcagcggatcgcaaagctcacgccggagcagacgaaggcgttcaacgaagaggtcgcgaagatcctctactacctcgacctcgaggccaaggtaaaaaagggtggagaactgacagaagctgacaggtaggttgggtataatataagggagttagtatccgtgggcgttaagcccgagctaattacgaagaattactaccgtctcgccggcggccgcgttccggtcaacctggagcgtctgtgtcgccggctaggctttgcgatcgtcgagtggcccgggccgcccgacttcacgtcgctgctatccgttccccaccgcatcgtcgtagtcaacagaaacatgcgctacgtgcggcgccggttctccgtcgcgcacgagctcggccactacgccctcgggcaggccggcgttcaattcttcggcgagtgcggccgtgccgaacgcgccgccaacaggtttgccgctagacttctcatgcctaagtcggtagtcgtctccttctggtcagatctcagccggggccgcgaacctttcaattggcgcgtcagattactcgcgcatcgcctcggcgtctcgcgggcggcggcgagggtaagattagggtagatgggcttaaacgaaaatacgaggaggtagcgaaatgggaggtaccaacgatatcgtcacggtcaacgcggaagcggtacgcgaggcattagagcatttgaagataatccgatctggagttagttcgataaggcagtgggttacttttttcggtataatcgcgattataggattcctaatagtcttactgcagttggtatgtagcgcggcgaagtaagggtttcaacaacttattcttttaacctctggaggtcgagcgctattaaaacgatctttattacaaccctcgcggccttggccttgtcgattcccgcggctggcgccgacgacgcgtacgccgagatccactgcaagcacttcttcaacgggtacccgacagggacgccggtaacgaacgacctcgtcatccgcgacgggtacgcgctatcgtcgaacgacgagacgaagtttgcagactgggtggcctgccggctggactgtgcgacggtgtgcggcgacgttccccagcagcggaaatggatgacggatccctggcttgacgaggacgagacgcttgaatcgaagcccgacgactacgcgggcgcgagcgacgccctcggcgtcgaccgcggccaccaggctcccctcgcttctttcaaaggcacgctctattggtatgaaacgaactattactccaacatcacgccgcagatgtcggacttgaaccaaggaccttgggttaagatcgaagacaaggaaccggacctcgcccgggccggcgacatcgtctacgtgatgaccgggccgctgtacgagcgcaacatgcccgggctaccgaacgccgacgaaccacacctagtgccctccggctactggaagatcgtcgccgtccaaccgagcgacgactacgactcgatacgcgtcgcccgctttcatcttcgatcaggagacgccgcgggacgcggccgtattggactacttagttaccgtcgacgacgtcgaggagcggagcggcctcgacttcctgtgggaactgtcgccggccgaacaggaccgaattgagagcggtacgttcgcggagtgggcggcggagaacttcgggtaataagaatctagtacctcgtcgacagttacaacgaccgcatccaatacttccgcgacacgacggcgggcgttttgccggcgtcgctcgggaaagtgaaggcggtgtttaggtaaattctgcatcaagcccgtcgcatctcaggtgagacagtatgggtaagattggcgcggagcgtacggcggccgcttcgacgcggccgaattagagtcataaacgggaagaggaaatcatgaaaaacgggaactacaatttaattgacgaacaatggattcccgttcttatgcgcgacggcgaattccggcgcgtcggtattttgaaagcgctcacgcaagccgagcagatccgggatatcgcggccagcaaccctatggaccgtttcgcggtcttaaggttattgctggcgttgctttattggtgcagggggaatccaccgaggcatcccgccgaagatattggggacgctttcccggcgggatatttttctaaaattaccgataacaaagaagcgttcaatttgctgggagacggtccgcggttctaccagttcggggttaaaagcgcgaaaacacctacaacgcctaactacctgatccacgaaatccccacggccacttacatcgctcatttcgtccacgcccgcgacggcgttgacggattatgcccggcgtgttgcgcgatggggttagcgcgactgccggcattcgccacccaacaggggcaggggaagggaccgggtatcaacggcaaacctcccatatacatcgtcccaatggggccgtcgctggcggcaacgctacggctttgttggcagccgcacccgaacctgggtgttccgtcatgggagaacgcggaattgcgattgcttaaaaacggcaaggttcctttactcaccgggttaacctggataccacgaacggtttggttagacgatcccaacgaaccggtagaaccttgtattatgtgtgggcgcgttacgcgtttaatacggcggagtgttttcgcccgaagggtaagcgtcgagttgcggaaatgggatcctttcgtagtttatggcaatgatgacgacgacgtacgcccgttgcgggctgttgaccccatagcttctaaaaccttccccctttccgttactcgcgagtggaccaaagtcctcaggggtgttctccaacgctatgcgccattattaaacgtaggggaatcgaagatatgggttatatcgttttcgactgaccaggccaaatactttgaggcgattgattacgaattcggtttccctcagacctcttccgatttagtagaaatagacgaccagtgcgaccggtggcgtaaatggcgaccaagagcccctcgaacgcccgaagccgcattttttaatatcgtccctcacgccgagaaccggatcgccgcccgggccgccgagttgcttgcgggagacgaagcttgggcgcaggcagcggacgaatataggcctttaatgaagtccatcgccagcgccttttcgccaggcgtcacgaccagggcgttgcggcagcggcggcggatttctaaggtagcgcccgccgccgcccttcgatcgcaaacaacggaaaaaaagcggcgcgagagagaggcggataaatgacggcaacgggacaatacatcggggccctcgcgcgattaaaaccaggtgacctcggtttactgcggatccacgccggccaaggactcgacgaaacggtgaacgggttcgacttgttcacgggtttatggtggccgattagacaaacgagtcccaaagcgccgcgacgcggcgtagcctggttggtggcgaagctgtacgcgttccggccgttggaatacgcctccggctacacccttgcgcgcgggttacggcgatgccggcctcgcgacgaaaaggcccggttgaggttcgaccaacggttcgaccaattattaacgttgccggtcggcggcgtcgagcccacgttacgttgggcgttggacgagctggccgaagggaactacgagctagattgggttcggctgaccgacgacctttctaaatgggaacgagaacccacgcgcctcgcgtgggcggaggaatatttacgaacggctaccgacggaggataaaatgttaatcgaaatccacatggtccaaaatcacgccgcggcgaacctcaaccgcgacgacctgggggcgcctaaaacctgctggttcggcggtgtcctgcgctcgcgaatatccagccaatgccttaagcggagtatccgcatgagcgacgggttcgcgaacctgcgcggcggcgttcggacccgacgtcttgcccagttgatcgctgaacaggctccgggcgtaaaagacgcgcgaaagcgcgccgagaagatcctcgacctatgcggtttcaaagccaagaaaaataaagcaacggaagcggaggaaggagccggcccgagttcggatacgagtaaaatgctcgtttatacgagccgcgaagcgattcgggaaatggcggcacttctgcaagacacgaaacgcaaggacgcggatatagccgccgctttcgccgagttgatagctaagaaaacagccgtcccggacatggcgctcactgggcgtatgctggaaccggataaagcggccaaggacatatggaaaacccgcgaaacgacggtcgaagccgcgctccaagtcgcccacgcgatttctacccacgaagcccggcccgaggtggattactatgtagcggcggacgatgtgccgggcgacgacgccggcgccgcgttcatcgaagaggccatgttcgcgtcggcttgcttctacaaatatttttccgttaattgggagcagttaacaaaaaacctgcggggctacggcgaacgacaccaggagttagcggcctacaccgtcggctcactcgtgcgcgccgcggctctcgtaacgccgaccggcaagcagaacagcttcgcggcccacaaccctcccgatggaatcctcgtagaagttaaagaaaacaatattcccctcagttacgccaacgctttcgcgaaaccggcggtcgcgggcgagcgggatattatcgcgcaaagtatcgcccaactcggccaatacgtccatgacttggacgccggatacggagagccgcgtttccgcgtttggttctctccgaacctccgttatccgctagccttcgtcgacggcgaccgggaagtccccttgctggagaacaacgtcaaatcgctggacgaactagtctcgggcgtcgtcaaagcggtcgggcacgattgggagaacgtccgggaggtcatcgcggccgccggagtggagcgatgaacgcgaatacgctattcttacggctcgaagggccgctgcaagcctggggcgaccaccgctctaagttcgtcgtccgtcggaccggcgatgtcccgaccaagtccggcgtcttcgggatggtgtgcgccgcgctgggcgtttcccgtcgggaagccgcggcggaatggctcccgcgattaaggccgctcgcgatgggagtccgcgtagacgtcccgggagtccgctggtgggactaccataccgccggcgcggggtacggcttgatgaccgccggcggaaatatcaaaataacggcctcgaccggcgaattcgaaacgctcgtgagccgtcgcgaatacctctgcgacgcgtctttcctcgtcgccctccggggcgaaccggctttaatcgcggaaatcgccgcggccgtcgaaaaaccgcgatggactttttacctgggacgcaggtcttgcccgccgtcgcggcctatattcgaaaacccgccgggcgcgttccccgatttaatttcggcgctttcggccgttccttggcgggcgcggtataatgaagatgcgaaaaccgcgccgaatgtggtaacgtgctttgtcgagtgggttcggggtatacacggagacgaggcccctggcgacgcgattatttattacgacgtacccgcaactttcgcgccgccgtcgcacgatgccaggctcgtcgtccgcaaggaattacgggtcggcccgggcgccgacgtcgagatcgccgaaaaacccgcccagcgcgacacgccgcggccgccccgcccgagagccaattataacaatacccaatatcgcgaagcgcgcgccgctcgcctcgacgccgaccacggcctctgcgtcttttgtaaatctcccgccactaccgtgcaacacgttacgtaccggcgagccggcggaaacgaatcccaggaggacttgcgctcgctgtgtcggctatgccatgacgcggtgaccatgctggaatacggcctgggtatggggctcgaccgcatcaacccggaagaccctcgttggcgcgaccagatcatccgcaaacggcgagagataatcgctttccgctcgctcgagacacgccgccggcgcctcgccgcggaggaggtggaatagcgtgtacctctcattccttcttattgacgttggcacaaacccggaccggccccggcccgggcggatttggttgcgaaataggtaccgcgttcaccagcgcctttgcatggcgttcccgtcggcgaccagggctgcgggagacccgcagttcctcaagccgtttaagccggatgatttcgcggctcagcaagtccacgtcgcgcgtaaggccgacgccgggttcctgtttcgcgtcgacccgcaactcggcggccgcgtcgtaatcctcgtgcagtcggcgttaaaaccggattgggactacgcctttcataacgccgggtaccttctggcggctccgccggaggcgaagcctttcgaccccgacgtcgcgaagggacaaaaactccggttccgcctcgtcgcgaacccgacgcgtaagatcgatacgaagagcgggccggacggacgccggcgcaacggcaagcgcgtgccggttaactatgacgaactcggggaatggctaacccgccgggccgagcgagggggtttctccgttgacgaagattcactcgccgttcaacccggctacgtctacgtgaacaagaaacggaacggcgacggccaacg

SEQ ID NO: 590 - DNA, 13709 bp, Artificial Sequence
  Synthetic Oligonucleotide
gagtgagggtgggcggaacaaaaataagatcagttttcactaaaatatatggcaattttcatcagcccgcccccaccctcactcgcccggagagggaggttatggagatcgcaggtagagccggcatcctgccggctctacggcgaaagcagtatatcctgaagtcttgtacccttatgtcgcactggaggtcaacggtaaaatcagccatcttgcagctcctttttattgacttcactggcgaatattattaaaattagcattctacaaataaaaaattagcatgctcatcctttttatcctgtccatcctgtccatccatgttaattttattttattagccaaaggacgaatgaatggaaaaaaccaaattgaaacagcatgtcattaaccgtgactggtgcaagggctgcggaatttgcgtggaattctgccccaaaaaggttcttgatctggacgaccgggaaaaagcggttgcggctcgccccgaagactgtatctgctgtagactctgcgaactcaggtgtccggatctggccatcgaaattcttaccgaaaaatagggcgaaaccatgagcaagaccatcaaatttattcaaggcaacgaggtgtgtgtggaagccgccctctatgcggggctgaatttttttgccggatatcccatcaccccttccacggaaatcgccgagcttctatcctcccggttgccgcagatcggcggcaggtttattcagatggaagatgagattgcctccatctgcgccattatcggcgcatcccttaccggcagcaaggtcatgaccgcaaccagcggccccggcttttccctgatgcaggaagcgcttggctacgccataatggcggagatcccatcggtgatagtaaacgtgcagcgcgggggcccatcaaccgggcttcccacccatgtcagccagggggatgtgaatcaggccaggtggggcgcacacggggaccatgccatcataacactgaccgcatccaaccatcaggacgtattcgccatgaccgtggatgcctttaacctggccgaaacctaccgcacgccggtcattctgctcttcgatgaagtcgtgggacacatgcgcgagcgggtggtgattccggaaaaaggcgaacatgcactggtggagcggcttcgaacggccgtaaagagcggcgtggattatcacccttaccttccccgcgaggacggcaggctgcccatgtcggattttggaggggttcaccgttacaatgtgacgggacttgcgcatgacatgtggggctttccatcggacaatccccaggtggttcacgggctgatgaggcatctgatcgacaagattcaaagcaatgccgccgagatcgccagaacacatgagtattacctggaggatgcggactgcattcttatttcttacgggtcttcggccagatccagccttcatgtggtggagaaccgcagaaaacgcggagaacggataggtcttctggagcttcagaccctgtggccctttcccgatcacatcgtccgcgaaaggtgccgacgagcccagacgatcgtggtggtggaaatgaatatggggcaggtgcttcagcaggtcaagcttgccgtggaccgcccggaacgggtgtttctggctaaccggatggacggcgtctttattaatcccacagacatccgaaacatcctgcggcttatacagggaaggggaatttaatgccgatcaaagagtacatacgggagagattcttcccccacatgtggtgtccgggttgcggacacggcgtggtgctgaacgccatgctgagggccatcgaaaatctggggctcaacaagaatgatatcgtcatggtctccggcatcgggtgttcatcccgaatctccggatatgttgactttcacacccttcacacggtacacggacgagcgcttgcctttgccacaggtgtcaagatgagccggccggaacttcacctgattgttcccatgggagatggggatgcgctggccataggcggcaaccattttattcacgctgcacggcgcaacatcgacatgacggctgttgtaatgaacaatcggatatacggaatgaccggcggtcagtattcgccgctttccggatatggcatctccgcaacaactgctccctacggcaacattgatcagggttttgacatcgtggagctggcaaaggccgccggcgctactttcgtggcgcgcaccaccacctatcatgttcaacagactgccgatattcttcgggaggccatcctgcacaaaggcttttcggttgtggaagttatgtcccagtgcccaacgtatttcggcagaaagaacaaggaaagcggggcagtggagatgatgaagcggatgaaggagatgacgacacccatcggctcaaaagccaaagaggcgcatccggagctgattgagcgaggtgtttttgttcgaaaggagctgccggagtactgcagcgaatacgataaaatcatcgaacgcgcacagaaagatgtaatgaggaaagggctttaacaatggaaagatgcagaatggttttttctggctccgggggacagggcgtgattactgctgccattatccttgccgaagctgctgtgctgtatgaagacctgattgctgtacagtcccagtcctacgggccggaggccagaggcggctccacccgcacggatgtaatcatcgcagattcgcaaatctattttcccaaggtcacccagcccaatgttctggtctgcctgacccaggaggcttacaacaagttctatcccatcattcgccctggcggcacgctgatcacggattcccgctttgtgaagaccgagctgaaggtggatgcccggcagattgagcttggcatgtatcagtcggtgatggatgcaatcggaaagcccattgtctttaatatctgcatgttgggagctgtgatagccatcactggtctggtcagacccgaatccgtcattcgtgtgctggaaacccgcattcaccccagttttctggagatgaaccgaaaggctctggatattggaatcaaaatcgctcaggatatcgataccccatcatgaaattaccaccggtgagattggtcattaactcatcgtaagaggttaaaacaaaatatgacagacagacttgacattattgaggatcacctgcttaatcgtaaactcgttggagtgtgggagatggtcagtgatgattctcccacgactgccgatgggtacgccctcagtttggaaggatatttccttgagatagagacaatgttagatttttccgctgtaagtattgggtgcggacattcccggactgactttcccctggatgcagaatcaggctatttctaccatgaggtatctcatgatacgccctactcgcagttcataggtaagcggctctcaaaatggcgtttgctggtgggcgaagggggcaattgggatggattgatggtaagctttggcacatccacagggctctgttttatctcagtggattgctcaatctcagttctgacgttgaatggaatccaatgttaggtagtactaagcaatggcgtgaaacatgaattagggtagcggtagttgactcattatctgttcgactgtgtacggacaggtttcagggaatgcggactctggcagtttcctgcacgccgatccggttgataatcccatttcaacaggtgcatcaataacactgccatcctgcttaataattcccgcttctggcttttccccattgacgacaggatacgcaagataaagaagaatacctcctattctgtattttccattatcctgtctatcgttgaacggattgatgacgaattttgaagaagcatctgattatccagccatcaacccggatattttccctttgcaatacaaaggcctgagaaaaaacaatgaatatgaaatcagacaattataatctgcttgaagaaaaatggattcctgttctgcgctcaaacgggaagtttgaccatgttggcatatacaccgcattaaatgaggcagatagaatccgttgtatagcagccggcaatcccatggatcgcatggcaattttgcgattcctgctggccctgctgtattggtgcatgggaaatccgccagacaaaatggacaaacaattctgtgaaggttttcctgccgactggttgtccaaactcttcgataaaaaggactgctttaacctgctaagccaggaaaagcggttctttcagtaccagaaactcaatgacaagaagcttacctccaattatctcatccacgagattcccacaggaacaaatctgtggcattttcgacattcgaccgatgcagtaaatggattgtgtcctgcctgttgcgccatggggcttttacgcctgccattgttttcaacatctggaggaaggggaaaaccgcccggtattaatgccaaacctccaatctatgtcttacccttcggaaagtcactggcggaaacccttcggctctcatggagcgcaaatccaaatttaggtgaaccagcgtgggttcgacccgatctcaaactaccggtaagcggacaagttcctctcctgacaggattgacgtggttgcctcggcgcgtttggttgagcgatccggaaacctctgaggcgcattgtatttcctgcggccgcatggaacggctgatcttatcctgtgtgtttgaagggctcgggagcaccaaaacggatgatggcgccccaactcggatgtggaaggatccgcatgtcatttatgaaccaaacagcaaaggagatatgctgtctcttcataacagtagcgttttagatgcagcggatgcagcagccaatcagtgggccagaattaccgcaggcgtgattcgcagatcggaacccgataaacacaaatgggtatggatcattggtttttctactgttaagaatgataaatatcttgaggcaatcgagtttctggtgcctctgtcaggtttggagcagcatcaagaatccattgaaagactggaacgatggcaagatcaatgcaaaaaactttcaaatcgtttggttcatgtgttcatgtcttcgggtgaaaaatcgtcttcccggaaacataacgaattgttatcaattctaaatacgattcgaccgcaggttgaaaccgtggtatttaatatggcacccgatctggttaccggatgtgatgaagcttggcaattggcagcaaagaaatatcaacagatgatcaaaatggcagtgcattcactcgtaccgggttttacaacagcatcgattcaaaagcgcaagcagatcgagaatgtgtttccggacatgactataagtgaaaaacttctatccgatcggaaaaaaggaggcaaaaattgaccgccacagaacaattcattgatgttttgaaaacgttaaaggcgggggatcgaaagctgttacgtactcatgctggactgggtctcgatcaatcggtacaggggttcgatttgttcgccggaatttggtggccactgcgacaaaatagctccaaagcgccccgccgtgaggtggcatggttggttgcaaaaatttttgcttcttatccgattccgcatttcccgaatgaaacacttgcgagtcaattaaaaaaacgccaaccaacccaaacccaagacagtaatcgttttgctcaaagattcgacaggatgttggttcttccgcttaataaaatcgaatcggcgctgcaatgggcgctgaagtgcatagcagagttgaaatatcccaaacttgattgggtgagactgacatacgatctgtccatttgggaaagagacgccactcggctcaaatgggcaaaccaatttttgcaattaacaaaaggagacagtgatgttaatcgagattcacacgattcaaaaccatagcccatccaacttgaaccgggatgatttgggggctcccaaaacctgttatttcggaggagtattgcgctcgcgcatctccagccagtgcattaagcgaagcatccgtatgagtgacgaattcttgttgttgcgtggcgggatccgcacccggaaactggcggatgagattgccaaggcaagcaaagccggagcggataataggaaacgagctgcaaaaattcttggttgctgtggtatcaaatccaaggagaagaaggataaggatgatgataaaagcgatatgttggtttatacctcccgtgaggctatacaggaaatggcgaatctcttggataacgacgaaggtaaaaccgacgatcaacaactggcgttagcttttggcacgcttattagtgaaaaaacatccgttcctgatatggcgctcagcggaagaatgttagagacaggcattcttaaaaacaccacagtagaggcttcccttcaggtggctcacgccatatcaacacacgaggcccgctcggaagtagattattatgttgccgcagacgacatacctggcgatgatgcaggtgctggctaccttgatgaatctttgtttgtatcatcttgtttttacaaatatttttcgattcactgggaaacattggtccaaaacctggagggaaatatggaccttgccgcacacactgtaggggcctttatgcgtgctgctgctctggttacaccaacaggcaaacaaaacagtttcgccgcccacaatccccccgatgggatacttgtgcaaatccaggatagaaacatcccaatcagctacgctaacgccttcgctaaaccagttgatgtcaatgatagagatatcgtctcgcagagcattgcacagcttgggcaatacatacatgaccttgacatcggcttcggcaaacctcaaaaaagattctggttttcaccaaatcttcgttttccacttaacgccatgaaagaagataaggaatttgcactttccgaacaaaatataatgtcccttgaaggtctgattaccagcgtaatgaaagaggtcggatacgactggagcgatgttcagaaaagcattgtaaatcctgaggtaccgtcatgagtgttaacaccctctttctccgtttggaaggaccattgcaatcgtggggtacggagcagtcgaaatttgtgataagaaggacaagcgaagcccctacgaaatcaggaataattggaatgtgttgtgcagcgctcggcatttcacggcaggaggctgcaaacggttggcttcaaaaactgagtgagcttcgtatggcagtccggattgatgtgccgggggtccgatggtgggattatcatacggttggagcaggcatgatgatgcgcaccagtgaaaaccgaagcaagacaaagccaggccccctggttacccgacgcgaatatctctgtgatgcaagttttctggttatccttcagggtgagcatagtttggtcgccgaattggagattgcagtcaacaatcccaggtggccaatttacctgggcagaaaatgttgtactctatctcgtccactgctggtgcatccggcaggcgattttccgaatttggtttcagcactgaagtccataccctggcaaccaagacttgccggtgatccgatgccgcaaacagttgattgtcttatcgactgggaaccgacaatcgatcaaccagagccgccagacgatgcgctcattttctacgatgtgccgctgacattcgatcctccatcgcattgtcctcgttttgtcatcagagagtctttgatagtggggaaaaaccgggaaattggcattgcagaaaagccggcgcagaataaaacgccacgaccgtcacaaccacgggcagactacagaaatacggaataccgccatgctcgcataaaacgtcttgatgctgaccaccatctgtgcatactttgtaaatccccggccacgaccgtccagcatatcacctaccgcagggccggagggaatgaaaccccggatgacctccgttccctgtgtcggctttgtcatgatgcagtgacgatgattgaatatggcgcaggcatgggattggaccgcatcaatccggaagaaaaaaagtggcgggaacaaatcattgagaagcgaagcgaaattattcgttttcggtcaatagaaacccgacggcggcatctttccaaccaggaggtctaatgtacttatcaacgcttttgatcaacgctggcgatcatcccgaccgaccacgccctggaaggtcatggttgcggaatgtttacagggttcatcagcggctgtgcatggcatttccctccggggagcgaaaacaggctgatgaggattttctcaagccctataaaccggaggattttggatatcatcaagttcatgtaccacgaataaaggatgccggattcctgtttcgtatcgatcccattccgggaggcagggccatcattctggtgcagtctgcagtggaacccgactgggattttgcattccataatgctatgtttctgctgtctgcaccgcccgatataaagccttttgatcctcaattttcaattgggcaaaaactactgtttcggctgacagcaaatccaactaaaaaaatagacacaaaaagtgggcctgatggaaaaaagcgtaacggaagacgagttccggtaaggccagaaaactttttggaatggctggttcaaaagagcattcggtcgggattctctattatgagtgataatattatcattcagacatcctatatcttttttcacaaaccgaatacacaacaggaaaattatttgagtgaaatatcacctgggaaaggcgattatcaagcccgcctgcgattggtccgttatgatggagttctcacaattgatgacattaacctttttcatttagctattgaacgtggcatagggtcaggcaaagcctttggttttggccttctttcgttagcacaaatgcagtgtggaacgctatgaaaatcaaggacctacacattcttccgaagtttcgtgatggtttgagttatctctacgtggaacactgtcgaattgatcaagaatctttggctatcgccatccatgacgcgcgcggaaaagtacctgttccctgtgcgaccctggctctcttgatgctcggtcccggtgtttcaataactcacgccgcaatatctgttcttgctgatcatggttgccttgtggtctggtgcggggaacagggcgttcgtttctatgcagtgggcatgggagagacgcgcagttcagctaacctgttgcaccaggcgaagatgtgggcggatgataattgtcgcatacaagtgatacgtcgtctttatcagttacgatttcccgaaaaattggatacatccctgacccttcagcaaattcgcggaatggaaggattacgggttcgctcggcttattccagagcagccaaggagtccggtgtctcctggaccggtcgcagctacaaatccaacgaatggaacagtgcagaccccgttaacagagctttgtcaactgctaattcctgtctttatggcatctgccacgcggcagtggtgtcagcaggcttttcgccggcgctggggttcattcatacggggaaaatgttgtcattcgtttatgatgttgctgatctttataaaaacgagattacgatcccaattgcatttcgtgttgttgctgaatccaaagatgttctggaaaaacgtgtacgggtggcctgcagggatatgttcgtttctatccgcctgctgaaacgaatcattccggatatccagatggctttggggctttcaacgcagaaaacagcagatgataatgaaccattcgaccgggatgctaccgcaccaggttctttgtgggatccggagttaggcacggtggaaggcgggcgctcgcatcctctggaaatggatcaaatgactgaaagggaagatgatggtagttttcatccttgaaaatgtgccactgaggttaagaggagaattatctcgctggttcctcgaaccaaaggcaggtgtttttgtggggaatgtttcggcaatggtaagggagaagatttgggaaatggtttgcaaacaagtaaaggaaggcggttgcttgatgatctatcgcagtgataatgaacagggatatcaaattcttagttctggtcaaacattgagagcaattgaagacttcgaaggattattgcttattcgggtaccacagatttaatattttttcagtattgtccccacgcacgtgggggtgaaccgataatggaagcaactcaggaaagaatgatttaattgtccccacgcacgtgggggtgaaccgcctcggcagatgacgttatcgcagcagggttgattgtccccacgcacgtgggggtgaaccagcagcgacatcatcttcagcaaccccatcaaaattgtccccacgcacgtgggggtgaaccgccgtatcatgttcgtatcaatatcgagcatcgattgtccccacgcacgtgggggtgaaccggtcatcgtcatgtcgattatgaagtgccttgcattgtccccacgcacgtgggggtgaaccggagttaatgctgatttgtcagcgggaattcccattgtccccacgcacgtgggggtgaaccgaatcttcgccgcaatcacggatgatgatttccattgtccccacgcacgtgggggtgaaccggaaggataaaaatggcaaatccaacactgtacattgtccccacgcacgtgggggtgaaccgtgcgggttgatgctaccaggcacccaagcagtattgtccccacgcacgtgggggtgaaccggagctgggttatggagaccaaggtgttagtagattgtccccacgcacgtgggggtgaaccgcgcctatcgtctgcaaaaaagacggcgataatattgtccccacgcacgtgggggtgaaccggaattgaaaataatttgataccttttccgtttattgtccccacgcacgtgggggtgaaccgcaatctttaatttgttggtgaaaacatcaagcacagatcaagtgaaaaatatcccatcgaaagaagcgcgaattaaaatactatgctctgcttttaaggtaaatgatgtattggctgatggtaaatataatgtgttaattgtggatgacctgtgtgacacagggtcatcacttgaagcggctacagtcatgttaaaacagtacacaaaaatcaataagatttttgtagtcgcagtaacgaggaaaaactcatgaaaaatgtttttgtatctggctcaatcaatataaaaaaactcgattctaaagttatcgaacggttaaaaaatattatctcatcgaacttaagagtcattgttggggatgcaagtggtgttgatagctctattcaagaatacttaaaatcaaatgaagtccgttccgttgttgtttattgctcaggagataagcctagaaacaatatagggcattgggacaccaaaaaggttgatacttcctataagcctggaactcgacagtttttcacagttaaagacaaagcaatggctgcggactgtgattatggctttatgatttgggatggcagtagcacgggtactctgagtaatgcaattgaacttgtcgaaagaaataaaatagcggtagtgtatgtaagcaaaactaaacaattttttaatataaaaaacgttcaagacatcgaaaaactaatcaaatttatgagcgagacatcgcttgaaaaagcagacaataaaattggtttattcaaaaaaattgaaaccataaagtctatccaacatgacatattcgatattcagcctatcgaagccaacacgcagatcaaacagccaaatctaacgcaacactccataggaacttcgccatcgctcaagcgctgaactttgcgttatgctgattcccctcctatttccatgtcatggatgattactgacatcagccaattcgaaggcacttgctaatcgatgtgctgtccggaaaaatacgccagcaaatgctggaacctgcaatccgtcttcttcgaggaggatcacttcgtaaatgatgtctatttgtttttcacaaccactgatcgccggttccttaaattggaatcccagaacctgagccgtttgcgcgaaatgataggctatgcgcacacagcgctggaacaacacgatacaattgcaatacatggcatttaataatccgcaccaacagcgttgcaactgcattcttgacattgttgatttcacatcatgaagctgaactacagaagaccacttctttttcaccaaaacgatcgctccaattatcgatagttgttgggatttcatctttgtattgtgggtcgttggaaaaatatttgactgtattaccgtcaatcacagcggcataaatcattctgttaggacaatgcattattatagcttccataggcatccgtgaaagaacataaattcaccatcggcagatctcgcaagtgcgacattgtgttggcagacgataccgtcagccgtcatcatgctgaactcatttttttgcataatggccacctgcatatgccatgcgggaaacggatcggctgagtgtgacggcgcacacaggcaaggatcgggagaactttcagtttggattacaggcatttctggaagaagctcggaccgttgccaagttggtgcatccgaatattgttcgggtgaaaacatatctggagcagaaccatacggcctatctggtgatggagtattacgaaggattgtccgtggctgaatatgttaggcaacaaggcggtcgaatacccgaaaaatcagcagtggggatcatgcaattcgtcctggatggcctgcgccatgtgcatgagaatgggtatctgcatcgggatgtgaaaccagcgaacatttatatgacgaagcgtggtcaggttattttgcggattttggggctgcacggtgtgcgctcggggaacacagccgaagtctgtccgtggttgtgtcgtctggatattcgccatttgagcagtatcgcagcaacggaaaacaggggccgtggacggatgtctatgcatgcggggcgacattgtactatctggtgacgggacaaaccccaccaacagcggtggatcgtacagacgaggatgacccagcgctactgattccgcctttgcagttatctccagggttatcgcctcaagttggtcaggcgatacagaaagcgctgacaataaaagccagtgatcgcctccagaatacgaccgaatttctgaagatgctgacaggtgtaacgcagtccccggtgccaggcttcactcctcaaccgatgcctgcaccagcgtccagtccgaaaccaatgccagtgccaagtccaaaaccggcttcaacaccaaaacccgccgacacatgaacagaaccggcaacagggatggtatttgtgtgggtgactggggggtgttatcagatggggtgcggggattgggatggtgatggatgctatgatgaaaagccggtgcataaagtgtgtgttgatggattttggatgggccagacggtggtgacacagggtcagtggcatcgggtgatgggaaacaatccctcaaaatttaaaaaagagaatgattatccggtggagaacgtatcctggaatgatacgcaggaatatattcggaagctgaacggaatggggattggaaactttcggttaccgagcgaggcggaatgggaatatgcggcgcgtagtggcgggaaggccgaaaagtattctggcggcggtgatgtgaacagtgtggcgt

SEQ ID NO: 591 - DNA, 13685 bp, Artificial Sequence
  Synthetic Oligonucleotide
cggcgctacggactgccgccgtggacgctggtggtctcgctggtcggctgggcgcgacagccggaggccaaggtcgcctatcaggagaaggacctgcgcgcgctggcggcccggctcggcttcgaggtgaagagcaccattgccggggttgccggcctcgaccgcctcgttgccgaagagctggtcatgccctggcgcatgcagaagaagttcggcttcagaggttcctgccatgagctcaagttctatgccaccggcgataaccttccgaaggtgcagtcggcgctggagaccgtctgtgtccgtcataactattctaccgccgatattggcgcctacattcagccggtggagcgggcgcggtcgttctcctgctgttacgacctccacagctttcccggccgccccgacgattgggaaaacgtcaggacgatattcgttgaggccagcgaggccatgattgaggcgggagccttcttcgaccggccctacggcgtctgggcggacatgatgtaccgccgcaatgccgcctacaccgaatacctgaagaaaatcaagaaggagcttgacccgaacgggattatgaatcccgggaaattatgcttctaggacatcctcaccccggccctctccccccgaagggagagggaggaggactgacatgataaaagaccttaaagagtaccgacgctgggcgtggaactgctaccgcgactcgatgtgcaagcacgtcttcagctggcacctcaggaatgcggctttcgacgacatctgcccgccgctggcccgctacaggtacgactgctactccggccagggcaagatgggcgacctcgcccgcgccctgatcgaaggtgagatggagtggacgccgaagctgcttgaagtcatctacaacgacccggtctgcggcgcctgcagttacaactgcggccgcatcaccgaaatgcagccgggcgatgtcatccaggcgatgcgggccgatgccctgcggcaggggcaccgaccgccgggcggcttcggcgaattactcacggtaatgcggcagtacatgaacccctaccggaaagccgacagccagcggaacgattggattaaaggcatcgaccccgggctggcccgaggcctttccgccgccggtaccgcaacaaagaccctgctctataccggctgttttcccctccgcgacgccgccggcgaaaagatggcgcaggacgcggctacggtactgctcagggccgggctcgatgtcggcatcctcggcgaccgggagcgctgctgcggcaacccgtcgctgcgtctcggcgacgtggacaactttgtggcctttgccagagaaaacatcaggcagttcaacgccatgggcgtggagacgctggtaacggtgtgcccgttctgttacagtaccttcgtccgcgactatgccggtgtggccgggatgaatttcagggttgtccatatcctgccgctggtcctcgacctgctcaagcagggccggctcaagccggtcaggccgctcgacatgaccgtcacctggcacgacccctgccatctggtgaggcttggcggcgccggcatcagcggcaccgacgactttcagggcatttacagggagccgcgcgaaatcgtgggcgcaataccgggcatgaagctggtggagatgtaccgcatcaagcacgatgcctggtgctgcggggccggttcctggcagagaaacggcgaccccgaaatggccctgtggacggcttccgaacggtgccgcgaggcggaagcggtcggcgccggtgccatcgtcacctactgcccccactgcgaggaaaaccttaccgaagccgcctcaaagcgccggtccggtctcaaagtacacgacctgctgtccctgctgttgcagtcggtccagtaatgtattagatttgatgggtccggtaaccggactgcgcaatgttagaaaatcaggaactcgtctttaaggtcctgataatcaccgaattcaccgttttctcggtaatcaggataatctaccagcagtcgagcatgaaagccggccgccgcaccgtgattgccgagagccgccggtatgccgtttatctggcgctattcatctgctacgaggtgttcaccttttttgcttacatcttccggccgcagggcttcagctgggcgcagatcgccctgcccttatggctccgctggtcaggagctgtcctcggactgctttcgctgctcctgtttatctgggtgcacccctcactgggactgaacctctcggccacactgaaaatcaaagaggaccatgtgctggtggtaaacggaccgtaccgctggatacggcatccgatgtatacggccttctttctcctccatatcggggtgcttctcatgaccgccaactggtttatcgggggcacctggatgctcgggctggtagcgattatcgccctgagggtcaggcgcgaggaaaagatgcttctgtcgcagttcggtcatgattacctggcctacatggagcagacgccccgctttatcccgaagtttatcgcccgttcgtccctgaagttgcggacgtaggtcagaaggcacccgcatcagttgaccggccccggcgtaacgtagcagtccggtctaatggtaccggccgggtttggtgtacaattgggtgcgcttgacgataaaatgcggtcacaataaggtaaggagtgactcccatggtaatggtcaacggcaaatgtctgcccaaagatgactggcatcgcaagtattactgggacctccgtaagaatgcctggaactgttcccggtgttccaactgcaaatgggtggactcctgggaggtcaagagctggcgctttgccagaatctgtccttcaagccagtactacctgtacgatgccttctcctgccaggggcggatggacgtatcgctggccctgattgacgggcggctcaagtacgaggactccccgatgctcctcgatatcttctatcggtgcaatttctgcggcggttgtgatgccatgtgcaagcgcgtgcaggacatggagccgctgcgggttattcaggagatgaggctgaagctggtgggagatggccagctccatccggcgctgacgccggttatcgacaacctgcgcaaagaagataacctggtgatgaagcccagatcggaaaggggcagatgggcggaggggctcgggctaaaggacctgacgcgggaaagggcggaggtggttttccacgccggttgccgggcgagctttgatccggcgctctggccttcgttacgggccgcggtgcaggtgatgcgccgggcggggctggatatcggcattatgggcggggatgaggtctgctgcggcggccgggcctacgaaatgggttataagggggagcttgccaagtacgccgagcataatattcagacctggaagaacgccggtgtcaggaccgtggtgaccgcgtgctccgatggctattatgctttcaagcggctgtaccccgagtacggtttgaatcttgaggtcctgcacattgtggagttcatagatggcgctctgaaggatggccgtcttaagcctgtccggaatgtgccgattacggttacctatcacgacccctgtcatatcggccggcgtctgcccgtgtatgtgccgggagagccgattatggggctgtatgaagagccgcggaatatcatcaggagcattcccggtgtcaggctggttgaaatggagcgcataaaagagtatgcctggtgttgcggtgccggcggcggggtatacgaagcctatccggacttcaacaggttttctgcgttagagagggtagaagaggcggaatcgaccggcgccggggcactggtaacggcctgtccctggtgtgagcggaacttcattgatgccttatccggccggagctcccgtcttgaggtgcttgacctggtgcaactggtgaataactcgctgtaggcctgtaagggagtgatatgccatcgggcgacgagaaacacaatctaatatacaggagtctttcggatatactcggtcggcagtgggtgtgtgatgacccgtatgtcgttgaggcctacagccgtgagtctcaggcgccgagcgtggccacgcgcggacgggcagagttcattgtcatgccgggcagcacgcaggatatacaggcaattgtccgcctggcaaatcggcttgggtatccctactctgtaatcgggtccggtttggccttcggcaccaccgccgccgtcaaaccgtactgggtgcttatcgataccaagcggatggaccggctgacgattgaccggcgcaatatgttcgccatcgttgagccgtacgtcacccacgcgcaggtatcggccgaggcgatgaaatggggcctggtcaacggagtcccggaggccggggcgcagtcctgcagtctcgccaaccacgtggcgtttggtatgcagggcacggcttacaggagcgggttttcttccaggaacatactcggggttgagtgggtgcttcccagcggcgatattctgcggacgggctcgttaagtgttgaaggtgccggatatttctggggtgaggggccggggcctgacgccagagcgatactgaggggcgttgtcggcagtgttggcgctctgggcatagtaaccaggctggcaataaaactgtacccatggcccggtccgccggttttcccggttgaaggggttgctcccgataagaggtccgaactaccgcgggaccgtttccggtggctgctgtttgtttttcccgacatgagacgggccgtgtatgccatgtatgagatttcgcgggcggaaatcggggggattgtccacatgtggcccccggactattacaactggtggtgggccaaatcgcgccaggaatactgggatgcctgggtcagcggctactggcagcagaatgtaaagaactgtgttgccgtctgtctctgggggtatgcttcatcccgacaggtcgagtacgaggaaaaagtcctcaggcagattgcgctggaatatgatggcaggccgctgtccgacgaggtctacggccggtgggtgccctgtgccgccaacaactgggtgcgtgacaccaacggctgccgcatgatgagggttggcggcggttattcgctgacaaacctcacttttgattcgattgacgatgccgaacgaagttttccggtggcatgggagattatcgacaggtacaccccgccgtttctggacagcgaccatccggcctggattgccccctatgacctcgggcacttcgcccttgccgagtcggactttcccagagagaagaacgacgaggatgatttgaagacggccatgtgcctcttcgaagccacatcgtgcgaagtaaaagagcgggccgtcagcgcgctcagtgtcatcggcccgggaaaggtcgtctggccttcgtacccggtagggctcaggctgctgtccggcatcaagaaggcgcttgacccgggcaacagggctaacccgacgcgtatcattgatatggataccgtttctaagatcaggacctgaagtttctcaggcgcctttttcggtcacagacgcatctatctcagccgccccgattaaccgccgccggtattctctgccggtgcatccctgccggcgcctgccggactaccggtcgactttcaatccacgcccccgtgcgggaagcgacctcagttgacgtctatcttaccattcatccgacggttcacccccacatgcgtggggaagacgttttagcagacctaacacgcttgaaaactggcggttcacccccacatgcgtggggaagacgtggacccagtgaactttgtggacccagtgaacggttcacccccacatgcgtggggaagacagcctgcacgtagtcgaagggattgagctggtcggttcacccccacatgcgtggggaagacgttttagcagacctaacacgcttgaaaactggcggttcacccccacatgcgtggggaagacatggacccagtgaactttgtggacccagtgaacggttcacccccacatgcgtggggaagacgactggctgagctggcatatagtcggcctagccggttcacccccacatgcgtggggaagacggtaaatccggaaacgacatccggatcaacatcggttcacccccacatgcgtggggaagaccgagcagcccgccgcctccaccgagacggtacggttcacccccacatgcgtggggaagacgccgtcaattacagttgctgagcgcaccttacccggttcacccccacatgcgtggggaagactcccgcagcacccgcttatgcgggaagtaacgcggttcacccccacatgcgtggggaagacgatatctcatcaatatcgctcgtgccgcgtgtcggttcacccccacatgcgtggggaagacgtttactttcgaccaatgtaagtaagcgtttacggttcacccccacatgcgtggggaagacggactggtcactgtggtgattggcgtcgtcgccggttcacccccacatgcgtggggaagacgatatctcatcaatatcgctcgtgccgcgtgtcggttcacccccacatgcgtggggaagacgcgaatattggtggtgacccatcgcgagtgcgcggttcacccccacatgcgtggggaagactccattccgctgcgcctccagcgaccacacaccggttcacccccacatgcgtggggaagacggttggtccccgaaatatatgggatccgatactggttcacccccacatgcgtggggaagacgcgaatattggtggtgacccatcgcgagtgcgcggttcacccccacatgcgtggggaagacgtcacccgccaatcgacccacggcaaacatgtcggttcacccccacatgcgtggggaagacgccagcacccggtcggctatccactgcgccaccggttcacccccacatgcgtggggaagacttcctcaggcctatacccatcgaccagcaaatccggttcacccccacatgcgtggggaagacttgagctgatccttcttgcgccgcctctcgtacggttcacccccacatgcgtggggaagacagggcgtgctagtatttttaaggatgtggtagcggttcacccccacatgcgtggggaagaccctagaagttcaaagccaagccctaactacctcaaaggtggttgaggcattccagtgtcaacgcccatgtgcctgtgttcgctgactcacgctcactaaggtcggttatcggaatgcattgcctcctccggcccggcgtcgcgcgaccttatacttaccagggctaatccttcgaagtcgaccaattgccgccagtggttgcctgcctgacgataggaaaatccctgcggattcttgtccgtccagacctgcaatatcgtcccgctttccctggtatttttgagcgaccgtgcccagagctcgtccctgactctcgcactcggattgcccaggaaaactcccgtcctcggttccagaagccaccgtgacaatgcgcccctcaagctcgtcggcactttctccagtatcatcactaacaccgagcacctccgcaatatcaggtaagattcgttccattagtttgaagtcgtaaaacgcctggcggcactccgtacgtaccgccctttcaatgtcctgcggggcccgtgcggcaaccttgaaagcaatcggaatcgttgtctcagtcttgtacaggtccccgatgtcatagacgaagctcagcatcctgccggtatgaataaagcccagccccggggagtagcctgcagacagtatcgcggcatggcagacggcgtaaaggcaggcattggccgccgaaagcgcccgatttaccgggtcacctttggcccagtctttctggtcatagcgccgtcctttccactcaacgccgtacttggctgaagcctcggcataggcccgcctaacccggattccctccataccgcggatctcctcaaggctgacgatggttggtacgggcttcttgaaacgaaaattatacatgcgccaggcgacttccagcctctttgattcatcactggccaaccgcgcctgccaaataagtctccgggagctatatgtaccaccgatacccgccgaataaaaacgaatgccgtcctgtccagtccaggcgagtaagcagttattctgggagagcgatttcacggcagcgtgcgtaatggttgaccccggaccgagcatcaccacgcttagctggtcgatcggcaccggcgttaccgaatcaccctgatggaaactcaacccattgtcactgacgtcgagacggcccatttccagataaagatagctccagcggtccttaaaatgcggaagctcataaagggtgcgcacaactcactcccttgaccgggctacggacagcaatccgaagccgaagcccttggcggggccgataccctgtataattgcactgcggagagaatcagcggcggttacacggagtttgccttcgtaacgcgcatagaaaaagtgcctcaacctcccttttgcttcttcatcgtcggcaatctcactgctaccatctatctccttgcctttggaagctacaacataccctgtttgcacgttatcgaagcactccacgctaaatccataccggccggcacggctggtgagccacgcttcaatttcattacgaggtactgggactctcctgccccagttattcctgcctgcgggccggttttccctgtccctcttgcgggtagggttagccaacagccgaaaaacgagacactgtccgttctgaaaatgcgggtcatatggcttaattgcaggcgttgcggcaagcaagtgcatagcattacgaaaggcatagtcccagtccggtttgaccgctgattgtacgattatcatggcgcggcctgagggcagcgggtctatgcggaagagaaagccactgcggttatctcgcggtgagtgaatttgcctgaggacatcgtcaggcacctccagcttctttctgtcagacaggtaacggtcttccggaaagcggccgggcttatatggttttaagaaaagcgggtcatgttccttagattccgccgaggggaagcccatgcaaaggcgctgatgtacacggtacacgttccgtaaccacagtcgtccgggatgagggcggtcggggttgtcccccgtattgacaagaaggcacgaaagatacatggctattccacctcctccggactgaggcgacggcggcgggtctccaacgagcgaaaacagatgatttcaccccgtttctgaatgatttcatcccgccatttggggtcttcggggttaatgcgatctaagcccatgtccagaccgtattcaatcatagtgaccgcgtcgtgacagaggcggcacagcgagcgcaggtcatcgtgagtttccccgccgccagcgcggcggtaggtgatgtgctggacggtggtggcgggtgccttgcagaaaacacaaaggccatagtctgctcttaaacgcgtggcgcgagccttcttatattcagtgttctgatagtcagcacgaagtcggaggggtctgggagtctcgctttgcgccggcttttctgcgatactaacctcggtaccaacccgtagttttcgtcgaataacaaagcggggagaatgggaaggcgggtctaacgtgagcgggacatcgtaccacacgagcgcatcagttggtgctacaggctgttgcggcgtcggaagccagtcaagcaggcaatcaacggtttcttgcggtgggtcgtccttcagccgctttcgccatgggactgattggagcgccgaaagtaagtcagggaaatcaccggcggggtgttccagcagcgggcgtgacgggggacagcatttgcggccgaggtaaagtgtccattttgggttcgttatcgccgttcctagttccgtaaccagtgtggcatcgccctgtagcgcaacgagaaaactggcgtcacacaagtattcacggcgggtgagtaaagtctcctttcctgattcaggcttcttgaagccaccgtcagctttccgcatgccaatcctggcgccgacagtgtgatagtcccaccagcgaacgcccgggctgtcgatacggacacccattttcagggcagacagcttcggaagccatgtttcagcggcggctgaccgtggtatgccgagcgccgcgcagagcagtccgataacccctgatttagttggagcttcagcggtgcgccggacaacaaatttggactcgtggttgccccacgcctgaagtggaccctcgaaccgtaaaaacagggtattggccatcatgctgacaccgatagatttatgatagctttcttggcttcttcccagttacagccgatggcgctgaccaccgccggtatcaattcgtccagagacttgactttgttccctgtcaggtcgatgtccttttcgacctccctttctccttcctttacctttgttctggcagtcaagggataccgcaggttaggagaaaaccagaagcgctgttgtggcgggccaaaaccggtgtccagatcatggacgtactggcccagctgggcgatgctctgggagataatgtcccgcccatctcgaacaaccggtcgagcaaaagcattggcatagttaacaggcgtattgcgaatctcaaccagtatgccatccgggtaattgtgtgctgcgaagctgttctgcttgccggttggggtgaccaccgccgccccgcgaaggaatgccccgacggtgtgggccgccaggttgatctcgccgcccagattcttgagcaactgttcccagtggatggaaaagtacttgtaaaaacaggcggaggtaaacatggcttcgtcaacgtagcctgcgcccgcatcagtaccggggatgtcatctgcggcgacgtaatagtctacttcgggacgggcctcgtgcgtggagaaggcatgtgcaacctgcaaagccgcctctacagtagtatcaaggtctttccacaagtcgctggcctccgaaggttccagcattctccctgacagtgccatatccggtgcaaagacgcgttcggcgattagcctggaaaaatcctttgcaagtacggcgtcgtttttctcgccgccgttccctaaaagtgcggacatctcctttatggcgtcacgcgtggtgtagaccagcatcttgctcctgtccgcgtccttctttggcttgaaaccacaatcggaaaggatcttctcggccttctctacgactttggggtcggcttgtactttttcatcaaacgggtctcctttagtacccctggcgatcaatttcgccaactgccgtgtgcggacgccattgagtaatgctttgaactcatcgctcatgcggatgctgcgcttgaggcactggctggagatgcgcgaacggagcacaccgccgaagtagcaggtcttgggcgcacccaggtcatcccggttcagattggccggactgtggttctgaatcatgtggacttcaatcagcattgctattatcctccttagttaccaagaaattcctccgcccacttcaggcgggttgcttcacgttcccatattgacaggtcattcgtcagtcttacccaatcaagcggtttgccagtatcggctacctgggccagcgcccatcgcagggctggctcaatactagccaacggcataagcaacatttcatcgaatttctgttgaaatcgccttcggctgttctcgtcgtctggttgacaacgacgcaattggcaagccagcgtgtcaccggtagaatgtgggatgggcgaaaaggcataaagcttggcaatcagccaggctacttcccgccgcggtgcaaacgggcccttgttctgtaacggccaccatagaccggcgaacaggtcaaagccctggacggactcatccagaccctgcccggcatgtattcgcaacaggccgaggtcaccggacttcaactgcgtcaggatctcaatgtattcctcagtcgctgttggacccatttacttcctcgccttccccttgctgggtttctttgctggcgtcgacgtcgatcccgtttgagggagtgcattgccgatttctcggcgtcgtttgactgctaccgtggttacaccgggcgctaatgacctagaaatgatttgcatcatgggtcggtattcgctggccgcgcgctcccacgccgtgttgtcaccagacagcaactcttcggctttcgcaaagaccctgctttcaacgtggggacgaatagcggcgagcaccgaggctatatcaatatggtttcgagatcgtttttcgtcaagctgcatcagctttcggcttagattattgtttgactgttgccattggcttagctcatcgatagaaacgaatgagcctggccaggggagaaacaattccgatgcctcgaagtatttattctggtctgacgaaaagccaactatccacgctctggtccgctccgtttggggattctggagtaacccagccattattttggaccactgcccggcaccggcgtcagcgcttcctattacgtctgcccaatgcagtgaagtttctccgttcttggctggtttgtagataacgtgcgggtcacgccagacgcgcttagtgccatcatctgtcttggcactccctttgccagcaaagacgctggacagtatcacattatccagacggccacacgaaatgcagtgtgtcaaagatttctgcggctcgtctaaccaaactcggcgtgggagccacgtcagcccagttagtagcggtacctctcccaccccgggaagtggcaagtccggcttttcccacgctggcgttcccaaattggacacctgccgccacgaaagccgcaaggtctccgcaagggtctcgcccacgggaatagcatagattggcggctttgcgttgatgccgggcgacttgccctgtcccccctgtgtcgcgaacatcggtagccgcagcagtcccaaagcacaacatgccggacacaagcctttagttccgtctatcgagtgccgaaaatggttaaagttagtgcctgatggtatctcgtgaatgaggtagttaaccgtgagtagtctgtcgccctgttccctgtattgatagaatctcttaccaccgccaagcaaattgaaacactctctattggtatcgagtttggaaaaccaatcaattgggaaggattcttcgggggcagtgtctgtcgtagtcggtgggtcgccccggcaccagtaaagcagagccagcagaaaccggaaaatcgccacgcggtccattggattgctggcggcaatctgtcgaatggaacctgcttgtgttagtgcctctctaatccctacccgtgagacattgccatctgtccagaggacgggaatccactgtttttcaagcagattgtaggtcaacgtctttagcctcctggccctatttgtgaccgctagctgaggtggtccgatacccacggtgtattttagcatggtgctgtgacacggttgtcttagcttgggagcttacctgcgccggccctgacgccccttcttaaccggtgagaccggcgagacatcatcatcaaccatcggctcggtcgccccgcccatccccgccaccggcgcatatttctcctgctgtacctgaagcttgaagaggtcccagcggc

SEQ ID NO: 592 - DNA, 13579 bp, Artificial Sequence
  Synthetic Oligonucleotide
ccgtcattctgagcgtcagcgaagaatccagtccgtgattcttaatagattagggatgcacaggatgatgaagatgaaaaagggattaggttttagggttcaaaaaggttgctaactaactgcggattaaagagttggaacaccggattcatccggtcgtaggtgccagattcatctggcacaatgttcttccgaccacccaactctgcccaccagcacccaaacccgcgcccagaccgtcattctgagcgtcagcgaagaatccaggccgtgattcttaatagattagggatgcacaggatgatgaagatgaaaaagggattaggttttagggttcaaaaaggttgctaactaactgcggaataaagagttggaacaccggattcatccggtcgtaggtgccagattcatctggcacaatgtacctctgaccacccaactccgcccaccagcacccaaacccgcgccaacccgtcattctgaacgaagtgaagaatccaggccgtggaaaaagggcttttactatccatccctcttcgctctttaggcagaaaacctgtgcccatgagtgtcatcctggagcaacagcgataggatccagtccctgcagttttacaggccttgtgcgcagcaaaacgctaaaacccacaaccccattatatagaacgagtcccttgaaaaagacccgcaaaaccctaaacctttgtgaaccttatgcttgcctttgaaacataagcgatactaagggcggcaaccaagggcgtacacttaaagtgtgcttacgagaccacataagcccgcaatagcggtattgttcgagcaggcagccaattcacatagtctggtttgccaaaagaacattccttatcaataaggcctggattcttcgctgacgctcagaatgacgggctggtctgggtttgggaggtgaaaaggcgagatggagacctggagacggggagactgtacttcagtagaaagtaaaaagttgtcagttttatggcagtatgcgcagcgaaatcccaaaaccttaaaatctgcgttatcggcgtaatctgcgtgacactctatccgcgtaaaccaaaaaacccgggagacaagctcccgggtccattcttatacctgtatcgccaggaatcagttcttggctttcacatagtagaatttcatgtcggctggagcctgggtccactcggttccggtccagtttccttccagcagtatgtagccgctgtaaggatcgttggagccatatatgtcgtaggcggtggcgccggcaacggggttccagttgagtttgatgttgtttccatccttggtgatggtgaccacaggtgcttccagtccttccgtgtaggcttcgaagtcgctcaggaagcgcggtgagatctgcatggttgcgttgaattgacccgccaggcaggtgatgttcacaggaacagtatgcaccgcagtgttggcatagtctgtattgacgaaagtgcgcattacggcgctgccggaggggtcggtgacattgatgttctgggcagtggcaggataactttgaaacacggtgtcatccacattcacgttcatcaccttgatcagctttgcctggtcggcgctggtgaggcttgccagggtgcgaacttcgggaaccaccacgttgtttgaggaagtggcggcgccggggtcggctttgggcacaaactgcaggagtcccgaatacaaggtcagggaaccgctgatgccggtgatgccgtcgtagaggttgtaggtgctggtgataattccagccaagtcatcaatgacgatggcggcggtggcgtcctggatatacttggtgttgcgattggcgttttgataggtgagcacagcttctcccaccaggcgataaatgtcactggtgtttacaggtttagtgcgcagttcggcgatgtcctgcacatcgatggggaagttgtaaacctttgtggcaaccgtgcttgagatcataccttccgctgtggcatacgccttcaccgtggtgttttgagaaacgttgaagggagccagatacaaagcaccattctggatggggtcgctgccgtcggtggtgtagtagatgtcggcaccgtcagttgcacaggtgatgctgacgttaaacggggcataataggtgcctgaatcaggagaaatctcaggcagttccaccacttcttcaccgggtgcgaagatatgccagcccaaattggtaatcgtatcaatcggatacacgtcccattcggcggcgagggtggggaagccagcgtcggggttttccgtcactccacccgtaacggcggctttgcgcactaaagttttgtccagggtgctataaccgccgtctgcagtccaagctgtgccgggatcttcaccgatggtgccaaagatgtccacataaacttcatcttcgcccacaattttcagcaaagcaagggcatcgttaccattgaagtttgtggttgcgctgttaatggtttttaaagcctgcagcgctgcacccgcttgactgtggacaagcacataaacgctgccatggttcagaattgtgccggattcgaaggtttcggtgctggttggggtggtgcctccattggcaaaaagcttaaccttgtaatttgccaaatccactgcagctccggtgccgttgaagatctcgatggctttgttgttgctgctgccttcgatatattcggagaagaagaggtctgtggcatattggtctcccgagggcgggattgccgttccgcttacgggcagattctcagtgcttgctcccggtgtttcgtggacgatgtttttgctatactgtcccaccacgcttgcattcatgcgcacataaatcgttccattgaagttgttgggcaaggtgagttcatcagtccagtttccggttccggtttcgctgagttcgaaggggctttccacctccacttcaatattggccaatgcgcccgtagcgctgaggctataggattgaaccgcggagggactgccaatcgtttgttcaaaagcatccaggcttgcaacaatgttgaaggtcacatcgggagggaaggtttcgccttccacgcggatgctcaccggagcagcgccggagctggtgtgaacaatactgccggcgtgttcgccaagttcggaactgacgaggcgcacatagatcttgtcatcaaaagtggcgggaacctgaattgggtttccccagccttgttctgcatcataggacacttcaaaaccggtgggagcggtgatggtgatgggtcccaccaggttttcgccgctcaggttataataggaaatttcttccgaaggggttccggcaatgtttgccaaaggatccggctcaccagaaacgtggatgaaacggggttccggggtttcgctgctccagaggagtgcccaatcgttcgtcacacggatgccgtcaaaaatggcatagggagtgtttgcggtttgcctgatggcaattgcgccaattccggtggaaccgatatcggcctcattggtaatagggctcaaagttggagtcggctcgttgggaccgatgacggggttgatccagccggtgacgatatcgtttgtggttccgggcacgaactcatacttcaaaaccacaagataggtggttcccggtgcgtagtcataatctgtataaacaacatttgccccggcattcgattgttttgtgaggccaaaacgaatattgtcgttggcgtctttgcttacaaagaatttggctttaaaatcactggtgctgttggcagccataaagtgatagacatagtctccgtttccggtgctggcatcggtcacgttaatcaggaaagaggtgtaaacttctccgcttgtttggggcacaaaagctctgtttacgtcttcaccatttccaagagtttgacccgcataaccgctggaggggggatagtttggatagatgaggttgatgtctaccacggtgggagaattgttacctgctccgctatgagctgtccagccgttttcaaccaaggtggtgccgacttcatatacaaagttttcttccatgagaaggacgggctcttccggctcttccggttcataaaccgtgccgctcactgccatattaacatctgatgcgccggtgctgctgtgggtgatgtttccggaatattcgccggcggttgtgccaatcaggcgcacataaaccgaaccgttgtagctggatgagagggaaaggctgccgctgtagctgctgccatcgctggaaatttcaaagccggcgggagctgccacgctgatattcgcagtgaggttgctgccggaaaggctgtaagtttgagccagggaagggctgcccacctcagtgctaaaagctgtgaggctgccgcttacggaaataatgggtgtgggggttccgccgctataaccggtccagctcagattatcgattacaagctgtctgtaattacttccagttcctgtagtactcttgattgaaataactacatctcctgggatattcacgttgttaaccgtaaaagtgtggatggtgtcatcagcgcctgaagtgccaccaaaggtttgagaatcggcgacccaatcaccattgacataaagagcaacttggcgatcgcccgcgcctgtgaaagctttccgcatttgcaccgaaaaatcgccaattccgccggggatagaatttgaataaacttcgctttcttttcctaaacttctcagaagcaatcctttgtcatcaattggataactttgttccccagagcagtgaacatagttccaagtgatgttgttatctcccacatagttgccgttaaaataattgcttccggacaacgtgtggttctcaaaagtttccaaaccttgagcccaaacaatgccaagggcaaagatgaggctaaaggcgataagtagttttttgaacattttcatctccttgcttaggttctgataatctcatggcgcggcttttgaggcctgccgccgtttataaaacatcgtaaaataggtccggcatctggcacagagccggatatgataaattataagtcaaagcggctcttttacaagcagccacattttccctatttaggtcaaaatccaccggaggggtttatccgtcaatagaattctggcattttttaggcaaatagcggggctttattttctatcctgcctaaattatggattgcgcgcgcgtgggatgcggattatcatttatgatatgagaaaaatcaattataaggaaaaggaaacacaatgaagggacttggccgggggtggcgaggatggataaaatatttcttgaagataaggagatggtacgacaatgtacattctcattatgtttgccttggcgcctggcttcacatcttacaaatactagaaaattgatgataaaatatatatggaggagagctcaatgtataatttgcttgaacaagattgggtgagggtgctctaccgcagcggagaacctaagctaatctcgctatcgagactgcatcgggatgcggataaattgcatcttgcctacagtaatcccatggaccggctggcggttttccgctttcttctcgctttgggctattggtgttttgccaatacgaaccaaacaccggcacgagataaacccatacctgaagcatggctgtcctggctggaggagaacaagcagtatttgaaactttatggtgacggtcccaggatgtatcaggacccgggcgttaaacgcacacgtcccatcaccgacttgctgcacgaaattcccacgggaaacaatctttcgcatttcaaacacaccttggactatgtctccggcttgtgcctgccctgctgcatacaaggattgctgcgtttccccatttatgcaacctcgggattgccacaactcaaggccagcattaacggcatgcccccattttatgccctgccatgggggaacactctggcagaaactctttacctgaattgggagccacgcgaattgatgggaaccccggcctgggttttcaacaccgttgaccccgaagacggccctgtgccactcttggagggtcttacttcacttgccaggcgctgtgtattacatgaccccatacccggagatggcgcctgttccgcatgtggcgaccgaagcggaagcttggtatattcctgtggttacgacacggctggtgttgttgccaatcccatgtgggaagacccgcacgtatgctacgatgtcaaaaaaaccaaagcaaacaaggcgttgaatttaatctctgaaaaaccaatgatgcaggatagaaactggcaacgtgcattcactggttcttccaagttggagtccggcgatgaaagcatcaatctgctctgcattggagtatcagttaaccaagccgtcataaatgacgtgtgggagtccaccataagaattccgccccgggaagccggaaaagaccccaaaagcataccgaattggacttggattaaccgtcgacttgttggtggatatgaaagaaacagattgtattgggccgataaatcagtttccggaaaacccagggctccgctcagtgaatcgctcatcagcgcagtttctccgcatattcttcattatgcgattcaggagacgggtggttttttgccggataacggtgaattgcccaaatcggtacagattgagtatagaaacatgctgaaagctgttgccaaatcccaggcaccggctgtcacaatagaggatgccatcgcgtccaagtttgtgcataatcagcgtccacagcttgagcaagccaaagcttccaagcaggataaaaaggaggaccaagttgattgaaacatccacagctcaattcatcaaaagaattgcagaactgaagtctggagacctgggtcggctgagacaattgagaggttgtgacctgcatgagaatctggacgggttcgacctgttcaccggcctgtggtggacattgagaaaaaactcgccccgggcgccccgacgtgagattgcctggctcgttaccaaactgtatgcgcagttcccattctctcaagaggacgggctaaccttgcctgtaatccttggacgtatttacaggactctggcaacgcaaaaggaaaaacgaatcttcgccatgaggacggatgccattctgcaagcgcaggcaaaccagttggaacaccccttaagctgggccctgcggatgcttgccctgtatggctacgcttcgctggattggattcaacttaccgacgacctttcggtttggcatgaaatagtgcgacaccgatggacggaggcatttctaacacaatcatcaaaggacaaaaacaaggagaattaaaatgttaatcgaaatgcacatgattcaaaaccacagcccggcaaatctcaaccgggacgaccttggcgcgcccaagacctgttatttcggcggagtgctacgttcacgcatttccagccaatgcatcaaacgcagcatcagaaccagcgatgattttcagactctgcagggcggggttcgcacacgcaggctggtggaacttatccagctggaagctggggacacagattgcaggaaaagagcacaggaaattctgacctattgcggatttaaacatgaaaaagacaacagcaaaatgctgattttcatgtccagagacaaggtgaaataccttgccgagattatcttggatgaatccctggaaatagcagacgctgcccagaaggttgccgatgtgattacccaggccacgtgttcccccgatattgcgctttttggaaggatgttggaacctgaaacaagcaagactaaatggagagatacaacagtggaggcagccatgcaggttgcacacgccctttccacacacgccgcccgtccggaaatcgattattatgtggcggcagatgacgttaagggagaagatgccggtgccggctttgttgacgaagcgatgtttgcatccgcctgcttctataaatatttctccattgattgggaccaactggttaaaaatttgaaaggcaacgaagaactcgccgcacaaacagttggggcatttatcaagtctgctgcgctcaccaatcccagcggcaaacaaaacagtttcgcagcccataacccgcccgatggcattttggtggaattcaaggatacacccgtcagttatgccaatgctttcgttcgtcccgtaaagcttaccgccgaatcggacttggtggaactcagcataggccaactcgccaactatgttaaagatgtaagcgaagcatattatcccggccacatggaaggcaacgcattttggttctctcccaacggacgccatcccttgttaccacaagacggggacatacaagccgagcaagttggacaactggaagaactgataaagaaaacggttcataaatgcggttatgagtgggaagccatcaagcaaaaaaaagtagaaggctgatatgagcgccaacaccctattcctaagactggagggaccacttcaatcctggggcgggcatgaggcgaaattttccattcgccgcacttctgatgctcccaccaaatcaggagtctttggcttgctttgcgccgcactgggaattggcagagtcgaagcaggtgaaagctgcctgcccgaactggcgaacttacgcatgggagtgcgcatagacaggctcggtgtccgctggtgggattaccacaccgtgaacgctgggattccgatgcttaaatctgggctagaggcgtctgaagacctcagcgatgtgggcaaagccagggcagaccgactgcttaaaaaagaactgagtttcgacaaacgcgggttgctcagccgtcgcgaatatctggcggatgccagttttctggtggccttgcagggtgaaccttcaacagttcaaaaactggcggaagctctgcaaaaacctgtctggacactatatctgggcagaaagacctgcacaccatcacgccctgtgggagagcatacccccggtaaatatgcgagccttgaggaagcattgttggccatacccgtgcaggtgagggataaacacgaaaccctgccccagtccctccaatgtgttctggactggattccggcttatgatggtgaacccgctccggattgcgcggaaatccactacgacctacccatgtcttttgaccctccccggcatttgccgagatttgtgattcgccgtgaactgcccttaagtgtagatatcgaaacacaacaggttatcattggaagaccctggcgtccggcacgcagtagggccgattacacaaacactcaatataagagagtccgcgcagaacgtctggtgatggatgtcgggctatgcatggtatgcaaggcgcctgccacaacagtgcaacacgtaaactatcgtcgcactggagggagggaagagcctgaagatttgcgcgccctgtgtcggctgtgccacgacgcatgcaccatgctggaatatggcagcggcatgaccatggaccgcatagacccgtgtgaccccgcctggcgtaaccgcatcataagcaaacgcaatgaaatcatcgaattccgctcgctggaacaacgcagacgaaagcttgaccccaaggaggaaaacggatgatgtatctttctcaattactcatagataccggtggaaatccggacagactcagaccgggacgttcgtggctcaacaatatttacaacgtccaccgcaggctttccatggcctttcccatgcggcaacgaaaagatggtgacccccggttcctgcagccttttaacccggctgactttgagcgtcaccgctttctgttcagggtggacaacaacatcgacggagaggaaaccagagccatggttctggtccagtcatcaatactgccggattggaactacgccttccaaaacgccaccggctttttggcggctcctcctcaggtaaaagaatacaccccaaatttttcccccggacagcagctgcgcttccgcatcctcatcaacgccagcgtaaagcgcaaaatcgaagaaatgaaagacggggactccggaagagttaagacggggaaagtgctgcataagcgtgttgccttcacttgggatgctgatgtttccccttccgatgcacttgccgaatggttcgccaaaaaggcgtccaaactggggtttacgccaattaaaacagagctggttaagcttggctggatatatggctccaaacctgaaccgcgaggtgaaagaccacgaagagaaaatgaataccgccccctgaaatatcgttctgcactgctggaaggatatcttaaagtggatgagccggagttattcaagaagactttggtcacgggaattggcagtgcaaaaagcatgggatttgggctactttccgtaattcccacacaagatgcgtaacaaagacctgcgctccatcccaaagatgagagaccgcatcacctacctgtatgtggaacatgcaaaggtggataaaaaacataaatccatagcctttcatgatgccatgggttccacacaggtgccatgtgctggactggctcttttgatgctcgggcccggcgtatccattactcatgccgccataatggtgttggccgaatgtggttgtcttgttgcctgggtgggtgaacaaggcgttcggttttatgcttcaggcgccggcaccacccgcagttctgcaaacctgatgcgtcaagctgccgcatgggctaatcaggataaacatatgaaaatagtgcgcacgatgtacgagatgaggttcatggaaaaactggacacctcatatacccttgcccagattaggggtaaggagggtgcgagagtgcgagacacatatttcaggttgtccaaagaatatggagtcaccatgaaggccagagaataccaaagagacaattggattaaaacagaccctgtcaaccgtgcaatttccgtggcaaactcgtgcctatacggaatatgtcatgctgcaatagtggctgcgggttattctactgccttgggctttatccatacgggaaaacaactctcgttcgtatacgatattgcagacctttataagatggaaacttcagtgcccgctgcctttatggcaacagctgaaggaagtgacagccttgaccggagaacgcgaatagcctgtcgtgaccaattccatcaatttggtttgctgaaaaaaatcgtcgccgacatccatgcccttttcgacattttggaaactccggatgatgaacccgacctggtggatatcgatgccgcagcacccggtgggctgtggaacccggataaaagtataagtccaggcgggcaatcatggggtttggattcacaaggaactgaagatgatggttctgattcttgaaaatgttccaatctcactccgtggtgaaatcacccgttggttgcttgaaataaaagcaggcgtatttgtcggcaacgtgtcagctctggtcagagaaaagatatgggataaagtcaggtcagattgtgccggcggcacttgcctcatggtcttcagtaaacattgcgaacaaggctttgacataaagttttggggcgctgcaggaaaaattgtcacagaatgggaaggtttaaaacttatgactaaacatccgtaaacgatacttgacatagctccaacagcagaaaaccctttatttacatagtgtattccccacgtgtgtgggggtgaaccgacaaatggtaaagccattttttctgtaggtaagtattccccacgtgtgtgggggtgaaccgactttatcgaattttttgagagccattatttagtattccccacgtgtgtgggggtgaaccgtatgacccaatgaccacgagccaggagttgaagtattccccacgtgtgtgggggtgaaccgacagaagcgttatcaataccaataattctgccgtattccccacgtgtgtgggggtgaaccggcaagacgggagcttatgtgcttgtctgtcgtgtattccccacgtgtgtgggggtgaaccggcaggatgacgggcaggtgatggatatatatggtattccccacgtgtgtgggggtgaaccggaactggaaatcgaagccatccaagccaacctgtattccccacgtgtgtgggggtgaaccgcaaagcattgcggaaatcaaggcgctggacttgtattccccacgtgtgtgggggtgaaccgaacgcaacaaaataagccagcacgcgccttgtgtattccccacgtgtgtgggggtgaaccgccagtatctccctcagctgcccatacttaattgtattccccacgtgtgtgggggtgaaccggtccttaggggtgcgcaagtaaggcaggattggtattccccacgtgtgtgggggtgaaccggatcaggtggacgtgaaagcgctgttgaagctgtattccccacgtgtgtgggggtgaaccaagcaagaaactgagcgggacgcagctcaaggcgtattccccacgtgtgtgggggtgaaccgataagagaccgttgctgtcagacctgagagaagtattccccacgtgtgtgggggtgaaccgaagcatttgatacgtcacctcataggcaggcagtattccccacgtgtgtgggggtgaaccgtgggttcactacctgaaagaaaagaacaaagagtattccccacgtgtgtgggggtgaaccggtgtccgggctatagccctctttggtgatgctgtattccccacgtgtgtgggggtgaaccgcgttcggctccttcggtccccgtggcggcttggtattccccacgtgtgtgggggtgaaccgctggcataattaagtttgtgctgttccgatatgtattccccacgtgtgtgggggtgaaccgatttggagccgcagacgccggatgcgggtgcggtattccccacgtgtgtgggggtgaaccgctgcctccctcgcttgccaaggccagggcggggtatttccccacgtgtgtgggggtgaaccgcagggctcgaccaatgagcaagaccaagcagagtattccccacgtgtgtgggggtgaaccgaactgtatggggacggatacgccctcaagcacgtattccccacgtgtgtgggggtgaaccggaaatccgccaggattatacgctgaccagtgggtattccccacgtgtgtgggggtgaaccgaaaaagaaaagaaaaagaagagctgcgctcaagtattccccacgtgtgtgggggtgaaccgtggctgaacggggattggaatgataacttgccgtattccccacgtgtgtgggggtgaaccggacgccccgccttgggcaaattggctggcgaggtattccccacgtgtgtgggggtgaaccggcgagggtggtgatgcgggccgcggcgttgcggtattccccacgttgtgggggtgaaccgaggtaaatgaaggtggaaacctataccgcaagtgtgccccactctcgtgtggctcttcaaggcattcccccaaaaaagtggggaattgtagttgtagcagtatgtttatcagatagatagcttatatttctgtccattaatttgtgttttcggatgcaaatcgggttgtctatgcaca

SEQ ID NO: 593 - DNA, 13451 bp, Artificial Sequence
  Synthetic Oligonucleotide
aggtggacaactggccgtcggaaaggccgtcaagagccgtgcgggcggatcggatagacctgttgacagaccgagcgctggtcggccgcccagcctggtttcttactgtctgaatcgcagtattcgaaatcgaacaccctggtcggtggtcaagccctctgttcggatggacgcctgcaagcggtaagggcccggcgtcacaaaagcgagctgggatgcggccgcgaagtcgagattctgcgtccccgcgaagctgatgcgaagcgagcacttccctgccccggcggtcgcgcagtcacgggcgacttcaacgccctgagcgtgtccgaagttccaatcgaacggtgatggcgtgggctcgaattggaagtttccattaaagaggtcgttcgacttccggtagtcgcccgcgcgcgcgcccaggtgctgcgcccatgcggacaccgccgcttcgggatggccttgctgcacgagaaaaccggcatactcccctgccgtactatcatcgttatacccatgtcgagcgatccaatcccaagtgcgttgcgcatcatccaggcgcccggcttgcatcaggtattggagccaggattgtaccgcccgccgatcttccggaaggccgtacagcaaaacatcatcagcgtgatctaccaggcgcgtgtactcgctgaagatgatcgaatcgtaatccggagtgagcgtcaggatacgcgccgtggcggggagggcttggtggttctcgccgacttggaaatagaagttcgccgcgcgcaggagaaggggcgcagaccgcggggcgagggccagcacctggccgaagcactcgcgcgcctctcccttctgtccggcatcgagaaacgcctccccgaggtcggcccatcgatagggattttgcgggtctcgctggagaacctcgcggaataggacaatggccttttggacgtcctcttcgctcatccccgtcaattgctaccgcgctcgcaactccaagggcgcgttggtgcaaacaaagatgcggcacagaacgcggtcaacctccgcgttgttctgccccaacgtctccgagagaatgcccgcctcgcagtaggcagccaaaaccaccccgaggatgaacgtcagcactttcaatccagcacactctcccgacgacggaccttttcgaaagcccgctgatgtaacggcgaatttacctagccatatggcggcgcaaagccgcctctacatcaatctgacccactgccgaacattacagccacatgccgggacggccctaatcgcaatgcggatgatccggtgggcaatgaaggctacgcgggggtggcggcggcggaggtggaggtgggaagggtggccgcggtggcgagggcggtcggggtgggtcgtgcggccgtggaggatttccgcctctggcaagtggggtggcgggctgagccgaagctggccccgcggcggagttccgcgccaccggatgaactagcgggaccaagctcactcgcgagccttccgccggcttcaagtcgaccgacccagacagaacgcgcagcgccactgaagagctgcccgcctccagcttgacccgcgaattcggatcgagcgtggcgcggctccggtcggccaaatagatcatggccgacgaaccagcggtggcgatctcgtcgcccgccaccaccggcaaggatgatacggcggttgccagcgcggccttgccgttgagcgtcagcgcccccgaactggtgaccctgcccaccggatcggcggccatcaggactacggtcgtcatcatgacgataagcagacgcaaatatttcacggctacctcctgtgattgctgattggcgatgggcgatgggaaaacgggtatggcgacgtcctctgtcgtcaatcgccagtcggaaataggccattcccgagccccgcggacattcccgcaacccacgccaggagcatggcattggccggaatatagaagttgaaatccgccaggctatgcaccagaatcgcggccagcgcacccgcgcacgccacggcaagataccgcgcccccgggtctcgcgatccgacggctttccgcaccgccgtcctcaccacgaagaacgccagcgcggccacgatggcgaaacccaccagccccagttccgccagcaactgaaggtaatcgttatgcgcgaaatcgtccgtgacgagcggcgaggaaaccttgaatcttaagaacgctgtctcatatccgcccagcccgcacccgaagacggggtaagctctgatcaacggaatcgtctcggcccaaagctgcgcgcggccttctccggtgggatcggtcgaaacgagctggacgaatcgcgcgatcagcttgtccggcggcagaaacacgaagcccgccagcaccagtgcggcgaccaggccgaccgtggctgtttgccgtttccgggagcgcgcggcccagctcagttgccgggttccgagtgccagcgcccccatcacgaacagggaagcaagtgtcgcgaagaaccccatccgtgaaaaggaaaagacgattgcggcaaacatcaatcccgccagcgcccacacgccgcaagcccccagcgccggagtcaccgccgagtgccctcgcgagcgcgtgcgccgccaaagcgccacggggtacaccactgcgaacggcagcgccatctccaggaagcctgcgtagtggttatggttgacgtacgtcccccaccggagttggtccacgcctcggccgaagttctgcgagaggcccagaccggcttccagagcgccgatggcgacgatgggccacatcgccagccagcggttatccgcaaatcgccaagtcagctcgcgcaccagcaggaagatgatcacgtacccgcagacgagcaggaaaaattgaaaagtcgcgatgggtgaaacgctcaggggtacaaagttggctgggcgtccgatgagtgctgctggaggcatcgccgcggtgcgggcgggtgacagcacgcgcaccaggtacaccggcagcggcaccacctgcatcaggatgtagacgggcaagagagccagggtccagcgcaccacgcggccgggtagtggcgcccactggtggcgggggcgggcaaggctcagcaccaccgccagcaggcacagcaccaggaggtagtggtactggtcgattcggagcgctccgccccactcgaagacagcgtaggcgagcaccaatcccattgtggataaagcgccgatgtccgctattcttagagactctcgcgttggcttttcggggtgggactggaggcgcatggactggattgggagcatcaccgtaccgctaataggctagaaagtaaacctgggtcatgggtgacaggtgacaggtgacaggtgacaggaaaggaggctgcgccctggcgcagtaggtgtcagcagacaggttagaggtcacaggtgacagtgaaggagcctcaagcaagctcataggggacaggggacagggaacgagtgtgcgccttgcggcgccataggtggcacgcgacccgggagggaagctgagccctgtgacctataacctattccctgtcctcctgttccctgttttccctgctgtaccctgtaacctataacctattccctgcctacttgttccctgtcttcctgtaccctgtgccctgtaacctattccctatttccccctcattgcggaacgctatggccccctcggagggtatggttcgcgacgctcatgccgaggagggcggacagcagccaccgggtgagcagaattcccaagaagtagatgatgcgatgttcgaaattgaaaccccgcaggaggacggttccccaagccgcgcccaaggtgctgcacgccgctaccaagagccacgatccgatccggaacttgttggacttccaacccggcacgtaggcgttcaggtgaaaatcctcggacttattgtctccgtcatctgcgatcggcaggagttcgatcctttcccaaaaataaatgcaccattggcgatacgcgccaacgagcacggcgatgagcaggcacattgcgcagcccacccaggaattattaggtaaggcaagaatcatttcgatctcctgtccggcgagcaggttataggtgacagccagaggttacaggttacaggtcacaggtgtcaggtgtcaggtgacagaaaaagaggctgcgccctgtccccctgtctttccgttccctgccttcctccgtcccctgtaccttgtgacctgtcacctgtaccctgttctctcttctctaccctatgacctgttccctgtaacctgttccctgtctttctgttccctgtctttctgttccctgtctttctgttccctgtctttctgttccctgtcttcctgttccctgtccactgtccactgttccctgtaacctgtccgctgtcttctcatattcgtgcgctgctcgatagggaaactatgcagcaggacggtggccaaagccgcgccctgcgaggccaaaggtgacagggaaagaggagagaataggcaataggtgacaggttacaggtgacagggaaagaggctgcgccctgcggcgccaaaggtgagcctgttccctgacgcctgacacctgttttcccctgttccctgtccacggtcctctgccttcgggttccctgtcttcccctgtcccctgtgacctgtaacctgtcacctctcttcctgctgtaccctgtcccctgtaacctatcccctgtcctgaccgctcagagccctacgctacagccattttgtccagcccgctcatgacaccttaagtctgatgaccaagctactcacccgttggagagtcagcccttccctggcgcgctgtagtggcggtctctgactgtcggagggtgttgtggcatggccaacttggggtagcgccctaattctgtgttggtcccctccctcttgacaaactgcgatcgcacgtagcatctttccagcagcgaaaaacaaggtaaggaccccgctgctgtcgaacttggacggaggggcggcgaagcgatcgctaggtgcggccctgcttatctcaagtggcttcagtcttagcggttgacccgtaagggaggaagaccgaagtctaaatagtgaaaacgtgtttgaaaatggcacctgactcactcgggatgttgaccgcgattttgatatccgttggcctaatcgtaagcggagtgcatcttcgtcgtgtacctaaacttaaaatcgtgggagcgctgctggctgtacttggcatcttcggactcatggcagctctgggcttcatcagggtttattaacagcactcaccacaatcttcatctctgccagaacctcttggccgatcagcacgcgcgttgagtgcctatattggtaaaagccatgaccagcgacgtatgccccaaatgcgagagtatgaatctcgccgactcccatcggcgaggttggatcgagcggtggattcttagcttttttggtatcgtgcccattcgctgcatggactgtaatacccgtttttactccttccgccgtcccctctactgactccttttttcttcggcactcggttcagctcgccaagttgcacagatttcctttcggccgtcaatgtaacttctcagccaatacccctggactgacttgacaaaaccccattggatgggttaatataggtttccggtagtctagccaaaaggggaggggctgccgatgcaaacaaatgcctccgttaattcgcgccggtgtgagcgcaaaatagcaacaattccaatcaaacttgtggtgaaggccgacctcttcaatgcagacgattcagctctcgcggtcgacatttctccgcgcggcgcctgtgttcgaaccaagctggagttagatccaggagagtgggtgggtgtcgttcccaagggaggatacccgtatgccatccccactcgcacgatttgggtgcgggaggatgagttcagccattggaccttcgcggggcttgagttcttaaacaccccggaaggttagaaaatgcactccatggcacacccttccagtgtttgattggaattccaaaaccccaccaacacacgtttaggacgctacctgcctccccgaaggggaggaatatcattagccgtaggtgaaacctacggaccgagacggcgacgaaaggaacctaattttccgcgtttcctttccgtgggtttcacctaaggctatgggcgacaggcagagggcacaggttacaggtgacaggccaagaggcagcgccgtccggcgcccaaggtcagcctgctgcctgacacctgatacctgacacctgttttcccctgttccctaacccctgttttcccttctttcccctgtaacctgtaacctgtcccctgccttgcggtggcagagccgctggggctcttgcgtgaggcggaagaaccactcgaggccgttctcctgcatccatgcttgcttggcagtcccggcgatgaagtcgaaggccgctcccaccccggccatcgccggcacgcctagccgtgagcggtgctcgaacatcgagcgttcctgtttgggagtgctcaagcctacccagacgacatccggcgccgccgcctggattcgtagctccacttccaccttttcttcctgggtcagcggccgaaagggtggcgagcaggtggctcctggttcgcgtctgctaagcagaggcgataaccgttcttgtggtcttcgggccttgcctttctcgcgtgccgggtgtataccttcatcgcgttaatcatttggtagacagccacccgacaatcgggccgccaggagcgcaacgggccgcccaccagcctcttgccaaggcaaggaggaagttatgagctataacctgctcgaagaaaactggattccagttctatggaaagacgggaatagcaatcgcgtgggcattactgaagctcttaggcaagcaggccggattcgtcaagtcgccgccagcaatcccatggaccgtttggccatcctgcgtttcctcctcgcgcttctctattggtgcaaggggaatccgccggacgatgaagactcggtctcttcgtttccctcggattggttcaggaaacttgatgacaataaggactgtttcaaccttctgggagatggcaagcggttctatcagtgcaatgccaagtctggaacagagggaaagctttccgccaactacctgatgcaagaggtgcccactggcacaaactcttggcacttccggcattcgacagataaagaggacggattatgtccggcgtgctgcgccgcggggttattgcgtttaccgctatttgctacgtcaggggggcgcggcaagccgccaggggtcaaccagaaaccgccggtttatgtcgtaccggtcggcggttcacttgcggaaaccctgcgtctctcctggcgcaaggtatcggacacggacttcggaacgccggcttgggaagagcccgatcttagccttcctcgacatggcaatgttccgctgcttgtgggattgacgtcgctgccccggcgcgtgtggctggacaatccgcaggaacccgacgccaactgcatctcgtgcggacgtaaagcgcctctaatacgccaatgtgtgtttgctggtgtcggcagcgcaaaaacggatgaaaatggcctgggccgcgtatggagcgacccgcacaccatcactgacggcgaggatgtcattaaacccagcaatgcccttggtgcaaccgacgcggcggctgggcaatgggcaaggatagcggcgggaattcttcgggagaaaaagcccaatggcaaaagaggcttgtgggtcgtcagctttgcgacggtgcagaacgacaagtacctggaagcgatggaatatgagattcctctcccgagcacgctagatgatcggcaggtcgcggagagtgtcgaaacgattgacatgtggcaaaaggagggccggaagcttgccggcaaagccaaaccgagagggacttcccgaagacatcttgaaattcctcccatggtcgccgcagttcgcccgcacgtagaagcaaaggtctccgggaaggtcggcgagttgatttcgcgaggccgcgatgcgtgggagcaggcagcccgggaatataggccgatgatggccgccgtcgccaaatcgctttccccgggctataccaccgctgcgctccggcggcgacgccagattgtcaatgtaaggccgaacatgcagccaggcaccccaccggccgggagggccggacggaagaagggaggcgacaaatgactccaacggagcaatacgtcgacgtcctgacacatctgaagtccggtgatctcggactcctgcgcgagcatgccgggcaagggctcgaccaatcggtcgatgcctttgacctcttcgcggggctctggtggccgttgcgggagaggaatcagcgcgcgccccgccgtgcggtggcgtggcttatcgcaaaactctatgccttccggccgatcgagcattcacccgggcagacgcttgcgtggcagcttgggcggtaccggaacgacaatgaccccgagaaagaccctgtcgcggaaaggttcgacaggatgctgaccttgccggttgatatactcgagccggccttgcaatggtcgcttaacctcatcgcctccaaaaacccgaagctcgactgggtgacgctgacaaacgatctttccatttgggaacgcgaaaccacccggctcaagtgggccgaggaattcttgaagtcttcgaaggaggaccgtcatgttaattgaaattcatgccattcaaaatcacagcccggccaacctgaaccgggacgacttgggcgctcccaagacctgctacttcggcggagtactgcgctcccgtatttccagtcagtgcctcaagcggagcatccgcatgagtgacgaattcaagcagttgctcggcggcgttcgcacacggcgactggcgcaattgatcgctccaggcggcccggataccgccgagtttaaaaaggcgatcgcggttttagaaatctgcggcatcgcggcaaaagagaagaaagggaagaaaggcgacgacgaggaatctacgcccgacgaaaaaagcgccggagtggtttatgtgagcaaacaagcggtcaacgagatgtctgagcttctgaaaaccaagtcggccaagaccgataacgagctcgccaaggaatttgcccagataatcgctcgccatacgagcaccccggacatggcactctgtggcagaatgctggaaccaaagaaagcgaaaaagcaggcgtcggaggaaggcggcgcgaagcccaagggcggcgacgtctggaagggacttgacacaaccgttgaggcggcgctgcaagttgcccacgcaatttctactcacgcggctcgcccggagattgactactatgtggccgctgatgatgtgcccggtgaagacgcgggagcaggctttgtagatgaagcaatgttcggctccgcctgcttctacaagtatttttcgattgacttcgaaaccctcatcaacaatctgaagggcaacaaggaactggccgctcatactgtcggcgcgttcatccggggagcggcgttggtgaatcccacgggcaaacagaatagtttcgccgcgcacaacccacccgacggaatgctggtcgaaatcagaaactcacctctcagctatgccaacgcttttgcccgaccagccatagcccagggcgaacgagacatcatatcccagagcgtcgcgcaactcggccagtacgttcacgatatcgacaccggatacggcaaaccaacgaggcggttctggttctcgcccaatcttcgctatcccttgaccgttacggagggggataaggaaaacgccttggccgaaaacaatatcaagtcgctcgaggaattgatcgaggcagtcatcaagggaatcggccatgattgggaggaggttcagaaagtggttgtgaactcggaggtggcctgatgagcgcaaataccctctttctccgcctcgaagccccccttcaggcatggggcgatcagcagtcgaagtttgtgattcggcggacggctgacgccccaaccaggtctggcgtcatggggatgctttgcgcggcgttgggcgtctcccgctcggcggcgccggaaggctggcttccaaggcttagccgcctgcgcatgggcgtccgcatcgatgtgccgggggtccgctggtgggattatcacacggtgggcgccgggatgccgatgcgcactgccgaaggtggaaccaagccaggggccgtgctgacccgccgcgaatacctttgcgacgcctcgtttctcgtcgcttttcagggagagtcggacctcattgccgaactggagtccgcaattaaagcgcccaaatggacgctctatctgggcagaaagtgctgccctccctcgcgccctttactggagcatccggggggtgaatttcctgacttgctttctgccctcaaatcggttccctggcgcaagaggttggagggagacgatcagcccgaagcgctggattgcctgcttgattggaagtcaaccgaagagcagccggaggctcccgatgatgcgctcgtctggtacgacgtgcccgtgaccttcgacccgccctcccaccagccccgatttgtcattcgcaagcaactgcgcgttggactcgacggcgaagtaacgcttgcaactcagccagcacagagctacacgccagcgcctccccgcccaagagcggattacactaataccgagtacagaatccgacgggaaaagcggctcgacgacgactatcacttgtgcgtcttttgcaagtcgcccgccaccaccgtccagcacatcacctatcgccgcgcgggtggcaatgaactcgcggatgacttgcgctctctctgtcgcctctgccacgatgccgtcaccatgatcgaatatggcctaggcatgggcatggaccgcatcaacccggaagagccgcgttggcgcgacttgattatccaaaagcggaacgaaatcatcacgttccgctccctggagactcgccgcaggcgcctggtcgccgaggaggtggagtagccatgtaccggtcctgccttttgattgacgtcgggagtaaccccgaccggcctcggcccggaaggctgtggcttcggaatctctatcacgtccaccagcgcctttggatggcgtttccctccgagaaccgaaaatcccatgatcgcgattttcttaagcctttcaaacccgcggactttggcgagaagccggttcaggtagaacgcggggcgggttccggctttctttttcgcattgagccgcagcccgccgggcgggtcgtgattctcgtccagtccaactccgccgtgaagccggattgggactacgccttccacaacgcccgttttcttttgaatcctctggctgctcccccgcaggtagaggaattcgaccctcgcttcgccaagggccaacagcttcggttccgcatccgcatcaatctaagcaagaagttaaaaacgagcgcaaagggcgtcgatcttaccaaggcgggcgagggaacagatcgccaaggccgcccgaaggcccaaagcaaacgcgtagcgctgacctgggataaggaccagaaccccgacgatgtgatacgaaaatggttcgccgccaagggcgaccaaggtggcttccaggtggaaactttccgcgtcttgcaaatcgggtggggcgcaggaaaccgatcggacccgaggccggcgggcgatcgcatgaaatttcgctcagccttattggaggggacgcttacggttaaagacgcggatagcttcagagaaaccatcgtgggcggcatcgggcacggcaaagccttcggcttcgggcttctttccgtagcccctcgcacaccactcccggcagaggcaacgtgagagttctgacgccaaagcgagccccgaagcagcgcgccgagatcgcccgccgcatgtttgtgcagcgctttcccggtgtggatgtgcaggcgtattccgtcaccgaattgcggggaatggagggcttgcgcgtgcccgccaaatacgcggaactcggcgagcagtacggagtcacctggaaggggcgcaactacgacaaatccaactggaatctggcggacaacatcaatcgcgccctctcgacggccaatgccagcctttacgccttgtgcgccgccgtactctgctcgctgggttacctgccgtctctgggattcgttcacgacgccggcacgttgccctttatctatgatgtggcggacctgtacaaggaaataaccagtttcccggcagcctttcagtccatgcgccaggaccccaatgacaaaggcgacctggtccgcacgctgctgaaggaacgcgtcgagcaggagaaactgctccagagaattcccaaagacatggaggaactgtttgcatgacggtcatcgtcgccaccgacacgccggatgccattcgcggaatgctgaaacgctggtttatcgagccccgccctaatgtcttcgtcggctcactgaatcggcgcactcatgagaaaacgatcgagtacatcaagcgcaacgccgccgacatcggcctgctgatcgtcaacagctaccctaattgccagggcttcaaaatcgataccaccggccccaccgaccgcaagggcgtcgaagtcagcggtttgtggatggtggccgagaaatgggaggaagggacgacgactgcgccagctcaaaccaccgattttccccctgaatcctcaagctaagtcctttggaattcagggtgatccccacgcgcgtggggatggtccgtataggcccaggttatttgctgatgtcatagggtgatccccacgcgcgtggggatggtccggcccgaggctgtggcctacacatttgttttccgtgatccccacgcgcgtggggatggtccggcggcgtcaatagcagcacgaacgctggcagcgtgatccccacgcgcgtggggatggtccgcctgttcaccgctgattttatcgccgcagaccgtgatccccacgcgcgtggggatggtccggacaagcgcggttccatcctccgacaattgcggtgatccccacgcgcgtggggatggtccggccatcaattccgcaagggaggaaggcagagcgtgatccccacgcgcgtggggatggtccgggctatccgggatcgaaattcattctgacggtgtgatccccacgcgcgtggggatggtccgcacggccagaatatgttcctgtgggcgtcgatgtgatccccacgcgcgtggggatggtccggacgaaggcagccggcctctcactgatacggtgtgatccccacgcgcgtggggatggtccggagaaaatcaatgcctcaggcattcgcagtgggtgatccccacgcgcgtggggatggtccgccgctcatctgcgccatcacctggatgagattg

SEQ ID NO: 594 - DNA, 13199 bp, Artificial Sequence
  Synthetic Oligonucleotide
cggttcacccccacatgcgtggggaagaccctagaagttcaaagccaagccctaactacctcaaaggtggttgaggcattccagtgtcaacgcccatgtgcctgtgttcgctgactcacgctcactaaggtcggttatcggaatgcattgcctcctccggcccggcgtcgcgcgaccttatacttaccagggctaatccttcgaagtcgaccaattgccgccagtggttgcctgcctgacgataggaaaatccctgcggattcttgtccgtccagacctgcaatatcgtcccgctttccctggtatttttgagcgaccgtgcccagagctcgtccctgactctcgcactcggattgcccaggaaaactcccgtcctcggttccagaagccaccgtgacaatgcgcccctcaagctcgtcggcactttctccagtatcatcactaacaccgagcacctccgcaatatcaggtaagattcgttccattagtttgaagtcgtaaaacgcctggcggcactccgtacgtaccgccctttcaatgtcctgcggggcccgtgcggcaaccttgaaagcaatcggaatcgttgtctcagtcttgtacaggtccccgatgtcatagacgaagctcagcatcctgccggtatgaataaagcccagccccggggagtagcctgcagacagtatcgcggcatggcagacggcgtaaaggcaggcattggccgccgaaagcgcccgatttaccgggtcacctttggcccagtctttctggtcatagcgccgtcctttccactcaacgccgtacttggctgaagcctcggcataggcccgcctaacccggattccctccataccgcggatctcctcaaggctgacgatggttggtacgggcttcttgaaacgaaaattatacatgcgccaggcgacttccagcctctttgattcatcactggccaaccgcgcctgccaaataagtctccgggagctatatgtaccaccgatacccgccgaataaaaacgaatgccgtcctgtccagtccaggcgagtaagcagttattctgggagagcgatttcacggcagcgtgcgtaatggttgaccccggaccgagcatcaccacgcttagctggtcgatcggcaccggcgttaccgaatcaccctgatggaaactcaacccattgtcactgacgtcgagacggcccatttccagataaagatagctccagcggtccttaaaatgcggaagctcataaagggtgcgcacaactcactcccttgaccgggctacggacagcaatccgaagccgaagcccttggcggggccgataccctgtataattgcactgcggagagaatcagcggcggttacacggagtttgccttcgtaacgcgcatagaaaaagtgcctcaacctcccttttgcttcttcatcgtcggcaatctcactgctaccatctatctccttgcctttggaagctacaacataccctgtttgcacgttatcgaagcactccacgctaaatccataccggccggcacggctggtgagccacgcttcaatttcattacgaggtactgggactctcctgccccagttattcctgcctgcgggccggttttccctgtccctcttgcgggtagggttagccaacagccgaaaaacgagacactgtccgttctgaaaatgcgggtcatatggcttaattgcaggcgttgcggcaagcaagtgcatagcattacgaaaggcatagtcccagtccggtttgaccgctgattgtacgattatcatggcgcggcctgagggcagcgggtctatgcggaagagaaagccactgcggttatctcgcggtgagtgaatttgcctgaggacatcgtcaggcacctccagcttctttctgtcagacaggtaacggtcttccggaaagcggccgggcttatatggttttaagaaaagcgggtcatgttccttagattccgccgaggggaagcccatgcaaaggcgctgatgtacacggtacacgttccgtaaccacagtcgtccgggatgagggcggtcggggttgtcccccgtattgacaagaaggcacgaaagatacatggctattccacctcctccggactgaggcgacggcggcgggtctccaacgagcgaaaacagatgatttcaccccgtttctgaatgatttcatcccgccatttggggtcttcggggttaatgcgatctaagcccatgtccagaccgtattcaatcatagtgaccgcgtcgtgacagaggcggcacagcgagcgcaggtcatcgtgagtttccccgccgccagcgcggcggtaggtgatgtgctggacggtggtggcgggtgccttgcagaaaacacaaaggccatagtctgctcttaaacgcgtggcgcgagccttcttatattcagtgttctgatagtcagcacgaagtcggaggggtctgggagtctcgctttgcgccggcttttctgcgatactaacctcggtaccaacccgtagttttcgtcgaataacaaagcggggagaatgggaaggcgggtctaacgtgagcgggacatcgtaccacacgagcgcatcagttggtgctacaggctgttgcggcgtcggaagccagtcaagcaggcaatcaacggtttcttgcggtgggtcgtccttcagccgctttcgccatgggactgattggagcgccgaaagtaagtcagggaaatcaccggcggggtgttccagcagcgggcgtgacgggggacagcatttgcggccgaggtaaagtgtccattttgggttcgttatcgccgttcctagttccgtaaccagtgtggcatcgccctgtagcgcaacgagaaaactggcgtcacacaagtattcacggcgggtgagtaaagtctcctttcctgattcaggcttcttgaagccaccgtcagctttccgcatgccaatcctggcgccgacagtgtgatagtcccaccagcgaacgcccgggctgtcgatacggacacccattttcagggcagacagcttcggaagccatgtttcagcggcggctgaccgtggtatgccgagcgccgcgcagagcagtccgataacccctgatttagttggagcttcagcggtgcgccggacaacaaatttggactcgtggttgccccacgcctgaagtggaccctcgaaccgtaaaaacagggtattggccatcatgctgacaccgatagatttatgatagctttcttggcttcttcccagttacagccgatggcgctgaccaccgccggtatcaattcgtccagagacttgactttgttccctgtcaggtcgatgtccttttcgacctccctttctccttcctttacctttgttctggcagtcaagggataccgcaggttaggagaaaaccagaagcgctgttgtggcgggccaaaaccggtgtccagatcatggacgtactggcccagctgggcgatgctctgggagataatgtcccgcccatctcgaacaaccggtcgagcaaaagcattggcatagttaacaggcgtattgcgaatctcaaccagtatgccatccgggtaattgtgtgctgcgaagctgttctgcttgccggttggggtgaccaccgccgccccgcgaaggaatgccccgacggtgtgggccgccaggttgatctcgccgcccagattcttgagcaactgttcccagtggatggaaaagtacttgtaaaaacaggcggaggtaaacatggcttcgtcaacgtagcctgcgcccgcatcagtaccggggatgtcatctgcggcgacgtaatagtctacttcgggacgggcctcgtgcgtggagaaggcatgtgcaacctgcaaagccgcctctacagtagtatcaaggtctttccacaagtcgctggcctccgaaggttccagcattctccctgacagtgccatatccggtgcaaagacgcgttcggcgattagcctggaaaaatcctttgcaagtacggcgtcgtttttctcgccgccgttccctaaaagtgcggacatctcctttatggcgtcacgcgtggtgtagaccagcatcttgctcctgtccgcgtccttctttggcttgaaaccacaatcggaaaggatcttctcggccttctctacgactttggggtcggcttgtactttttcatcaaacgggtctcctttagtacccctggcgatcaatttcgccaactgccgtgtgcggacgccattgagtaatgctttgaactcatcgctcatgcggatgctgcgcttgaggcactggctggagatgcgcgaacggagcacaccgccgaagtagcaggtcttgggcgcacccaggtcatcccggttcagattggccggactgtggttctgaatcatgtggacttcaatcagcattgctattatcctccttagttaccaagaaattcctccgcccacttcaggcgggttgcttcacgttcccatattgacaggtcattcgtcagtcttacccaatcaagcggtttgccagtatcggctacctgggccagcgcccatcgcagggctggctcaatactagccaacggcataagcaacatttcatcgaatttctgttgaaatcgccttcggctgttctcgtcgtctggttgacaacgacgcaattggcaagccagcgtgtcaccggtagaatgtgggatgggcgaaaaggcataaagcttggcaatcagccaggctacttcccgccgcggtgcaaacgggcccttgttctgtaacggccaccatagaccggcgaacaggtcaaagccctggacggactcatccagaccctgcccggcatgtattcgcaacaggccgaggtcaccggacttcaactgcgtcaggatctcaatgtattcctcagtcgctgttggacccatttacttcctcgccttccccttgctgggtttctttgctggcgtcgacgtcgatcccgtttgagggagtgcattgccgatttctcggcgtcgtttgactgctaccgtggttacaccgggcgctaatgacctagaaatgatttgcatcatgggtcggtattcgctggccgcgcgctcccacgccgtgttgtcaccagacagcaactcttcggctttcgcaaagaccctgctttcaacgtggggacgaatagcggcgagcaccgaggctatatcaatatggtttcgagatcgtttttcgtcaagctgcatcagctttcggcttagattattgtttgactgttgccattggcttagctcatcgatagaaacgaatgagcctggccaggggagaaacaattccgatgcctcgaagtatttattctggtctgacgaaaagccaactatccacgctctggtccgctccgtttggggattctggagtaacccagccattattttggaccactgcccggcaccggcgtcagcgcttcctattacgtctgcccaatgcagtgaagtttctccgttcttggctggtttgtagataacgtgcgggtcacgccagacgcgcttagtgccatcatctgtcttggcactccctttgccagcaaagacgctggacagtatcacattatccagacggccacacgaaatgcagtgtgtcaaagatttctgcggctcgtctaaccaaactcggcgtgggagccacgtcagcccagttagtagcggtacctctcccaccccgggaagtggcaagtccggcttttcccacgctggcgttcccaaattggacacctgccgccacgaaagccgcaaggtctccgcaagggtctcgcccacgggaatagcatagattggcggctttgcgttgatgccgggcgacttgccctgtcccccctgtgtcgcgaacatcggtagccgcagcagtcccaaagcacaacatgccggacacaagcctttagttccgtctatcgagtgccgaaaatggttaaagttagtgcctgatggtatctcgtgaatgaggtagttaaccgtgagtagtctgtcgccctgttccctgtattgatagaatctcttaccaccgccaagcaaattgaaacactctctattggtatcgagtttggaaaaccaatcaattgggaaggattcttcgggggcagtgtctgtcgtagtcggtgggtcgccccggcaccagtaaagcagagccagcagaaaccggaaaatcgccacgcggtccattggattgctggcggcaatctgtcgaatggaacctgcttgtgttagtgcctctctaatccctacccgtgagacattgccatctgtccagaggacgggaatccactgtttttcaagcagattgtaggtcaacgtctttagcctcctggccctatttgtgaccgctagctgaggtggtccgatacccacggtgtattttagcatggtgctgtgacacggttgtcttagcttgggagcttacctgcgccggccctgacgccccttcttaaccggtgagaccggcgagacatcatcatcaaccatcggctcggtcgccccgcccatccccgccaccggcgcatatttctcctgctgtacctgaagcttgaagaggtcccagcggctgtagatgcccataaggtcgacggcatagcggttccggtcaagctcggcaaagtcgaggtccccgtagacgatggtctcttcgccgtagaccgggccggcaatatactcgccgtgggggctgataatgccgctcccaccgtggaagcgctggggatagttgaagtggctgttgcggtagaagtccttcggctggtccttctccctgaagtaggcgcaggagacgacgccgaagcaccggccgtgcagggcggcggcacggctgaggacatcaaccgtggtctccatcgccctggtgcccggccacagcgagcagtgtatttccatgcccagcgttatccagtagtaaagctggaggagctgttcgtgctcgccgcagattgaaccgccaattttgccgattccggtgtcaaagaccgctctgaggttgtcgccgccttcgccgggcgtgtggaagagccgctcgtggacggtattgcagattttgcggtgggtgcccatgattctgccttccggactgatatagagggcggagttgtacatgcggccgcggtactgcccgtcgcgctcgttaatgcccatgacgacgacggctttggcccgcttcgccgcggcgcacagggcatcagtttccttcgacggcacctcgacgcagttccagagaaacctggcccagagctcgcggaacagtgccgggtcggcgaagtcgttagaccagtaggtgaaacagggaagccagccttcggggaatacaaccagccgcgcgccgtttttaccggccctgtcaatcaggccgacagctttgtcaacggtggcgccgaggtcgaaccactccggtgccggacggatgaccgaccccgcctgaacggcggcagcacggactttagggaacccccgcctcccggccatcggccacctccactgcttacttttccggtgacggccacaggtcgggtatgacgaagtcaagcccgaggcgcttcagcgtctccggcttcggtttgccggtctcgcggtcccagccgagctcggcgtacagggtatcccgcatctgcggccagacggcattggcgcttctgcccttgcccagcccctcggtaaccgggccgccgtagcgcggcgagggtgcatcgagcttcgggtcgtacccctgccggcagttgaaggcgcggagcaggttgaccgacctcaggccgacgtcgaccgcctccggccaggtcatgttccagccggtggcggcgttgaccgcccgcatcaggatgtccggcttctcctggacggtgaacttgcaggcgccgaggcagtcctggaagggcgagatgcccttgattctgccgacgaacctggccacggctaccgggtcgtaggggtcctggaggtcttcgatgccgatatctttggggtcgacggtgacattggcctcgctggagccggtcccggaagtagcgttatcgacaacgtacggccagacgcggcggtggtcgtgggtgcggggggtgttgccggccatggtgtggatggcgaactcggtggccggtggccctattttcctggcggcgcgcatgacgccctcggccagccagctgcccggcccctgccggtaggcaatcttgttaatcatggcccgcaccgcgtcgatatcgccccatttcatctcgataccgtcaaggtcttcgggtttcagcacacccttctgacagcactccatgagcatgccgaggagccagccggtctcattgacgtccatgccgagccggtcgacttcgttggaaagcccgataagcgggatggcgttgtagatgccgagctgtgagcccaaagcggcaaagcattcgtactccggcatcttgccttcctgcccggccagcggcccatccgggattttgactatctgggcatggttggcactgcaggcccagcaggtatgccgccgccaggtcacgttgttgagcaggtactccggggtaaaggtgttcaactgctcatcggtcatcgggtaggtatcgatgctctcgttgaggaagggcgcccggcagatgggggcgttgcgcttcataatccacagggtgcccacctgataggtggggtagtccttgatggcgttgagcatgtctctggcggcggcggccagtgcggcatcgtcggcgaccggcacggcattcttgccgcgggcgacggcgatggccttgaggttcttggagcccatgacggcgccggtgccgttgtgggcggcggcgtgacagcggtcgcccatgataatggcaaagcgcaccagccgctccccggccggcccgatggcgaagacgctcatgctggccggctcatagccgagctctttcttgatgtagtcttcggtgtaccagatattttcgccgacgaggttcgggcattcccgcagttcggcctgcccgtcgtggatgtacaggtaggaaagcttcttggcccgaccgtggatcacaaggccgtcgaagccggacagcttgaggaaggcgccgaggaagccgttggcctggcttgaggtcgagccttcggtcagggcgcccttggtcgtaacgttgaaggtgccggtacccgccatccgggtgccgcccagcgggccggacatgacgatgaagcggttctccgggtcgttccaggagacaccgggctttacttcttcgtagaggtatttggcgccgagggcggtgccgccaacgtacctgcgcaggactctggggtcaagttcttcggcggtgtacttgcggttggtcaggtcaacatggaggactctgccggcgtacccgggaatggtggtcattatggacctcctggggaagaacgttaaagatgcggagattataggcagcggtcgaaagtggtgtcaaatgaaaggggccgatttaagccttcgctgtcggcagggtgaagcttatggcggttccttcccgggcggacacatctcccccggtgccctgtcgagcagttcggcaacgcgtttgtccagcgccagcgcactccggtggatgttactggctactgcggcggcatcgccctcgccgactacgttagtcaggagttcgcttgaggcgatgaccgccgccagtgagttccgcatttcatgaaccagcacccggaagtactcgtcccgacgggccatctcggcctgcagttcctgcctcagccgggtttcttcctggcataccttctccagttcggcacgggccttgcggagttccgcctggctggtgcggacggcctcctcggcacgcttgcgttcgctgacatcgtggaggacgatcagccgtccgctgacccgtccccgccggtcgtagaggaggaataccctggtctcaatgaacctcggggcatcccctaactgcagggtctcgggcgggatcggccagccggcactgccctggacaatgagccccggccaggcgttgatgagactttccgcgcgcttgcctacggtcaggtcggccaccgaagagagcatctgtcgggccgccgtgttgatgtcctttatgcggtggtccctgtcgaggatgatgataccgtcattcaggctgttgataagtacggtgcgggcgacggggacgacgccgaagagctggaaaccgtagaaggcgaccacgtagatgaggccggtaatgatgaagccgaacggggtgaggtcgaggccggggatcgggctctgcccggccaggtagataaagttcccgaccaggggtatgaaaatgccggccagcagggcggccacctggcggcggtagacccgctggcgcccgatgaccacgtagataagcagggcggcaccggttaccaccaacccgtagttgaagacggctattgcccggaaggccgccccggggtcgtagaccaggatgtcgggacgcatcgggaccggtgcggtgcctgaccagacaagtccgtgccattcgttggtgaaggccaggatgacggtcgcggccgggatgattgacagcagtgccaaattgcgggcgttaatccaccggttactgccggtgaaatcgcaggcaaagaggaaccacagcgcgccggcaccggcaatgccgaggtactggaacttgctccacaggactttggcccacggctccaccaccattgcctcaagggcccggaataaggcccagtcggccatggccagcatgaaaatggcgaagaaaacggcgccgggggcggggcggcggtgccaggacgcccaggcgaacaggagcgccagcgctccggcaagaatgaggaccgcggcatacggcgggaacacccagctcatgctttcatgtctctttaccctgaagtatcggcgtcagggcgttaactagggtacgcaaatgcgggggtagagtcaaatcccgcgtgcgtgtcatgcttctaaccgtgatcggcgggctttcgtgacgtagtccagcagtccccggctgaagtgtgaggcggtctggaggccggcagggtggatttctacgttattaaggtactggaggcggaggacatcaccggccggagtctccggcactatgccgccgaagaaaaagccgagaagttccatggcggcgcaggacgactgagccgccgggtcttccagcggcgggtccaaatagatgcagtcgatgcggcggttgcagagctcgtcaaagtaggagcggacggcggtctcaaggtcggcgccgtattccaaaacgcggatgcaggcatggcccgccgccgcccggatgctgacaccgatgcgtgaccggggaggcagaccggctggtcctcctgagtccgccgcgcctgagaaactccgctttatcccggcattttcataaatgctccggatgattggttcatggtggaggggcgggtacaccggcaccccggggcgctggttgaaggccatgtaaaaaagaattatcgaactgcggcgcggcgcttcccggtccgatgccctgccgggaactgtctttgccggaaggaagccgaggagcaccccggtctcgcgaaaaccgagggacagcgccgacttctggctgtaagggtgcgccgttaccgcttcggcgaaggcaccggccaggccgtcttcacgcgccctgttcaccacgcactgcgatagcttttccagcaggccccgcccgcggtagcgcgggtcgaccaccgcctgccccatctcccccacccggtcttcgggccggtggcgcaccagggcaacatggccgacgatttcgccatccggcgttaccgcgacataggaaatgaccaggccgcttttcaggtattccctgacggtctccggcgagtagatggagtcgcgggcgtagccgtagccgtagcaccggtacaccagccgcgccaggtcgaggccttcgtccggcctcatcagccgcagttccaccggcgcgtcagacggtaccggctttgcggtggcttgcggcatcgagctttccggcacgatgtcccagaggggcaggctcctgacgatttccacccgtttgacacggtgccccagactgagcaagtccacctcgtcggcgaaggcttcaaccgggattgtccccggcccggacctgccggccggctccggtttttccaagccggaagacatgccccggtcttcgatggtgaccgccacctgccgcggccggcgcaggatggtgatatcacaggtgccgtcttcgcccgggtgggggcatgctcaatggcgttcatgcaggcctcttcggtcacccgggccagcttttcggcatcggtggccggcatggcgagctttaaggcggtctcgcggacgaagccggctaccgccggtatcaactcaactccggcctggacggtcagtttcgctatctggcgctcggcatgactcatgtcgttcagaaagccgacgcctcttccaccgtgatgcggatgacgttcttgaccacggctttgcgccgttccagggtctctctggatatctggtcgaagagcgggccggagctgaggacctccgccgtgccccagatgcggcatcccctgcggttggccgggttgaagaaaaggatggagattttcgggttttctttgaggttggcggtggtgcggggtgactcgacatcgccgaagcagagggtctcatcgtcgagcacgcggagcgaccctttgggggagatgttcggcttgccggtcttatcggcggtggcgaccatggccggcatgccttcggctatcagctttctaagttccccggtcagcttcatctcattatcacctcctgcacgggccaatggcctgaacggagaaactacgcagaaacatgttagtgccgggaatatcgggctgtcaatcggtggccgggcaggccgcctcgttcccagcatggaaacgatatgatatactccgcgtccggaaaacagtcaccccttccctgtcagggaagaggtcggcccggactgtgagcggcctcacacatacatttcttcctttcggggaagaagcaaggaataggtgtaattgatggatatttaccttgataccgccaatgtggccgacatcaagaaatggctggccatggggctggtcgatggcatcaccaccaaccccagcatcatgctccgggacgggttcttcgacctggagtccggggccagggacattgccggcctcgtcaggccgcgcccggtaagcgtcgaggtcacc

SEQ ID NO: 595 - DNA, 13170 bp, Artificial Sequence
  Synthetic Oligonucleotide
accggttcacccccacacgcgtggggacaatggttataacgcgtttctcataccggattctctcggttcacccccacacgcgtggggacaatgtcgagcgtccgcgccttgacgatcattactacggttcacccccacacgcgtggggacaatggatcgaagtgaggaagaacataatcattgaacggttcacccccacacgcgtggggacaatgtgaacgggagccaacgctcaaacttgcctcccggttcacccccacacgcgtggggacaatgtcgcagattgtgtcctcaatggactcgtccacggttcacccccacacgcgtggggacaatttgctcaatgacaatagcgtccacggttgtcccggttcacccccacacgcgtggggacaatgacaaagcgtcgaaaagtccggcggaaaggtgctggttcacccccacacgcgtggggacaatagggttgcccgtgtcatcatccataccgcctccgaggttcacccccacacgcgtggggacaattaggtgcccctggcgggcagaggaataagaccccggttcacccccacacgcgtggggacaatgacccacgcatcgtaaaatacacccttgccaccggttcacccccacacgcgtggggacaatcggccttaaatttttcagtcgagcccgtcaaccggttcacccccacacgcgtggggacaatgggccgtaggcaaagtcctctattccccgccacggttcacccccacacgcgtggggacaatgtcatatcgtctgctggtatccatgtcatgaccggttcacccccacacgcgtggggacaattacctcctcctcggagaacaccccaaggggttcggttcacccccacacgcgtggggacaatcccaaggccctggcctcctcaataggcatctccggttcacccccacacgcgtggggacaatgtcatcgtcgtgccgtttgcggcaacctttgccggttcacccccacacgcgtggggacaatctcggcctccgggttcggcctccgggctcggccggttcacccccacacgcgtggggacaatatagccctggcattgagcaggtcattcccggacggttcacccccacacgcgtggggacaatgccgagttccgtgtaaggcagaaaaatgttgacggttcacccccacacgcgtggggacaatgcctgtatcccagcctccattgccaccctaaccggttcacccccacacgcgtggggacaatgacggggaggatttctatacccaggctcgccttcggttcacccccacacgcgtggggacaatgaatggtcatatcgggtttttggggctcggggaggttcacccccacacgcgtggggacaattactgaagtcatcggtgactccatcaaggcattcggttcacccccacacgcgtggggacaattacctcagccccgatcctagggaggcggtggtcggttcacccccacacgcgtggggacaattcaagatcccgaagcgtcaatttcggcatgaccggttcacccccacacgcgtggggacaataccaccggctcgccccgcttcttcccggagaacggttcacccccacacgcgtggggacaataacaaaaggtgtgtgttcaactcggctgttaacggttcacccccacacgcgtggggacaatacttaaaaaatcctctgtttatgggatccttacaagaaaaagcccctcgaagtcttcgatagcgcgggttgtctccccccaactttttatctggaaaccctgttcattgtcactgctgtggagcatcaggcacccaccccctcgagcctccgaacaggctttgtcccatagcttttcccgaaccagggctgataccctgccgacaaaaacccctgctttcggttcaagcaaccaccgggtcaattctcctctcaaaccgggcggtacccgttcaaggatcaagaccagcatcgcttgctcctctcacgtcatctgttgagaatgatccagtccgccagccacttccttttcggcgggatcccataatccgcccggagaagaggcatccagatcaaaacgtgaagcttcatccgcgtttccgcttttcgggatcataagaatgttctgaatatcagggatcattctttccaacaaccgggaggatacaaatttgtcccgacaggccaaacgaacacgcctctccaggccatcgggcccttcaacggctgcactaaaggcaactggaatggatatctccgctttataaaggtcggctatgtcataaacaaaggacagcatctttcccgtgtgaataaatccgagggccgttgaaaaacccgccgacacgatagccgcgtggcatatcccgtataggcaggcgttggctgtcgacagggcacggttgacgggatcggccctgctccatttatcccgctggtaattcctcccggtccatccgacgccggtctccctggccgcccgcgcataggcatcacgcaccctggcgccttccattcctcggatctgccgcagggtcagatcggggccgaatttttctgagaatcgcatttgatacatcctatgaaccactttcaaccgaagaccctcatcggcccatagcatggcctggtgcagaaaattcctggagctgcgggtttcgcccattcccacggcgtaaaaacgcaccccctcctctccgcaccaggcaatcaggcagccatgatcggctaggaccgagacggctgcatgagtgatcgatacgccaggcccaaccatcagcaaagccaggttggcgcagggaacaggtacttttccttcggcatcatgaagggctatcgctttagcgtcctggtcaacacggcaatgctcgacgtacaaatgactccagccgtctcttagcttcggcagtacccggaggtcctggactctcatttccgtcacccttggcctttgggaggacccggagccaccgataaaagaccaaacccgaaggccttgcctgaaccgataccgcggatcaaggcccgatgaaaaagatcggggtcagtgacctcgaggaggccgttgtagagaaccgaacgcagacgctggcccttgccgtttttgttcatatagacgtaccccagctgaagggtcgtaacctcctgatcgattgagaatcctcccgagtcggcatgacggtcaagccagtccaagagccggtcggtcgggacaggcacacgcttcccgacagattcccctcttgcgtcctgtgatcgttcgcttagccgcctggtcgggttcgcctcaaggcgaaaccttaaacattggtctttcgaaaagcgcggcccaaagggtttcacctcaggaggcgccgccaggaggtaaccagcattatgaaaggcgtagccccagtcgggttccacggcggactgaacgatgatcgcggccctcccgccgaggagagggtcgatgcggaaaagaaaccccgaatccggggcgcgctccacgccgacttgcccttctccgaaatccacgggcttgtagggatgaaggaagtcagcatcctcccctttcctggatcgggagggaaaggccatgcagaggcgctgatgcacgcgataacggttccgaagccataatctccctgggcgagggcggtcgggattttcgccagtgtcgatcaataggcacgataggtacacggctattcaacctcctcggaagcaagacgccggcgccgagtctccagggatcggaagcggatgatctcctcccgtttctgaaggatgaggccgcgccagcgggggtcctcggggtcaatgcggtccagccccattcccaggccatattcgagcatggtgacggcatcatggcacaggccgcaaagggaacgcaggtcctccagggtttcgtcaccccccgcccttcgataggtgacgtgctggacggtcattcgcgggccgggggatttgcagaagacgcacagcccggcatcggcttgaattctctcttgacggcgcttgcggtattcaattttggtgtagtccgcccgcgggcgcggtttggcagggtggggcggctggaggggctctcctaccgcgggggagacgacgccccgcagaaggaaccgcggttcgtgtaccggcgggtcgaagcataggggcacgtcataccaaacttccgcatcgttgggggcggcatcgctttccggagtaggccgccagtccagaagcacttccacctttccgtccggcggctgtgagtcggccgtactccgcgggttccatgggacggactgcagggctccctccaggctgccgtggcgggaaggattctcccacgagccacttcgggccggcctcgcaaggacaggggcggagggcgggcaggatttacggccgaggtaaacgggccgcttcggagatgatagggcctcggcgacctcctggatcaacccgatgtcaccctgtaggcaaacgaggaagctggcgtcggccaggtactcccggcgggtcacgagcgtcccctgggcgccggtcttcaggctccccccggcggtcgccatcccgacctccgcccccacagtctggtaatcccaccacctgacgccccgccggtcgacgcgcacgcccatggcaaggctgttcaggcgtggcaggctctcccgcgccgcctgccgagacaggcccatggcgcagcagaccagccccagcacgccggacttggtaggcgcctccatggtgcggcggatgacgaacttggacgtatcgccccaagcctgcagcgggccttcaaggcggagaaacaacgtattggcttccgtcatttggcggcctccccgtcgctcgctgcctcctccacttctttcatgacccggtccagcagttcgccgaactggccgaactcgttggagtcgccgactaccggacgtacttgttcgtgctctttcaagcccttatcgacccaggcaaggcggtgccgccggttgggtgagaaccagaaacgttcggcctcgatgccgtagccttcaaccaggtcgcctacatactggccaagcctgtcgatgctgtcacggatcaggccgggctgggacccttccggcacgggatcggcgaaggcgttggcgtagctgacgggagtggctgtcttgctttttacctcgaccaggatcccctcgggggggttaaaggccgcgaaggagtgctgttttccgctggggtgagctttagccgcggcatcgaggaaggaccggacggtcgtgcaggccaggtcggtgtcgccgcccaagttctccctcaactgctcgaagtcgatcacgaagtgtttgtagaaacaggccgagttgaacaaagcctcattgacgtgggcggcgccggcgtcctgaccgggtatgtcgtcggcggcggtgaagtagtccacctcgttcacgacggcatgggtggagagggcatggcccgcggacaaggccgcctcaacggtgaagttcaagtcgctgaaaagactgtttttcgcgacttccgtcatgcggccgttcaaggcgatgtcgggtacactgggcttctcggcgatgtattgcttgaacttttctgccagtttcttgctgtccgtcgcttctttcagatccttcgccatttccttgatggtatcggtggaaaggaagaggagcatcttggagagttcctctgctttcttttcctcgtcatcgtcatcgtcatcgtcatcgtcatcggcttcgacgtcgacgtcgtcttcgctcttggccttttcctttttcttcccctttcccttttttttcggtttcacgccgcccaattgcaaagcttctgcagccaatttttcgagttccctcaggcgttcatctttagaaggccgctctttgaaaagttcgatcagttcccgaggcaccaggtcgaagtccccggcataagcgatgcgcgccagcagatccgccagcctccgggtccttactcctccggccttctccaacgcggcggcgaactcatcgctgcggcgaatgctgcgtttaagacactggctggaaatgcgggcccgggtggcgcctccgaagatacaggttttgggagcgccgaggtcatccctgttcaggttcgccggactgtggttctggatcatgtggatctcgatcagcatttttatgtcctcctcctttttttctcgatcaccttcagatacatttccgcccataggtcgcggacatcacgtccgcggcggtgttccacaccccggtcccagatcgagagatcgtcgaggagctgcacccagtccaggcccttgacatcccgcgcatgaggtacgcggccggcaacggccctggccacctctcccagggcccaacgcaaaggcggctccagggaggaaagggacgagcaaagcaggttatcgaaccgggttctgaagcgcccggagccattaccctctgcgggttcgcagcgggccaggacttcaggcaaagggtgccccgtgcttgtttcgggccctacgtgggggacgttgaaagctccgtatagtttggcaacgagccacgacggctcccggcgtggagtggcggggcttttcgccctcagcggccaccaaagaccggtgaagagatcgaatccctggagcgtggcgtcaagtcctctcccctgaagactgcgaagccgggagaggtcgccctcctgcagggaggaaagcctcttgatgtattcagcggtctggctcatagagagtcccccttctgttcgtcactcttaggttcgcctgggaccgacccgggcgcgcccgtgccggaaaggcgctctgatcggccaaccaggctgtcgatccctcttctcagcgactctcgggctttattcatggcctcgcgccgacgaaggggtgacccgatagttgtcgccgaaataatgttaagaacaacagggagcaattcgtcctttaaaacctcctttgtatccggacacccgcacaactcccgtttcaatctcgcctccagcgagggtgataacgcatcgaggaaagccatacgctcaggatgtttacgatcagtgccgggactaatagagcgcaaaagaccgttcattttacgcagtgcttcttccactgtttcaatcacttcgatccgacagtcatccggaaggttgatactggcagcgtcctggtagagtcctttgtttgccgccgggccagcgatgatagtccgaatcccttgatgtccactagtcttcgacatcagccccgctgataaagcacgccgccaaaaacggctacgggttgcgactttcgcgccgggcgaagggaagccaagggttgtttgtttcaactggtcgggcttgcccttccgtaacgcatgcctctcggccgatacggcatcatctctcccgccgctctgcgttttttcgacaaggaccaggtgtgggtcgagtaaccagaactttttttcgttgccacttgttttgaagggaggtttccaattacccgtgaagacgtgttcgcgaataagataggcctcctcggcacaataggaacaacgccctttttcaccttctggatcggctagccagagtctgcgcgaacgccacgcaaatactgttacgatgtcaagttgggtttcaccaggcggggcattgcatatccaaggtgggtttcggtttaaagaaaaagtctcgggacagttcaaaaggaaagtctgttgcagtgttctaccctcttttataacataggcaggcgcagggccgttgaccgccgcagtataacaaccaccgccgtaggcgtttgcccaagtgctgaaccgaatgataccaagggcacagcacgccgggcacaggccatattccttatctcgtacatggctgaagtgggcaatcttggtttcagtagggaattcgatcaacaaatcaccaatgggacgaaaatcttcatgatcaagtcccgtcggccgggttttggggtcctttttctttttggcccttctttgatgatcgtcccactttttttgcttcgccttcagcagtccgtcggggagagttttatcctggtagaacctctctccatcgcccaaaagatcgaaggcggctctgtgttcctccaacttgaccaaccagtcccccggaatgtccgcacccctttcttccagttctgccagggaagacttggcgttttctttgcaccacaggagcaccgccatcaaaaagcgcgggagcgccaccctgtccatgggattgctggcggcgatctgccggattcgcccggcttctttcagtgtctcaatgatcccgagccggtcggttttcccatcgacgtaaagaacggggatccatttctcttcaagtaagttgaaagtaccctgtgttcccgttagatccatacagctcccctccttataatgaggtcggcggatccctcgcaacaagcctcaaaggccaatcggggcaggcaaaggtttggaccgccgcagtatttccgctctccgtaaagtcttttcgcccgaaggcttgttttcctgttggatcagaaagcaatcgcacccggaaattaggaatacccacattccagggcatcatcgccgataggatccccaaggggaaaatcacagtcttttgaaccaatcctgtccctatgttcttcggccctttttgtgtgggttgctgaagtgtttggttaagatcgaactgaccgtctggtgggagtagccatttttatctgatctttgagaagggcaatggccttataataaatcatttcccaattttgtccattatgccagccccttgcgccggctttttccttacctgacctctcaagttcttgttcttcccctgcgtcccctggggtgcaagagatcaagtgcgccgacggtaaacaggaaacgggacaagaacaggcagatcgtcgctttgcctcaagatggccggttcgagggatccgtgcaaaaggtgcgctggttattgtttcaatgcaaataatgtgagcgtggccggatcaccgctcaagcacttttcgcacacaggagacggcgaaaaggggtatgttggtcacccatgattcttccctgtgatcggccattgaaaaccgtagggcccgctcaatcccgaattttcttgtgaaatatttcaggctcttgccctggaggttgaccgacgatttcacttctatcggtacaatactaccctttcgctggatgacgaagtcaacttctccggtcgacttttccgcggagtaataaaagggatggatccccaggtcggccaacaactgcaccaacacgtactgctccgccaggctgcccttgaattccctgtatattcgctctccttcgaggagaaccttgatatcgacgtctcccatggctgtcaacagcccgacgtcgtgaataaacagtttgaaggccgagatgtcccggtacgcggccagagggattcccggttttgatatccgtgacacttttatcacgagaccgcagtccaccagccactggatagcatcctcataatcctttgaccgggaccctggcctgatatgcccgtaaatgaacttgctgttttcttttgaaagctgggaaaggatactcccccagacgagtcgggccctctccgtcgtattgggaatgatatgtttggaaaaatcctgttcataaagtcttaaaagatccttctgataggacctgacctccctatagtcccctgtctccacaaaggtcactacggcttccggcattccaccgacgaagaagtattgtccgagcaatgtagcatacctgtccttgaataccttcatcatttcgaagtcgcaattttccagcgtggaaaggagatccccttcctccttggcctggagaaattccggaaaagtcatgggatacaggtccaggagctccactttgcctaccggaaaagagatggcgctatgatgggccaggcccagcagcgaccctgcggcagcgatcggtaattccggtctttcttcatgaaaatacttcaaggattgaatggctttcggcacttcctggacttcatcgaacaccaacagggtttcagcgtcgatcctggtaccggtctctatcctgaaagcatccagcaaccgctgaatgttgaagtctcccttaaacacctcttccattcgggggttgttgtcgaagttgatatatgcaacccttttgaaatgcttctcaccgaaatgtttcaggatccaggttttccctacctgcctggctccctgcatgatgagcggcttcctcttcgccttgtttttccacttaaccaggttttgcatgatcttacgatccatgaggccaccccccggaaaacatgttacattttttcgtcggacttttcaataaatccagcattttttcgtcggactatccaaggttccctacattttctcgttcgacttcctgttcggtggaagttgataaaggagggcctggggtgagaggatgtgaagactgtcaggaagcgtagccgtgcaggggtgtcggcggtcagggatttattgtcccttgccgtccgcccctcactacttcttgcccaattccacttccaccctcttgtacttcacgccggggagggcgtcggttatcttccagcccctcttggagaggacgcgcccgtcaaggataaccaccctgccgcggtcgcttttgctcctgatgagcctgccggcggcctgcttcagcagcagtttggcccgagggaggacgatgtcgaagaacatgtcggggccctcgaggatcttcctggtgaccagcacggggtcggcagggtgcgggaagggtatccggtcgatgatgacctgggtcagcccctcgccggggacgtcgatgccctcgcggaaggagacgctccctacgaggaccgaggataggtcctggcggaagagcctcagcagttcgctccgggggagttcgccctgctcgaggacgcggtaggggtgctccttcgacctcagacgctccgatacggcccggaggagcctcagagagctcagcaggaccagggtgctcccgtcgttgtcgtcgcagagctgttcggcgatcctggcgacgaggtcgtcgtagccgtcgtcggtcacggcgaggcccaggtcgacgacccagatggacatctgctcgtccaggtcgaagggcgagtcgaggacgagcctctcggtggcctgcagccccgtctcctgctcccagaaggagaagtcctcccctatggccatggtcgccgacacagccaccagggcctccaggggcttggcgaagaaccagtcgcttatgaggtcgccgcagaaggtaggcgagctgttgatgctccggccgtcccaccagtaggcccagagcgggaagcggtccaccctggcgcaccaggcggtgcggtgcgacaggtccgccacgctgtccctccactggtgaaggagggccgccgactccctgtcgtcggcgccgttcttctcgggtggctcaccggcggcctcgagaatctccccggcgaggccctggagcgggccggggccgtcgggggggccggcttcgtcggtgaatatccggcccgcggggacctccttcttccagaggtggaagagcctttcagactcctttttcacctcgtcggccaggagggccagccgctggcggtcgtggtcggagacccagtccatcctggggaagacgcgggccttggcgaagtccatgaccctggcccactcctccccggtggcccgcagcgaggcggccgaccgggcggcctcggtgagccggtgggcctcgtcgcagaggatggcgtcgcagggcaccgggaatcccctcccggtggaggcggagtaggagaagaagaggtggtagttggcgacgatgatgttccactcctgggcctgctgcagaaccctgcggaggaagcagctctccctgaaggggcagccgttgccccggcacgcgtccgatgcggccgacaggacggatatgacggggtgccccggcgggagggccagttcggagaagtcgcccgtctcggtcttttccatccaggcgacgagttcaaggacgaggtccggctcgaggtgggccagcagttccctctcgctcatctccttgccccggagcctgcagaggtagttggcctttcccttgatgaggccgtaggagaggccctccacgcccaggcagtcgcagaggtcggggaggtccctttttacgatctgttcctgcagggggatgcccgaggtgaggaagagaatttttcggtcgtcctcgaggcaccagtagacggccggcacgaggagggcatgggtcttgcccgtcccggtaggggcctcggccagcaggacaccgcccccaccggaatcgaggctggccatgaccctttccgccagggcctcctgctggggccggtgctcgaaaccggggaaccgctgcgagagcagacctttcccggaaaagatgtccttcatggagggctttttcaagggcgtggctcctccgtcacgagcaggtgcgggaccggtggatcatcctgaaaccgccgatccacatggccgctacgatccaggtggccgccatgaacccgccgagggtgttcgtcagcagcaggtagttgaacgccccgtgggcgatgacggggatggtgagtatcttcgcgaggacgaagggaggcccggcggtcatcttctggcgggccgcctcgtagcccatggcgaggccgcagagggcgtgaaggggcaccgaaacgagggccctccacccggccacggcccagggattgatggagcccaccacgtagaagaggttctccatggtggcgaaccccagggccacgcttgtcccgtagacgatgccgtcgtagcactcgtcgcattcgctcgacaggatgtacctcttgagcgccagccacttacagccctcctcgatgagggctacgccgaagaaggacgtcaccagcggcgagaaggaaagggggccgctgatgaccttctccacgaggccggcggggaaaacgaagagcatccccctgaaaaaggcggagaagaccagggagagcggttccggttcgaggtagtccttgttgtagaaccaccacaggagtgcgaggcccggcgccacggcgacggccgccacgagtcccttccctatctccaagcccgttccctcccctcgcggccgtttcatgatagaatgtcctggttcggcccacggtcattatattcaacgc

SEQ ID NO: 596 - DNA, 13070 bp, Artificial Sequence
  Synthetic Oligonucleotide
aaggccctgttaaccggatctgcatcgttccacttgtcacgccggtagctgcgacctgaccatggcacgccggtttccttggcggcactggcataagcatcccggacacgcacgccttccataccgcggatctgttgcagggtcagctccggatcaaacgtttcggcaaaccgcatctcatacaaacagcgcacgaccttcagacgaaaatccacatcggcccaagcccgcgcttgatggagaaagttcgctgcgctccgtgtctcacccattccaaccgcgtaaaaccggattccctcttcgccgcaccaggtgaccaggcacccatggtcggcaagcacagagattgcggcatgcgtaattgagacgcccgggcccagcatgagcagcgccagattcgcacaggggacaggcaccttgccggatgcatcgtggatggcaatggcccggacttcctggtcgacgcggcaatgctcgacgtagagatagctccagccgtccctgaacttgggcagaatctgcaggtcccggactctcatgtcgcctcgtccgagcccgcagtattggccggcgcgatcgaaagcaggccgaacccgaaggatttgccggaaccgatgccgcggataagggtctgccgaaaggcatccgggtccgtgacctggaggaggccttcgaaaagaaccgaacgcagacgctgccccttgccgtttttgttcatatagacgaaccccggctgaagggtcgtggcgtcttcctcgatatggaatcctgccgattcggcccggcgggcaagccagtcgacaagccggttggtcggaacgggaacgcgctttccgatagattcttcttttgcatccggtgaatgcttgcacagacgtctggtcggatttgccgcgaggcggaaccgaaggcaccggccttccgagaagcgtgggtcgaatggtttcacctcagggggcgctgccagcagataatccgcattgtgaaaggcatagcaccagtcgggctctatggcagactgcacgatgattaccgccctgccgccgcggagaggttcgatgaggaaaagaaatcccgagcccacggcacgcttcacatggacttggcctttaccaaactcatccggtttgaacggttggaggaagtccctatcttcggccttccgggacgcggacggaaaggccatacaaaggcgctggtggacatgatagcggttcctcagccacgaccgcccgggccgaggccggtcggggttgccgcctacgtcgatcaatagacaggaccggtacatggctattccacctcctcggcggcaagacgccgacggcgggtctccagcgagcgaaattcaacgatctcggcccgcttttgaatgatcggcttgcgccagcggggctcctcaggattgatgcggtccagccccatgccgaggccgtattcgagcatggtgacggcgtcatggcacaggcggcaaagcgaacgcaggtcctccagggtttcgtctccgccggcccttcggtaggtgatgtgctggacggtgtttgccggggctttacagaagacacagaggccgtggtcacgctgaaggcggcgcggcctcatgcctttgggaaccttgcgagacggatcggcggggtcggcaatcagggtctcgcttttccattcagcgttgttgtagttcgcgtgcggacgggggggacgcggcacacgctcttgcgtggcaccgtcggtggacacaccgttcgctccgctggtgagttcggtgcgcgtgactaaacgcggatgatgtaccggaggatcgaacgcgacgggcgcgtcgtaccagacttcggcatcattgggggcttccggctcggtgtccgtcgcccgccattcgaggatacaggcgagcttatcaggcttcttgtcaggctcaaagttgggcaggcgcggttgccagggaacacacttgagggcatcaagcagggacctgcccgtttcgatatgcggctcgcaggtgccgtcctcgcgctttcgcgtcacgaggatcggcacgctcggcgggcaggacttgcggccgaggaaaaccggccacttcggcgacgcaatcgccgcggcaaggtcatggatcaacttcgcatcaccctggagcgccacgagaaagctcgcgtcggccaggtactcccggcgcgtgatgagcgtgccctgggcgccggtcttcacttcgttcccagcggttgtcatgccgattcccgctcctaccgtctgataatcccaccaccgtgtgccgtgccggtcgatgcgcacacccatcgcaagcccgttcaactccggcaggcgttcccgcgccttctcacgcgacaggcccatggcgcagcagagcaggcccagcaccccggacttggtcggggcatccatggtccgccggatgacgaacttcgacgtgtcgccccaggcctggagggggccttccaggcggaggaagattgtgttggcgtcggtcatttcgccgcctccgcaggcgccccggttgccccgagcttgtccatgaccttatggatgaactgatcgaactcgccgaactcgtcggaaccgaccacggattgttcttgctcgtgttccttctggcttttgtcgatccaggtcaggcgatggcgcagattcggcgagaaccagaaacgatcggcctcgatgccgtaacctgcaacgagatcttgggcgtactggccgagcctggcgatgctttcgccgatcaaaccgcgttcggacttttccggcaccggatcggcgaaggcgttggcgtagctgacgggcgtagctgacttggttttaacctcgaccagaactgcgtcgggcggattaaatgccgcgaaggcgtgctgtttgccggaggggttggccttggcggccgcttcaaggaagcaccttattgtcttgcgggcgaggtcggcatcgtccgccaggttcttcttcaactgctcgaagtcaatgacgaagtgtttgtagaagcaggccgagttgaacatggcctcgttgacgtgggccgcgccggcgtcctggccgggcacgtcgtcggcagcggtgaagtagtccacctcgttcacgaccgcgtgagtcgagatggcgtgtgccgcggacaacgcggcttcgacggtgaacttacccttcagatccttaaacgggcctttggcatcgaactccgtcatgcggccacaaagtgcgatgtcgggtgtcttgacgaactcgccgatgatctcggcgaagttcttgcccaggtcgccgtttcccgtccgcacagcctggcccatttcgttgacggcggattgaggcagaaagaagagtatatcgaaagtgtcctcatccttcaggccgaccccccccttcttgaattccttccggatggcctcgcgatgtcgctcttcctgtggattgccttcgcccgccgccgcctttgcgatcagttcgatcagccgccgtgtacgcacaccgccgtccttctccaaagcaaccgcgaactccgggctgcgccggatgctgcgtttgagacactggctggagatgcgcgcccgggtgacgccgccgaagatgcaggtcttgggcgcgccaagatcgtcccggttcaggttcgccgggctgtgattctggatcatgtggatttcgatgagcatgtttatgccctcctttcgagtaatttcgtagcgttgagatacgtctcggcccagatgtcgcgaacatcgcgtccgcggcggtgctcctcgccccggtcccagatggagagatcgtcaaggagttgcacccagtcgatgcccgtcacatcccgcgcctgcggcacgtgcccggcgacagccttggcgacttcccccagcgcccagcgcagatgcggctccacagacgacagggacgagcaaagcagagcgtcgaatcgagttcggaagcgcttgcggtcatcctcgtcgcgcggttcgcagcggcccaggacttcaggcaaagaaggccccgcgcctgaatcgggccggatgtgtgggacgcggaacgcgccgaaaagcttggcgacgagccatgacggctcccggcgcggggtcgccggactcttcgcccgcagtggccaccagagacccgtgaagaggtcgaaaccctggagcgttgcgtcgagcggccgtccggccagacggcgcagccgcgagcgctcgccttcctgcaaggctgaaagccgcttgatgtattcagcggtctggctcattttgagcctcccttcttgcggccacgtttcggtttgccaggcacggctgcaggcgtacctgcgttcgacagatgatccggcttctcaaccagctctttgatctttttgttcagcagggctttggcgtgctctttcgccgcgcggcggcgcaatggcgagcccttggtggtggatgcgacaatttgttcgacgaccggctcgaagatttcacgcagaaaattcttgtccgcttcggcgtcggtttgcgcccttgctgggggctgttcaagcgcggtccgaacgcgggcctcagcgtcggccgtcaacagcacaactgcggcgtcgatttcgtggtgatcgtacttgcccgtcttctggttgggcgtggtgtacttgacaagtccgcgcagcccgtcgcgaatgcttgcggagcgttcgacgcgctgattagccgcctcattcggaacggacacgcttgtcgcgtcttgaaacgtgaatttgtttacgacgggaccgatggcggatactttgccttggcgttgaccgcgaagacgaaaggcgtcgcgccagaaccgagaagagtgtgcggccacatccgccgccaatccgggcagggatataggctcaccctttttcttcaacagatggggatcagtgtcccagaactttttgacctgcgtgtcactcccgctcagatgcggcgattcctgttcggttgccttcttagtcagttcctcgatcgcccgctgattgtccgcagtgaaaagctggtgaaagacgcgggcgattttctgttcgtcgggttcaggatttggcgcagcggcggcgggggtgtcggccgcaccaagcgcttccattctgcatttgcggatgagctgcgcgaccctgactactttgtcggccagcttgaactcgtctgttttttttgacccgtaagcattgttgattttctggaactcggccaagacgtcctttccgaaccgttggccgtcggtgacgggagtggaccagccatacttgttgtacaggcgtttgaccaacactccgttgcttccgcagtaggcgcatgtgccccgatggtccgcgaacttcaaccacagtttgcgcggacgccacgtcaggcgggcaacgtcgtcaggcgcggtagggggattagtgagcagccacggaggaggttgcggcggggcagaggcgccttgggtttgcggcagattggcgcacagagtttgaagcaggttcttcccttcaataaatgcgtaggccgcagagcccgggttgactgatgcgggataatacttgttggccggagaccagaccgagagccgcaagattcccatcgcgcaacacgcggggcagaacccgtaggggtcgtcatgcacaacgtggcgcatgtgattcaccgaatccgctccagggaactcgacgagcagatcgctgatgggccgagatttcttgtccttcgacgaatcgtcatccttcaacgaatcgttgcccttcaacgaatcgttgcccttcaacgaatcgtcgtccttcaacgaatcgtcgtccttcaacgaatcgttgcccttcaacgaatccttgcccttcaacgattcgtcctgatagaaccttttaccgtcgcccagcagattgaacgcggccctgttttcctccagtttagccagccagttcttcggtatgccggcgctcttctcgtccagcgccgcgagggaagacttcgcgtcctctttgcaccacatgagcacggccaacagaaagcgcaggagcgccaccctgtccatgggattgctggcggctatctgccggattttatgggcatctttcagcgccttgcagattccaacacgctccgtcttcccatctccgtaaagaacaggtatccacttctcttcaagcaggttgtaagccccctgtgttactggaaggcccatctggtttccctccttggcgtgttgctgtggatttcacgcgccggcagatcacgctccgcgaaaagggaggggacccggggggcgtgatccacggaacaggcggccgcaatcatctgatgcaaggtcccggtctcccggagatactgaagccgctggaggttggtgtcaatgattgaccggttccaccactcttgggcgagagccacgccgccgctgaagatctcgcggccgtcgactcggtcagcccgcctcgctggatgctgaattatcggtatcaacgttttgcgagctctcacaggtgtggatgtttgcatcccgaccattcgggggcatgaggcccaatccggtcccatttaggctcacagcgcaataattgtttttaacttgacacaaactgtttaaataaaaacatttcatgcgtaactcgcttgaaatgatgtcattcggattatcaacccgccggtgaggggagggcccatggacctgaaattcctggccagtgaccgcgtggaggccctggtctcgcacctcatgcaccagaaggccgtgtatgcgccccagcgcatggggcggcattcggtggccctggacaaagtcaccaatccggccgccgtggtcttggactattcccggaccatgcaatcggtgaagaagtacttccaaccgccccgggatgaactgttgaaattcgatctgacggatcagtcgttcgccgcggcgacggtcgagcccctggacgctgtcctgctgggcatccattcctatgaccgcgccgccatcgatcgtctggactacaacttcagccagggccagcccgagaaaaactacctgaagcgccgcgagggggtgatctgggtcggggtgtcctacgaaccggatgaattccacttcagcggatcggtgggtatcggtcccctggagaccgagggcttcgacgtcttcctgtcccgcgtgggcggcggctaccaggttgagaccgtgaccgaaaaggggggcgaaatcctggccggattcgacctgccccaggcggaacaaggcaaaccttcgccgggtcatttccatcagcacatcttcctgccccaggcccggctgaacgaggtcatggcggccagctacagcagtcccgtctgggaggagaccgcgcagaagtgcgtcggttgcggctcgtgcaacatcgtctgcccgacctgctactgcttcaacgtcgaggagaacgtcgacatcaaggtcaccggcggcacgcgcgaacgcatctgggacgggtgcatgctgcgcgagttcaccgaggtggccggaggcgaggttttccggggcggtctggccgaacggcaacgccaccgtgtcttgcggaagttcaagtatctcagcgacaggaccggacatccctggtgcgtcggctgcgggcgctgcaccgcctactgcaccgcggggatcagcatcgtcagcatcgtgaaccggtgcgtttccgacttcgagaaacacccgaccacggccgtctagaggagttgcgtcatgaagctgaatgaactgatccagccgcaggaaccccgggacctgtatctgccgaccatggccacgctccgggacatcaagcccttgaacgcgctggaaaccctctacacggtggaacttcccggcggcgcggacctgggccaccaacccggccagttcgtggaggtctccctgttcggcgtgggcgaggccccgttctccatctcatcctcgccgacgcgcaagggcacgttcgagctgggaatccgcaaggtcggcctgctgaccgagaagctcgccgccctgaaacccggcgacaagctgggcatccgcggtcccttcggccacgggatcgatgtcgaacgcttcaagggcaaggacgtgctggtggtggccggtggcatcggcctggtgcccatgcggtcgctgatcaacttcgtgctggaccggcgggatgatttcggccggttgatcatctgctacggcagccgcagcgacgaggaactgctcttcaccgaggaacgggaagcctggaaaaaggatcccggggtggatttccacgtcacggtggatcgcggctcgccggcgtgggccggccggaccggcgtgatcaccaccctgatccccggcctcgaactggaactgggcaagacggtgtgctgcgtgtgcgggccgccggtgatgtatcgcttcgtgctgctggcgctcaagtcccgcggcctgtccgacgagagcatctacatgtcgctcgaaaggcgcatgaagtgcggggtcggcaagtgcgggcactgccagatcaaccattcctacgtctgccaggacggcccggtgtaccactatccggatctgaaatccctcgaggaggcgctctgatggccgcaaaaccgcgcgttgcgatcttcgacttcaccggctgcgagggttgcgagctcaatcagctcaacttcgagaaccagctgctggacatgctcggccacgtcgacatcgtcgagtggcgcgaggccatggacgaccggccgggtgagtacgacatcgccttcgtggaggggtcgctctcgacgcccgactgcatcaagcgcatcaacgagatccggcgccgggccaaggtcctggtggcggtgggcgcctgcgccgtccagggcgggatcaacagcatgaagaacacgcgacccatcgaagaggtgcgcgaagaggtctacggcaaggacaagtatctcttcccgaccctgcccgcgctgccgctgtcgtcggtggtgaaggtcgacgtgaacgtgcgcggctgccccatgacccagatcgaattcctgaaggtcttcacggctctggtcatgggcaagcagccggtcgagccgacgagcgccgtgtgcgtggagtgcaagctcaaggagaacgagtgcgtttacgaacggggcatgatctgcctcggtccggtcacgcgcgggggttgcgacgcccagtgtcccagcgtcggccagtactgcaccggctgccgcggcctggtgcccgaacccaacctgaaggccatggaggacattctggtgacgcacggcttgtcggtgaacgaagcctggaagcgcctgcacctctacaacagccacgaactggaggggctcaagtcatgaccatgaacctggacatcaacgtcgagcacctgacccgggtcgaggggcacggcaacatcgtggtgaacatgcgcgacggaaggctggagaaggcccagctggagatcgtcgaggcgccgcgctacttcgaggccatgctcaaggggcgcagcttccacgaggcggccatcatcacctcgcgcatctgcggaatctgttccctcggccaccagatgacctcgatgaaggccacggaacaggccctgggtctgacggtcagcgagcagaccgtgctgctgcgcaagctgctgatccacggagcgacgatccagtccaacgtgctgcacgcctacttcctggccgcaccggattttctcaaggtggggtcggtcttcccgctggtggcgtcgcatcccgaggtggtcctgcgcgccctgcgcatgaaacggctggccaacgacgtgggcgagatcgtgggcggccgcgcggtgcatcccatcaccccggtgccggggggcttcacgcgtatcccgacggccgaggaactcggtgagctgcggcggcgtctgacggaggaattgaagcccgacctgatcgccacggtggagaccatgcaggccctggccggcgagatcccggacttcacgcgcgagaccgagttcatttccctgcgcagcgacgacgactacgccctgtacgacggggacatctgcagctcggacaccgggtgcgtgcccgactccatgtatcgcgaattgaccaacgagtacatcgtgccccacagcaccagcaagcattgccggcacaatcgctccagctacttcgtgggggcgctggcgcgctggaacaacaaccacgaccggctgtgcggcctggcccgggaggccgccgcggccatgggcctggaacccggctgctgcaacccgtacatgaacaccatcgcccaggtggtggaggcggcccactgcgcgatggacggcatcgccatcatcgacgagttgctggagcgcggtctccagcccgaggcgccgaaccaggaaccgaaccgtttcggcaccggggtgggcgccaccgaggtgccgcgggggatcctgtaccacgagtacacctacgaccggcagggtcgtctgacggcggccaactgcatcattcccacgggccagaatctcgcgaacatcgacgacgacatgaagaagctggtgccggagatcctgggccagacgcaggaggagatcgtcgggaacctggagatgctggtgcgggcgtacgacccctgcatctcgtgctcggtgcacatgctggatgtggatttcatcgaataggcggacatgaagatcatcgcggtgggcaactccttctacggggacgacggtgtgggcgcggccgtcctggaccatgcccgcgccgcggatctgtggtcggacgcggagctgagggacctgggaaccgacgccctggccctggtggatcacctggatccgaccgggttgaacgtggtgatcgacgccgcggtcatggggctggcaccgggatcggtcgccgtgttcgggcccgacgaggtgcgcctgcggatccggtcggaccatctttccctgcacgggttcggtctggccgaggccttcgatctggctcggcgcctgggtcggctgcccgaccggctccggatcgtcggggtgcagccggctcgcgtcgagatcaacacggggttgtccgacgaggtggcggccgccgtgcccggaattgtcgcagcaatcaacgcggaggtttcccgtgagcactgaccggaccattctgatcatcgacgacgacatcgatctggtggagatcctccgcatgaccctggagaacgaaggcttccgggtgatcgacgcgcagtcgggacagcgggggctcgatgcggcccgcgaccagcatcccgacctcatcctgctggatgtgatgatgggtgccgttgacgagggcttccaggtggcgtatgtgttgcgcggggacgaggctacccgggatattcccatcctgatgctgacggcggtgaccgaccagacggggttcggtttcgacccggccaaggaccaggatttcctgcccgtggacgaatttctcgagaagccggtcagtccccgcatgctggtcgatctggtgcgcaagcacctaccggcccaagcctagtccgggatttacccgcggaaggttgcagacggtgacgactgttcccgcccttctggacgagccatccagccatttcgtgtcggccgcctcgctgcgccgcaggttggtgtggttcgacaagttgcgctgggcggccgtcgtcggcgctctgtgcgcgacggcggtcgcgacccgcgttcttccctcctccctgcccacgggtgaactgctggcggtgacgggggtgctggcggtcctcaacacggtctataccattcgcaaccgccgggtgccgccgacccggctgccggtcgaactgatgcacgtgaaactgcagatggccggcgacctggtcctgctgacggtgatgctcaacctctccggcggcatcgaaaaccccctgctctacctgtatctggtccacgtgatcatcgccagcctgctgttcaaggggcgggacgtgttccacattgcgggcctggccatcgtgttgttcaccgccgacgtggcgggcgagtatttccacatcctgccgcatcatcacctgctgagcgccggccccatcacccacgagccgcccttcatcctgctgaccctgggggccttctgcctcgtgcagctggtggcggcctacatcggctccaccatcatgaagcacaaccgcgccatcaaggatgagctggtggacaggcagaaggaactgctggcggccgatcgggccaagctggagttcttccgtttcgtgacccacgagatcaagagcccggtcgccacggctcaaagcgcggtggatgccgtcctggagctgaaagggctggagctgccggaaaaggtccgtgacctgctggagcgggccgtcaaccggctcggccacgcgctcaccatgatcaaggatctggcggaattcacccgtggcggcgatgtgaaacgggagacgatggagacggtggatctgaacgtcctcatcgcccgcatcaccgaccagttgagcgaagaggcatcgcgccggaatatcacggtgaccatggatctgcctcccgatcagccgtacatgctgggtaacccgggtatgctgcagaagatcgtgagcaacctggtgagcaacgcggtgcgctacagcgaagacggcggccaggtgaacatccttctgcggatggatccgggggtggtcgttctgacggtcagtgaccggggaatcggcatcgccccggaagaccagggccgggtcttcgacgagttctatcgcacgagccaggcccagcagatgagcaacctgggcacgggtttgggacttcccatcgttcgacgcttcaccgagcagatgggcgggaccatcgaactgcagagcgagccgggccgcggctccaccttcaccttgcgtttgccccggcaggatctgccgtcgggttcccgggagacgtcatgagcatccgtattccctgcgggggcctgatggaacggcacgacctgtgcctggtggaggtgttggggttcgactggctgcccggtgcggcctgcggcatcctgggcatgttcgccgaccgcgacatcaccttgtcgtatctcagtctcggcaacgatgcccagggcgataagaacatgtccttctgcgtgaagaccgataagctcgccgccaaccgcgacattctcgacgcggtgtccccggaataccagccgagcaaggtcgaggtgcgcgcgccc

SEQ ID NO: 597 - DNA, 12991 bp, Artificial Sequence
  Synthetic Oligonucleotide
gttttgtacagatcggcgatgtcgtagacgaaggagagcatgtttccgacgtggacaaagccgagagccggggagaatccgccggcgaggatggcggcgtgacacaagccgtacaaacaggaattggccacggacagggcgcggttgacgggatccgcatgattccaatcatcgaccttatagtttctgccggtccagttcacgccggtctgctcggcccaggattcatagactttacggacccttcgaccttccatggcccgaagttgagccatggaaacccttgggggcacggggtccgaaaagcgcatgctgtacatccgcacagccacttcgaaacgggtctggggattggcccacaaggtggcctggtgatacagattgcgggcatggcgggccttggaatgaccgaaagcatagcagcgcacggcatcttcaccggtccaggcgaccagcacaccgtgttcaatcaagaggctcattgcggcgtgggtgacactgacgccgggcccgaacaggagcaggttgatgccggcacagggcacggcagttttgccgttggcatcgatcaggacgatagcgtgttcatcccgttcgacgataacatgttcgagataggcgtaagaccatgagtcggtgaatcggggtaaggagcgcagatcatcggagggggccattcactatctccttccacatggtttttggttgtagttggaccgacgacacaagattcctgttgccggatctcgcatgcaggtccggtgagtggagacatggagtgctgaaaagcgaactgcgggcgggaagttttacctcccgcccgcatcggttcaggatttcgcgatggtcatcaggccgcacccgaatgcccgggccggaccgattcctgccgcaagggttgcggcaaaggcgtccggatcggtcacttcgaggcgtccttcatagcggacgcagaacagcattggaatgaacgtgtgccggagtcgcggagaattttcttcctccacgaaaccggcgcggttgacgtagtaatagttcacctggatgtccaaggcttcgggatccggcacgatacggaatccgccggtctcaccgcggcgggccagccacgccggcaactgttcccgtggcaccggcacgcgggtgccgttgcgggtgcgacggtcgcgccgccatgggccggaggtatcctcccttggctccggaatcacctgatcccgatcggttctacgctgggcagccgtgagggtgccgacctttcgggtggcgttcgccatgagccggaaccggaactgctgtcccgcctgaaactcgggattccacgtccgaacgtccggccgggcggccaggagataatcggcattgtgaaaggcgtagtcccagtcgggctcgatggcggactgcacgaggatcacgggatttcctccgggctgagggtcaatccggaacaggaaacccgtatcagcggaccgacgccggtggacatgttcgccaaaatcttctggccggaaaggcgtcaggaattccggatccgccgctttgcgctccggcgccggaaaggccatgcacagccgctgatgaacccgatacaggttgcgcagccagtttctgccgggacggatccgatcgggatcctgtccggcgtcgatcagcaacgttgacaggtacatggacggatcctcctattctttgacgggttcgccaagcaggcgggaacgggtttcgcgggaacggaacaggatgatttccttgagacgcgggataatcaggtcgcgccacgccggatcttcggggttgatccggtccatccccatgttgtagccatactcgatcatggtgcaggcatcatggcatagcctgcagagggagcggagttcctcgagacgctcgccgccgccggcgtgccggtaggtgatatgctgcactgtggtggccggcgctttgcagaagacgcacagaccgtgatcctgacgaagccgctcggcccggacacggcggtattcggtattcgtgtagtccgctcgcggacgctccggtgtggggagggtttggaactgggtgttagtgtcaatccgcacctggccttccctttcgccgcagttcagggcgagccgggccaccaccctggaggtgtaggccggtgcgggaggaatgaaatgaaggggcacatcatgggcggtgtccagatcgcaaacttccgtgtccacgccgggtaggggccagtcggtatacaccgtcagggagtccggctttttttcaaatttataccggagtttccagggttcagcagccaaagcctccagcggatgggcggcagtccgcagcgactgcccgtccggtctgaccacgggcacggccggcacacaggatttccggccaagatacagcggccagaccggttccagcagcgcgtcatgcagtttccggatgatttccggttcaccccacagggccgcgagaaacgaagcgtcgcccaggtattcgcggatggtgagcatggttttcccgtggtgcatacctccgtccgcggagcgccgggaaataccgccggcgccgaccgtatgatagtcgagccagcgtaccccgggacggtccacccgcacagccattttcagttcggccagcggcttcagcttctccggcgtcgcctcaggccgggcaatacccatggcggcgcacagcagtccgatcacgccggatttggtgggggcgggggccacgcggcgcaccagaaaacgggactccgcgagaccccacgcctgaaaaggcccttcgagccgaaggagcagggtgttgcaaacggtcatggctcagccctcccgcgcgggcgaatggctgaccacttccttgcacacctcttcccaggtcagcctgctgtcgatggcaggaatgagggccttcaccagatcatcgagcgttcggaaagcacagccatcctccaccagcgcggaaccgttgcacgccaggggatagcgcaggtttggcgagaaccagaaccgctggtcaggcttcccgtaaccggtgtcgagatcctcgatgtggcgggccagccgcgcgatggattcagcgacgagatccgcgcggtcctccacgtccaccggctgcacaaaggcgttggcgtagttgatcggatgcttccggagttcgacgaggatgcccaggggcgggttgtgggccgcgaagctgttctgcttgcccgttggattcaccagcgccgccgcccgcaggaacgcgccgactgtgtgagcggccagtttggtgttttgccgcaggttttcgcacagctgcttccatgaaatggagaagtatttgtagtagcaggcggaggcaaacagggcttcgtcgacgtatcccgccccgcggtcttcggcgccgggcacgtcatcggcggcgacgtagtagtcgatctctttccgggcggtgtgggtggaaatggcgtgggcggtctggagggcggcttcgacggtgttgttcaggtttttccaggcttcggaatcggccttggcttcgagcatccggccgaacagggccatgtcggggacgtcggtgtatttgctgatgatttcagccacttttcgagccaattctttcgggtccttacctccttcggccaggatttttgccatgtccttaatggcttcccaggtggtgtagacgagcatcttgccctcttcgcgggattccgattcctcgccttcttcggcgcctttaccctttttctgtttctgctccaggccgcaggcgttgagcacggcggagatgtccgcgtcctttttgccgcgggccttcagttcctcctggagcaactggccgagccgccgggtgcggatgccgcccagcagcgcgctgaactcttcgctcatgcgaatggagcgcttgaggcactggctggagatgcgggagcgcagcacaccgccgaagtaacaggtcttgggcgcgccgaggtcatcccggttgaggttggacggagcgtggttctgaatgagatggatctggatcagcatgagaggttctccttctgttgctgccgtgtggcagggttcatgatcctgtttcctcaagggttgttgtgttttcttcagccggttcggcatcacgggccgggccggccagggtatccgcgaattgctgtgcccagaacaggcgaagcgagtgccggtgccagacactgagatggtcgatcagtttttcccaatccatgcccggactgccgaggacgtccgagacggtggacagcgcccactgcagttcaggatccagcctttcggtgggggtgttgagcaggagatcgaagcggtcgatgatggattcctgaatctcgttgccgtgtttcgggttttctgttttcagccgtatggccgcgcgggcgagcattttcggcagcgcattaccgctccgctgaggcaggggcgcccagccatagagtttgcacaccagccaggcgatatggcggcgtggtgccctgctgtcccgctggcgtaccggccaccagagcccggtgaagaggtcaaaggctgtcacgtcctgatggatgccgatgccggcgtcatcccgcagaagtgaaagcatcccttctttgcgctcgaggaggcggccaacgaattcacagaccgccttggcggcaggttggttgtattctttcagcggcaggaatggacgtgactgcagtctgcgctggccgatgatgtcgcggacggataccgccgggaaaaagacctgcgccatagaccgctccccggcccgatatacctggtcaggcgtctgacgcagcagttcatgccagtccgtcagtcgtcccacttctgccggataagcaacctgggtgaggacaaacctggccagcccggactttttgattccggctgtacgttttttggaagcttcttcgccccgggcctgcgcggcaatcacatgacactggaaagcgaagaggtgtttgcgccgggtttctccccattgttttatctggtcgtgcaagggtgcggagggcgaatccgactctggttccgcgggaatcctgtccggctcagcaagatggacccgcattgcccggacatcctggaacttggcctgattagtattgaaatcgataatcagccagtggggatggtcctgccagggttcaatccgcgccgtcagttcgcggattttcaggaggttttcctgccattgccgggccacggcgtcggggtatttggacagtttaaacagatctatgctttgaagtttttcaggcgcgtgcggatcgttccatgtgtattcccccacatcctgcttcgcgcggccttcgaaggccatcgtccgaaccccgacgcgtaaagggtctccggtaaaaacgcaccgctcctgaccgtcgaaagattcgacgtccagccagacccgtctcggaagccaggtcagtccagtcagcaggggcacctctccatccaggggttccaaggttttttcccaggctgggattcccgcctgccgattcttcagaaccgcccaggagaggcgcagcgtggctgccagcgaggaggactccggcatcaggtacacaggtggggttttgttgatgccataactcttacccggtccgcctatggtagtaaacaccggaagcctgaccagtccaatggcacaggctgccggtgacaattgctgttcctcatccgaaacatgcagaaaatggggatagttattgccggatggaatctcatgaatcaggtttgttacaggatggcggtttttggcattgcggactgccggatcctgataaaagcggggaccatcttccgtgaaaagttcgaagcacttcgcgtgatcgcgcgctttggtgaaccagtcctccggaaaggggatgtcaggatccggactcaggcgctcgggtgggttgccgcggcaccagtgcagcaccgccaacagcaaccgcatgatggcaaaggtatcgagcgggttgcccgtgtcgatccgccagatgcggtgggcgtcgctcagggccttcaggatgcccgcgcggcagcaggtgccgtcccggtagatcacgggaatccacggttcggtcagcaggttgaactggaaattgggtggatgtttcatggttgggtctccttctgtgatttcctggtactgtttcagacgcgcggtaggcatcgtaacaggatcgtaatcgtggagagggtatgcctacggcgggattgcagtgggcatgaaccgaaggtgtggttgcgtcatgttctgacccttctcgtcatcattccgaggatcggcaaaattctattcccgaaaaattccggtgtacggaaacatataattttttgcgaaaaaatttttgcgtccggccgaatttgcctggcgttctgtcctccccgaagccggtccgaaccccctgccggatactggtatactctgggccatggacaacacgccgcgggtacatgcgctggtcatcaactggaacgggcgggagcaccttgaagcctgcttcgacagccttttggcctcggattatccgaatttcgaggcggtgctcatcgacaacgggagtaccgatcaatcggtggcgttcagccgggatcggtggggcggagatgagcggttcgccgttctggaactggagtccaaccagggctggagcggcggcaacaacgcgggactgcgccgggccatggacgccggcgcgcgttacgccctgctgctgaacaatgacacccggatcgcgccggatgcgctgtcacgggctgttttccgggcggaatcggatccgcggatcggggcagtggccctgaaaatggtgctgtacggtcagccgtgggtgctcaacagtctggggattgccatgagccgggccggggcgggatgggatatcggcgcggggcggctcgacgggatggtgatcccggcggacgaagtggccggagcatgcgggggggcctgtctgttacggctggaggccttggagcgggtcggtctgtttccggaacggttcgggatctatctggatgatctcgacctgtgcctgcgcctgtgggatgatgggtggcgggtggtaacctgccctgacgccgtggtagaacataagttcagcgcgtcgatgggtcacgggcccggagcccggcgaaaatattttctggccacccgtaaccggctgctcctgctggctcggaacgtgccgttttcagagataccggacgcggttgcagcgaccctgacggctgaaattcggtcgctgggtgctgccgcgcgggatggagtatggtggaagtggtctgcccacggaagggcatggctggatgcccttgcggcgtcaggagaaacgttggcgcatcggcgggccatgggtcggctgggcctcgaccggacccgccaccaacggctggtatatcgggaaccgatgttcggtccggaggtggtgttgccggtccaggggttctatccgcggcgtccggatcagccagaacaggttcgggcggtcagccgcgtggcatggctggaccagccacccgccggattgcgtatccggctggaagccccgttggaggggatttttcccagcccggtcacgatctggcgggataacgtcccggaagcccggttgacctgccccggcgattcatataccctttcggaatctgccagacggatccggattgaatcctccggagcggtccgtgccgaggataccggtttgccttgggatacgggtgcttggctgaagttggagccagacccggcagcggctttttttggagaagaatcaccggtttgatggatgggctcggaccattccgccggcacaggagacggataacatgaccagagtgaaaatcgcgctggccggtctggtgcttgcgggcgcactggggctggcggcgggactgggcgtcctggcggcccggtggtcagtgcctgaagacctgccccaggtgccgggaacggctgtcgatacagtggccagtgctgccccgaccggcgggaaaccagccgtggaggcggatcccgacgcaccgctgttgtgtctgcggatcccgggaacttcagcggaggtctggccggtggcagcggaggaaatccggctggccgcggccgcgggaattcaccagtatatgttgccggtgtcactgcggtgggagggcgcaccggaccctccggatccgatcggggtgatcggtcaggtgactgcgctggatccggatggggtgtttctgctggaggtggatgtgaatcctccgccggcgtggctgagcgcgaatcccgccgaagcgatggtcggtacagccgatcccctcgcattgccttccgcggcatcccagacatggattaatgccgcaaaagacggcctgaccgccctcctgggcgcggttgagggtagcgcggtcagcccgcggattctgggatacgtgctgtgcggcctgcaggaccaccggtggcggctgccgaacggattcgaccgatccgaagtgaaccgccagggctttcgggactggctcgtgcggcagtaccagaccgagacacgtatcgcgcaggtgtggcagatgcctggattcgatgtaagcggtgtgagcattcctgccccgcctgatgccgcgacacgtgacggcgtgtttctggtattcccccaggatcgtcccctgagtgattttctgcggtacagttccgattcggtggcggacgcgctggcggctctggtggcccatacccggcaggtctcgctgatttcgccactgatcctcgctccatacggttacacactggaggaagcggatgccatgtcggggcattttgccctgggcgcattgcttcacagcgatcttggggggattgtcgcgcctttggctcagggagatcggggattgggtggcgccggacacctggcggctcccgcccagagtcttaccgaccgcggcttgcggtatatcgtggtggacgatatccgttcaggcatggaacgcaacgcggaaacaggaaccttcgaacgggacaaaggcatccggctgggagacatcctggacgtgcggcgccggaacttcgctcaaaccctcgtatatgggttgggactggcctggtcggatccgctggcccgcggctggctggcggatgcggaccagtggcaggaactgggacgacttaacggtatctaccggcagctccgtccccggccggttacccctcccacagagcctcagcccggcatcacgctggtcgtcagtgaacgcgcgtcatttgtggtgcgcgggagcgtatcggtttacgccaaaacggtggctgcatcccgggatgcggtttatcggtgcggcgcgcccgcccggaccgtcctgttgcaggatatgtttgaggaggtcaacacgccgacaccggtgtatctgttcgccaacgcgttccgtctgacccagtcggagcgccgggttttgcgggcgcgtctggcccgggaaggcgcctgcgcgatctggctgtacgcgccgggatacttcgatgaactgggctccgctacagccggcataaccgagatcacaggtatccgggtggctgatgccggtcccggcggaacggccgcccgatacgcgcttgacggcacgtatctgaagcagggatccacctggggggatgccgaaccgtgggccccccgtttcgcggtggatgatcccgacgccgacgcgctggcccattacgcggatggcggaaaagtgtgtgtggccgtcaaaccccagccggacggctggacctccatactcattgtgacgccggaaatcacggcggccctgctggccgaactgctgagcattctggaacagcccatcctcgtgcaggcagaagacggaatcagttttgacacggtctacgcgtcggagaatctgctggcggtacatgctggcgcgtctggacgtcggaccgtgaacctcggccgtttcgcggatacccgggatctgctggacgataccttcagctggagccgaaaagacacttttccccttcaggtccgcctgggtgaaacgcgcctgcttcagatacaggaaggggttgccgagcagccatgaacgtgacgattgttgattacggagcagggaatctgggttctgtcacgcgggcttttgagtcgcttggcgcggcagtgaccctggcccgggatcctgctgaactttccggggcggatgccattgttctgcccggggtcggtgctttcgcggaagccatggattttctggaccgcggcggatggctgccgcacctgaacgcggccgtgctggaacgccgggtgcctgtgctggggatctgtctcggcatgcagttgatggctgcccgcggaaaggaaggcggtgacaccccaggcctgaactggctgggcggtggcgtggtccgacggctgaatccaccgcctgaaagcgccgcacgtctgccgcacatcgggtggaatgatctgatccgcaaacaggaacacccgctgttggccgggattcctgaaggcgcaacgttttacttcgctcattcctatcacgtcgatgatctgccggaaccatgtgtgctttgtcggagcgctcatgggttggagtttgttgcggctgtggcgcgggatcatatcctgggcgtccagtttcaccctgagaagagttacgccaacggcatgcgcctgcttcggaattttctggaaacagccggaggcaaccctcgtgcataaggttcgggttattccggtactgctgctgggcgagcggggcctggaaaaaggggtgggattccgggaccgggtatatgtcggctgtcccaggaatgccgcgcgggtgttcaatgcccatcgggtggatgaactggtgctgctggacatcgtggctacccctgccggacgtttaacgagggtggagtatgtccgggacattgcccgtgaaaccacaatgcctttcgcggcaggcggcggaatccgttcagtggaagacatgcgcgctttgctggaagctggcgcagaccgtgtggtgctcaataccgcggccgtggagtcgccccgcttgattgaggccggggcatcccgtttcggcagtcagtgcatgctggtttccattgatgcggtgcgcctgccggacggacggtatgaggtgtacacggcatgcggtacatctcccaccggactggaccctgtcgagacggcccgggttgctgaagctgccggtgcgggcgaactgctggtgacggctattcaccgggacggcaccatgtctggttatgacctcgatctcatccggcgggtggtggacgcggtcaacattccggtcatcgcgggcgggggagccgggtcggcggaacacatcgctgaagtagtacttcaggggggcgcggccgcggcagcctgcggggcgttcgtcgtgttttacgggaaacggcgcaccgtccttatcacctatcccacggtaacagacctgcgcgccgtgttgccggcggagcgggttcgcgaccgggacctgctgccgccgccggatatcgcttctgctcggctctgatttgcagaggaccgcgcaaaatctgcacggcttacctgataaaaacctgataatcgggcaagttcccctgttttccgatgtccgatctcggcacaggagttgcccctttactgctggaatgtgtcccgcaacgggacggcgcgaccaaaaggagacgcgacatgagaagacgcgaaaagttttggatgattggagtgggatgtgcggtatttttaacggccggctggatgtgggcggcgtgggcccagcaggcgccggctccagcgacgacggatccaccgaacccaccgtcggatcatgcgggcccggcaggctctcctcctctgcctccggcgtggcatggcacgggtgcgggtcggggcgcgggttgctgtccgcccggctgcccgggattcgcggatgccgatggagatggccgctgcgataatttccgggatgagaacggcgacggatggtgtgacaaccgtccggcgggtccgccgcgtggattccgcggccagggctggcgtcgggatggtacccctcctcctccgcctccggcgtggcatggcacgggtgcgggtcggggcgcgggttgctgtccgcccggctgccccggattcgcggatgccgatggagacggccgctgcgacaatttccgggatgagaatggcgacggatggtgtgacaaccgtccggcgggtccaccgcgcggattccgcggccagggctatggcggtccaggaggccggggccggccctgatttacctggcatatactgcagattggcgcgggcggtctgtggccgtccgtgccagtctgtaggtttggagcaccccggaacgtggataattgggggtgtaaggtgttcgctgatatgaatcgggtcttgcgacgcgcgcttccctggatcgtagtaaccctgttgctgcagactgcgatgctgttcctggctgccggcgttacccgctatcgtctgcggcaggccgatttcattcagcagacccgagtggagaccctgttggatctcgccgagcatggggtacgtgcccacatgcgtcctggtccttccgtaattctgccaggtgtggagacagtatttgatgcgttaatcagtctgccggaggtggctggcttgcggctgaccgatccgacgggagccgtgctgctgacggtgggcattccggacgaggtcgggcctcctcctccaggtctggaacggttttcgcgcagcatcgccgaagctcctgatgcgggtgcgctcgggcggggaatgccccgcggtccgggtcatggtaggcggtggacaacagaattacggggcccggacccaccattccgctccctgccgccgggaccgttgctgctggaactttggctggacaggggacaggataattatctgtggcaggtcaggcgggacgggtggctgatcgcgctgggaggtctgctgctggccccggcgctcgtgatggccggaactgcgttccgccggcagcagcggttgcgccgggatctcatttccgcccgcgaggaggttgcg

SEQ ID NO: 598 - DNA, 12965 bp, Artificial Sequence
  Synthetic Oligonucleotide
cgtcggttcacccccacgcgcgtggggacaactatttcgtcagccctaatctgtcggcgtttcgcggttcacccccacgcgcgtggggacaacggttgatggaactcgtttcgggtggagcatagcggttcacccccacgcgcgtggggacaactgcttcttacttcttgctgcctggccggcgcccggttcacccccacgcgcgtggggacaacaagaccgaagaggtcccggatgcgctcgaggacggttcacccccacgcgcgtggggacaactcgatagccgggcggaatcggtccatgggccgcggttcacccccacgcgcgtggggacaaccgcagagactgctggctatgtgcctttgccgccggttcacccccacgcgcgtggggacaaccctgccgggggctctgcttctggctcgggtagcggttcacccccacgcgcgtggggacaacgacccaggccatggcgcccgcgcggatgtaagcggttcacccccacgcgcgtggggacaacgttgcgcagggacttggattttgcggcgttcacggttcacccccacgcgcgtggggacaactaggccgactcgatctcgctccatgaaagctccggttcacccccacgcgcgtggggacaaccagtccgctagtcaccagtagggccccgtcaccggttcacccccacgcgcgtggggacaacgaagcggcccactttggaatccgcgatgtcctcggttcacccccacgcgcgtggggacaactagagcccacgcgacttgtcgcgagccacgaacggttcacccccacgcgcgtggggacaacttgactatttgccggttcgccggttcgacaatcggttcacccccacgcgcgtggggacaacgttccaaggacctcttgacccttggggacgctcggttcacccccacgcgcgtggggacaactatccccgtccacgtcgaatatcccgcctagtcggttcacccccacgcgcgtggggacaactcctcttctggtggctctcatggggcgcaatgcggttcacccccacgcgcgtggggacaactggcgctggagagtttggcgcaattgcgcaggcggttcacccccacgcgcgtggggacaatttacgatattatgcgaaatgtctccgtcgaagcggttcacccccacgcgcgtggggacaaccgtctcgctcagttctcatgcgccacccccaccggttcacccccacgcgcgtggggacaacaatgtccgacgcgatttcctgccaagccttggcggttcacccccacgcgcgtggggacaactagcctcccccgctaccacgcgggacgctccgcggttcacccccacgcgcgtggggacaactgattctctcagcgccttgagttccgctctcacggttcacccccacgcgcgtggggacaactccgccggtcgaggcttaggagtcccctcccgcggttcacccccacgcgcgtggggacaactagtctcctgtcaacccaataccgattgctgccggttcacccccacgcgcgtggggacaacagggtggcgtacgctttgaagtcctccgcctccggttcacccccacgcgcgtggggacaacttaagcgaactaagtaaagcgatgacttcctccggttcacccccacgcgcgtggggacaaccctggaaaagttattgattctacggcatacgaacgaggaaaaggccctcgaagtcttcgatctgccgtgccgtgcgaccccaggttcggacttgaaagccctgttcattatcgctcgagtagagcatcaggcagccacccccttgggccttggcacacgccttttcccacaggcgctcgcggaccagagcggaaacgcgtcccacgaatacaccggcctgaggctccagaaaccaccgtgtgagctcgccgcgcagccctggcggcaccctctcaaggatcaggactaccattctcgggctccctttcgcccatttccggggctagcatacgtcctccttcgactactccttccaaatcgtcccagagggagccgggggcggcggcatccacgtcgaagctatcggctgccgtcgcttttgacagcatgagagcggtctggacgtccgggatgattctctccagaagcctcgtggacacaaactgatcgcggcaggtaatacggacgcgccgctccagttggcctggcccctcggcggcggctcgaaacgccaccggaactgtaatctccgtcttgtaaaggtcggcgagatcatacacgaaggacagcatcttgccggtatggataaagccgagggcaggcgagaaacccgccgatacgatggccgcatggcatatcccatagaggcaggaattggcgacggacaagccccggttcgccgggtcggcgttggcccactggtcgcggcgatagctacggcctgaccacgtgatacctgcgtcgcgggcggctttggcgtatgcgtcgcggactcgcacgccctccatgccgcgtatttgttggagagtcaaggcggggtcgaacttctcggaaaaacgcaactggtagaggcggcgcacgacctccatatggaaaccctcatgcgcccacatgcgcgcctgatgcaggaaattggcagcgttgcgcgtctcccccatgcccacggcgtagaagcggactccctcttccccgcaccaggccacaaggcacccatggtccgccagcaccgagatggcggcgtgagtaatcgagacgcccggacccaacatgagcaaagccaagctggcgcaggggacagggaccttcccggcttgatcatgaactgcaatggcttgatcctcctggtccacgcggcagtgctccacatacaggtaactccatccatcactgaatttcggtaaaacgtggagatcttggattctcatattgcctccacagggcgcgccgccctcgtaacgctggcttcgagccggcacgcgctgtcgcgtcgatctccgatcgacgtcccttgtagcgtcgatctctgatcgacgacggcggtcggagaccgccgctacagcacggcaatcgcaaatgggttgtagcgtcgatctccgatcaacgacgacggtcggagaccggcgccacaattacaaaaccaggcgatgaatctcgccttggtacggccaatcttccgggcgcttgactaaaccggcacggaccggattctgtcggacatactcatatttctcccgataggattcttccgatctcatgacgtgatcgaagaaatccttttcccagtgcgtgccttcaccttcatcctggcggaggaccttggacaggtcgccccgcagggctttgacccatttccacaaaggtggggactcgccacaaaagccagcgaaaagatggatgtgatcgggcatgatcatgaagaagccgacccaaactagaaaatcggttgcccgttcggagaacctcgtgaattcctggtggattgcggtgtttgccaacgagcattttcgatcctgcgtacagagcgtaaggtagtagatagggttgtcggtatagagccaatccagccgccgtaaacgtggtttgaatttcattttgtagtcttgtagcgtcgatctctgatcgacgacggcggtcggagaccgccgctacagcgcgtccgccacggcaggcgtgcggcagggcgcgactgagagcagcccgaacccgaaggctttgccgggcccgacgccgcgaagaagggtgttacagaatttgtcgggctccgttacttcgagaatcccttcgtagcgggccgagaacaagctacgtcctacgccatcccctttgatatccgtgtggtcttggcaacggctttgccgtccctccttaggtttcttgaaatacatatagcccggctgcaccatcgtccggtccctgtcgatacagaatcctgacggctcgtcctgcccgtcttggcggaaccgccattcagcaagccagtcaagaagctggtcatgcggcacaggaacgcgtttcccgatccacttctcttcgaccggtcttccatcccgttccaaagaatgctcggagagccgccgggtaggattagcggcgaggcggaagcgaagacgctgcccgttcgtgaagcagggctcgaatggtttcagttcgtgaggagcggcaagcagatagcgcgcgttgtgaaacgcgtagtcccagttgggctccgcggcggactgtacaacaatcaaggcccgaccacccggctgcgggtcaatgcgaaagaggaacccggcctcaggactccgccggctgtgcacttgcttcaagacttctggatcaacttcggttttcttcttgtctgccaaatagcgttgctcgggaaagtcgtcaggcgcatagggcgcaaggaattcgggatcgcccttttttctgagagcggagggaaacgccatgcagagccgctggtggacgtgatagaggttccgcagccataggcgtccgggccggggccggtcggggttgtcgccggtgtcgatcaggagacaggaaaggtacatggctattccacctcctcggcggaaaggcgcctgcggcgcgtctccagagatcggaactgtatgatctgttgccgcttctgaatgatcttatcgcgccagcggggctcttcggggttgatccggtccagacccatgctcaggccgtattcgatcatcgtcacggcgtcgtggcagaggcggcacagagagcgcagatcgtcccggagttcggcgccgccggcgcggcggtaagtaacgtgctgcactgtagtggcaggagacttgcaaaagacgcacagtccatggtcgaggttgagcctgtcccggcggcggtttttgtattctgtgttggtgtaatccgctcgcggacgcggaggcggtggcgtgtcgtgctgagccggctgagccgcaagctttacgccgtcttcacccattcgaagcagcttgcgaatgacgaaacggggttggtgcgaaggcggctcgaaggtcaccggcacgtcgtaccagatcagcgcgtcgcggggagcctccggctgctctttggtcgggtcccagtccagcagacactcgagctcttggggtaccgggtctgcctccaggcgtttccgccaaggaaccgacctgagggccgatagcaaatcgcaatattcgcctgtcggatgctctagcaaggggcgagaaggggggcagcacttcctgccgaggtacagcgtccatgcgggggtttttactgcgttctccaattcgccaatcaggctcgcttcgccgtgcaacgcgacaaggaaagaggaatcgcagaggtattcccgacgggtgagcatggcgccgggtttgcttccgccgtcggctgtcggcatctgcattcccgcgccgacggtgtgatagtcccaccagcggaccccgggtgaatcgatgcggacgcccaggcgcagcgcggcaagtccgggaagccattttccaggggcttcagcccggctgacgcccagggccgcgcagagtagcccgaacacgcccgatttggttggcgcctccgccgtgcggcggataacaaatttcgattgttgatcgccccatgactgaaggggaccttcgaggcggaggaacagggtgttcgcgctcatcaggccacctccgcgttcacagccaccttctgaacctcctcccagtcgtagccgatttcttcgactacggaccttacaagtccatcgagcgacttaaggttgttcgcggccagttcgacttcacggattgcttccttttgctcctccttaaccttctcgcgtgcaactaagggaaaacgaagattgggagagaaccaaaggcgttttaccggctttccgtacccattctcgatgtcgtggacgtactgggcgagttgcgcgatgctctgggaaatgatatcgccttcgccctcggcaacaaccggcttggcaaaggcgttggcgtagctgatgggagtattcctgatttccaccagtatgccatctgggggattgtgcgccgcgaaactgttctgcttgccggtggggttggtcaacgccgccccgcgaacaaaggcaccgagcgtgtgagcggccaggtgctctttattacccgagaacccggcgagattcgtgaccaaagtttcccaatggacggagaagtacttgtagtaacaagccgagctgtacatggcctctccgatgtgggcaccgccgacgtcttcgcccttcacatcgtctgcggcaacgaaatagtccacttccggacgcgcctcgtgggtcgagatggcgtgtcccacttggagagcggcctctatttgggggtccaagtccttccacacctccttcgcggtcttcgagggctctaacatgcgtcccgacaaggccatgtccggcatgtgacgctctcgtgcgatcagttgcgcaaacttgcgggcgacccctttgacttgctcctcaccagacttgccactcagatcgcgaaggtattgcaccattcgcggcaacgcgctttttgatagaaaaacgatgacatctttttcttgtccgtcatcgcctgccagcaccccacatttctggacgacttgttgggccaagccgaaaaaatcgtccttttccttaccttgaaagttctctgcaagtagcttcggtaggcgccgcgtacgaactccgccacataacaacttgaactcatcgctcatacggatgctgcgcttgaggcactggctggaaatgcgggagcgcaagaccccgccaaaataacaggtcttgggggcgcccaaatcgtcccggttcaggttggccgggctgtggttttgaatggcgtgaatctcaattaacatgacgttcctcctttgaagatttcaaaaattcctcggcccagttgagccgggtggtttcgcgttcccaaatggaaaggtcgtttgtcagcctcacccagtcgactttgaggcgttcggaggctatgaggtccagcgcccagcgcagggcaggctcgactttggcgagcggcagcgtgagcagcccgtcgaacctttgggcgactgggcgaattgtagcgtcgatctctgatcgacgacggcggtcggagaccgcccttgcagcatcgatctctgatcgacgacggcggtcagagaccgccgctacagtgtcgtcgcggcatcgtgcaagctgccaggcgagcgtctggccgggtgagtgctcgactggccgaaatgcgtaaagtttggcgatcagccacgccacggcgcgacgaggcgcgcgctgattcttcgctcgcaagggccaccagagcccggcgaagagatcaaagccgtcaaccgattggtcgaggccttgcccggcatgcctgcgcaggagcgcgagttgaccggacttcagatgtgtgaggacttcgacgtattgctccgttggagtcacctgtcacctccccttttccggctggccttttcatcggctcccggcttcggacgcatgtccggccttacgttggcgatctctcgtcgccggcggagggcagccgtcgtgtagcccggtgaaagcgatttggccacggcggccatcatcggggtgtactcctgggctgccccttcccaggcatccccgcccccagaaatcagctcagccatcttatcggagaccgttgattcgacctgggggcgaattgcagcaataagggcggccccctcagcttccgacctgcttatctcctcgatcttcttctccaaggcccatccttgtaatcgccagttccttaccaacgccggcgccgcctctgagattgaggcgatcgctggcagatgaacggtccgttcccatacatcgatgttcctcgccttgttcgtcgcgaaacccaccactaggagagccgtagatttccccgtttcgagaaggcgcgcgacaaggtcggtccagggacggtccatcctgaatcggcctgaggcggttaggtccgctgccctaacggcttttcgcgcctcgccccccaaatagaccgcgtggggatcactccatttctcgttctcctgcttgccggccgtctggaaatcacacgtcagaatgaggggcgagccggatgccccgcagcccatgcaggcgtgacgcaagtcgactgggtcgtgcagaaacacccgccttggaacgagggtcaggcctgtgacgaatgcaacgtcggcattgggattttggcaggttgcattgtcgacccaggaaggttctccaaggttcgcagcactagcccagttagccaggagcgtctcaaaaagcgattggccccagggtacaacgtacactggcggaaccccattgattccagccatgaggtttggctctcccgggccgctcagaccgctcacggagaacatcggcaagcgcgttagcccggcggcgcagcaggccggacagaggccggtttcgttatctgttgaatgcctgaggtgccagaagttattgccagccggtacctcctgactcaaaaccgttatcgggcggacgcgctttgcagtacggtcctgatagaatcgcttcccgtcgcccagaaggttgaaacaatctttgtggtcgtcgagcttcttgaaccaatcggagcggagcgaagagatcgagccggtatcgtccgggggattcccctggcaccaatagagtagcgcgagcaggaagcgcaggatggccacgcggtccatgggattgctggcggcgatttggcgaatctggcctgcttgttggagggcctcaatgatgcccacgcgacaggcacgaccattcctccacagaacgggaatccactcttcgtcgagcaggttatagctcacggtttctccttgtcagggcaagaggtggtagaaagtgcaggagggcttcggcggcgcagccgacgttcaggcggtggtctcgaacagtaatgccgggctcgccatctttacccgtttttgcccagcagtcttcgcggcggacggaatcgccggtcgccagcaacggtctgtaccttacccttggagctggcatgctgcgaattctagcacaagatcaggcgcagggtgttgattttaagggaaaagccgcggacctcaagaacaggtccgcgctaccttgcctccacgaaaatactgggacctggaggaaaaagctaccttgtcgaagcatgtgcaggatcgcggcgcgtggatcacgccccataaaccacctccgtggagcggaggatggcgtcgcgacgtatccaattggcgcttttctccacgctcttgcggtctaccaggtctacgctgcgccccaaaagcagggagaactcttcctcagcgcgggccaggtccatcagggaccattgttcgccgggctcgaactccgccaagaaatcaatatcgctctcggcccggagttggccggaatgcgcggagccgaagagctccagccgtcgaatcttccatttccggcataaagtgccgagggcctccggcgagatttcctggttgttgattctcatttcttcccaccgcttttcgttcttggtcttgtcttcgccgcttcctgtggcttgagatcgtcgtcgctgaaatcggtgcgaacgcgcgcgacggcttgggtgtcccaggctgtggtgcccagcgagcggacgctctcttccagcgctcgatgagctgcggcgtgtccagacccgccgggcggcagcgtgggtggcggtgcagccgcccgcagcgttggaggagcaagtccacgggggcaatctccgaaaccatgagatcgaagtccaggtccaggctctgttcaattacctgcgttgcgaccaggaccgctcgccgaggccggtgcgggttcgcatacgtaccatcggcttgtttctcacccttgccaaacttgcgaaggacttcttcctcccgctcccgccgccacatctggagcgtgcgggcatggaagagcaggcactccgtgtctttcaggttgtctcgcaagtgtcggtaaacctcgatggcgcggctcactgtgttgcagatgaccgcggcgcagccgccaaggtccagttgccggcttagggtgggggttagggttggcaaatccgtattccttgagcgcagagccacggtgcgcggtttctccatggggatctcatggcatacctgtggcggcgatctccgatcgccgaacgtcggtcggagaccgacgctacaaaggtgctgtgggctcgccagagtgattcgcgggtagcgtttatactcgatatcgtcccggccggaataggcctttgcgagcgcctttcgcttggcctcgggaagtgtcgcggaaagcaggatgacggtgcaatccacctctgccagccaatgcaaaagccgctcgaggatggtgctcatgtaggcgtcgtaggcgtggacctcgtcgaagatcaccaccttgcctgccagcccgaagagacgcacgaaccaatgcttggtctgaaggacgctcaacaggctttggtcaatggtgccaaccccgaagggggcgagaagcgggcgtttcttggcggtgaaccaggattgggcctccacgtcgccctcttctgcgatggccttggggttgaactccggaatctcacctcgcttcacttccttcgcctgcgcaaggagtgcgtcgccatgcacgagctgcaggttgagctttcctttgtgtcctcgctctttcaggtagtcatccaacaccctcctgaacatcgcattcccggtggcctgcgtcggcatcgcgatatacatgccacgtccaaagcctctgcacatcgccatgtccgccgcatggagcgcagcttcggtcttgccttggcccatcggtgcttcgacaatcatgagatacggagaggtttgctttgaggccaacgtgattgcggccgcctggagagcgttgggcacgaatctactaaagacggtgtcaaaacgcgcctcaccggcaaaactcggggccggcagccagcccagcgtctcaagagcttctcgcgcttgctcttgcgccttcgtccaataatccggcgcaccgattctaagcggagttccacattcagcggcacaaggaaagaaatcctgattcgaaccgatccagtccaccacggagataaacccggcgagtatgggtacgacggccgggtccgcaatttcactcctggcttgggccttctgtttcaggtcgaaccctacggtttcggcaaattcttgaatcagcatccggcgggccacattccagccgctgtccccaagcgtgtcccttcccattcggagttccgctgaagtcggaaaaacaccgtggtgccctcctgcaatctgggccaagacagtagaagccgggtcgaggacttctttcagaatatgcgcgctaatgaacccatgcggacggttctggtcgtttttggagaaatgcaggccgcacttctctgctaattccggcactttcttctggaagcctgggctagctttgccgagatcgtgcgcaccggccagaaacacgatatgagtgcgcgcctcacttcccagtgagtaatcgagacggttgcgaacttcagggccaaggcaatggtcccaaacaagacccgccacggcggcaacatcgagcatatggtacagcaaggggtgatagtggcgaggcgcggacgttccattggtccagtcttggcttgtcttggcccacaattgcggccactgggataattgactgctggagagacccatagccaataccctcatttctgtacaatcggaatgcacttttcttcgagtaggccgtaccccatggcttttcccttaatctcggcaagatgtggtagcagcgccgagtgcgcttcggcgacgcagccgacgttcaggcagtgatctcggacggagatgccgggcttaccgtctttggtcgtcttcgcccagcaggcttcgtggcggggagggtcgctcgtcgccagcaacggtctgtctgttaccctcggagctggcatgcacccaattgtagcaaaagatcaggcgggcagcgcgaactttggcctctgagcggcgagaaagcggagtacgctcgccccgccccgcgagggcggcccggctcaagcatcccgagcactggcagcggtgccgtatgcgccacaacattgggttcccgaacaccctggactcccgctccgcgaagtttcgcgaccatgcacgagcgtcccgcctaattgtttgctgaggcaacgtactcagtgctcagttctcagtagtcagttttcagtcgtcagttctcagcaatcagttgtcagtcgtcagttgtcagtcgtcagttttcggcggtgaaataaggaagaaggcgattcagaacgtgggcttcgccattcacaattcaccattcacaattcactattgctcttcagccgcgcttcaatgatccaatgagtcaatggatcaatgattcaatggagcagtctgcagggttgctgcttcaatgagtcgatgaatcaatgactcaatccgagtcgtggtcggctagacgtgtggacatatttctcttgacaagcgcccgtagccgtgataggctatcaatgtgacgagtcctacccccccgaggaagtcctttcctcggtaatctaacattcctacccaggaggaactatgtccttacgcaaatcacctgagcttaccccgaagctgctcgccgccgcgcgccagaatgcgcagcactcgacgggaccgcgcagcgcggccgctaagcagaactcgaagctgaatgccctcaagcacggccaacgtgccagccccgaaaatcaccaccaagtcatgctggcgctgggcgaagacccgcaagaattcgaaaacttgaagcaggaactcatgaccacctatggtcccggagatgcgctctgggaaaagcagatcgacgacttggccaggctctactggcgccgcgaaaggctggaacgcgcgcaagaaggcctgatgcgccgcgccttgctgggggtggaagagtggcaacaccgccgccagcaggaaatggcc

SEQ ID NO: 599 - DNA, 12676 bp, Artificial Sequence
  Synthetic Oligonucleotide
agggcgcgcgatcgtagccagggcattcatgccctgctggccaacgcgccccgaaaccgcccgcccggagggcggacgagggttagtgcgacaaggttgggggcgcctgtttttcaggacaggaccgttgcttgttgtcaatgagtcaggttcgaatcgcgtccgtagccccgaaggagcgacgggttttagccacgggtgcagaccccggaggggtcaaacccgtggcaaccaaagcgccggaacggacggagccccggcaggggcgaaggagcggcgagtctgcgtcaggtcggatcgggaggcgggccggagagaccggcacatccctggctggtctgacgtgcggcttctcggaggtgcgcctcactagacttcttgggttgccggacttgttgcgaatgagtcaagttttcgagtcgcgtccgcagccccgtaggggccacggcatttagccgcgggtgcagaccccggaggggtccaacccgtggacatcgggcaccagacgaaggtagccccgaaggggcgaaggaaaggcgagtccgtgtcagatcaacttccgggaggcgtcgcagggcttccgccgccccttttggggctgatggggttgacgggcattgccatccacgggcttgaccccgctggggtttgcgcccgtggctacaacccttgggccctgcggggccgttggatttccgcgcgcgactggttggtctgaggcgcagcctcgctagaattcccagacagcaaacactcgccggcagcgatgtcggcggtacgacgtgatcgaccccgtactcatcaccgcagacgacaagcatcgggccgccccggtacgcctgttctcgccgcagtatcgccggctgctcgggttcctgtggccccaccggcgcgccctggtcatcggggcgatcgcctcggtcctgcacgccctgctgaacacggccgggatcagcgtcgtgctgccgatcaccacgatcctgctcgaagagcagggactgcacggctgggtctaccgctcgatggccgagcggcggctcggggccgatctcgacacgatctcacggccgcaacccgatggaaacgtctcgatccatcgcgtgcagatcctcaaggttcgacggggttcgccactcgacgcggccgatgtcagcccggcctccgagaccgacacgctggacggcgagcagctcgcacccatcgaatggttccggcgcgtcgcgctcacaccgcaagacgcgaccgtcacgttgggcgtcatgccatccgggtcggccgatggcagccctgtttcggcctcggttcggctgcgcgacgcacccgcgcactggcgggccgcggcatcggccgtcggactccttccattcggccagccgctgcgcgcgttgctggccgtgatgggcgtgctggtggtcgtggcgatcgccagcaacatcttccgattcttgtccgagtatctggtctcgaccgcgatcctgcgctcgctgatggatctgcggcgaaagttgtacgccaaggtcctgcggctgccgatggccttcttcgcccgcgacgtcggcgataccgtctcgcgcttcgttcaggacgtgcacgacgtgcagcgcggcctgatggccctgttcggcaacatgatccgcgagccgctcaaggccctggccatcttcacttgggccttgttcctcgactggcgcatcacgctgacgctgctgctggtcggaccgctggccatcctgctcttctggcggatcggcgagagcgtcaagaaggccagcacccggctgctgcgcggctacggaatgatcatcggcgccctgtcggcctcgctgcacacggccaacatcgtcaaggcctacacggccgaaaacaccgagcggcgccgcttctggcgcatcgaccgcaagatgctggcccagcagaagaagatggtccggctcgacgcgctgctcagcccatcgctcgaggtcatcgccgtcgcctcgatctgcgggctgaccatctggctgggcgcccaggtcatcggcggcacgctcgaccagccgcgcttcgtggccctgatcgtcacgctggccatgatgttcgacccgatccgcaaggtggccgacgtctacacccgcgtgcagcgctcggccgccggcgcgtcgcgcatcttcgacgtgtatgaccggcccgacgaaacgtcgcaaaacggcaccgcgcccaagctggccccgctggccgagcgcatcgagttccgcgacgtcaccttcgtctatccgcacgccgatcggccggccctcgaccacgtcagcctcagcgtgcacaagggcgagaccgtggccatcgtcggccccaacggctcgggcaagaccacgctgatgagcatgctgctgcgcttctacgacccgctggaaggcgccgtccgcttcgacggcgtcgatctgcgcaacgtgagcctgcgcagcctgcgccgccagatcagcctggtaacgcaggaggcagtcgtcttcgccgcgccgatcgccgagaacatcgcctatggcgcccgcggcgcgacccgcgaacagatcatcgacgccgctggccgcgcctacgccgccgacttcatcaatcgcctgcccaagggttacgatactgtcgtcggtgagcgcggcgcgacgctctcgggcggtgagcgtcagcgtttggccatcgcccgcgccatcctgcgcgacgccccgatcctgatcttcgacgaagccaccagtcaggtcgattccgagagcgagcagaagatccaggccgccctgcgcgagctggtggctgaccgcaccacgctgatcgtcgcccaccgcctcagcaccatcaagttcgccagccgcatcgtcgtcatggacgccggccgcatcatcgacacaggttcccacgagcagttgctggcccgctgccccttctaccacggcctgtgcgaaacccaactcgtccactagccgccgttccgatcagaaccccggccgccaaggccgcgggcccggatcggatcagaaccccggccgccaaggccgcgggcccggatcggattagaaccccggccgccaaggccgcgggcccggatcggattagaaccccggccgccaaggccgcgggcccggatcggatcagaaccccggccgccaaggccgcgggcccggatgccggtagcgcttcgagttcggaccgagcgtactcctcggaggggctgcagactgctcgtgttgattcgcggcgcgtcccggacgaccgtcacggagcttcactacagccaccggacccctgacccctcgcttgcggtcagaagggccacggatcaacccggacgaacaccggcgcccgttccggctcccggccttcagctttcagctttcagctttcgctaccgatcaacaccggccggcctccaggcaaccctcaagcgcgccacgccctcccccagcccgtgattggttcgccttgcgtcaatcgcccgcccgtgcataatgtccgcgcggtccggtcggaggatggatcaagtttcacgcgtacgctgatcaacaccgcctttcgcccctcagtgcctgctcgagtgacgatccaggcgcgtcgcgctctcgcgtgaagaaggacgcacgggtgaccgatgactttcaatttgctcgttgaaccgtggattcccgtcctccgtacaaatggacgccctgcgcgagtaggcgtccgggaagcgctaacgactgcgggcgccatccgacagatcgccgcgtcgaacccaatggataacgtcgctctgctccggtttttgctggccgtgctcatgtggtgcaagccgcgtctaagtgacgaagaacgcacacagctcgacgtcgcgaagggcgtcccagaagagtggctggccgaacgactcggcggtgcaagtacgccgtgcgaggagttcaacctgctcggtgacggcaaccggttcttccaggatcgatctaccccaaataacgcgcgccccatcggcgacctgctcgttgagtttccgacagaaaccaagatcgcgcgcttccgccacgtccgagacacgcagtacggcttctgtccggcctgcagcgcgctcggcgttgtgcggttctgcgctttcgccaacgcgtacggcggcggtcgctacacatccgcccttaacgggcctacgcccgcatatgtgatctcgcaccgccccacgctagttggcactctgctgctacactggcctatgaacaatccggtcaaacgatcgccgccgtggctttgtgctgatccgccgtccgaaagcgacctagaccttcccacggccttcgcctggcgctcgcgccgcatttggctaaacgatcccgatgccgacggggattgcgcatactgtggtcaccgaagcacactcattcgacaactcgcgttcaccggggcgtggaagccgccatttgaaaccaaggggcaggagaagaggttctgggagaaggatccgcatctgatcgtcgtggagaaggaccgcgaggcgccagcggaggagacggcagccgatgacagtgacgacgcgccccaccgtgacgccaagagcagcgagcgccgccgcacgagaacaacgctcggtttcccttccccggggtcgcgagtcgcggcacattcgaggttctggcgcagagcccttcgcgctaggatcgggcacgccagtggcaaaaacgcggacgatgcaaccgctgtgatcgttgcgggacccgctgccaacaaagggctttatcaggatgctagcgaagtccgcttgccgcgtctttctaacgatgacggcaccgccgcgtcgattgatgctctggcgaaggcggttgatgctctgagcgccgtgttgaagtgctccacacgcaacccggagcgtcagcaccccgagcacaaggccgcgctcgattcgttggcaccttcgctagaactgggttttcgcgaggatactcaagcgttactgatcccgagcttctcaatcgatcacgcgacagagcgactcttacccgtagtgaataccgtccttcgcgccacgtccgcaggctcgccgctgcgccggcgcgagggagaggcgcgcgcacgcgaggcgttgaatcgcgttctccactcggtcgctgccgcgagcggttcgcccgcgaaatatcaaaatgagcccagcgcgggcgaacaaagggcccgtgaacacaagcgcacgcgcgcgacagagtctaggagaaccaacgcgtgagtgcgacggagacctacatcgcgcggctgctggccttgcaagaggccaagtgctcgctgctgcgcggcctcgcgggacgccggctcgatgattcgctcgcggggttcgatctcttcaccggactgtggtggccgttgcgtgccgctagcccggccgtgccccggcgcgagccgagttggctcgtggccaaactccatggcgccgcgcgtgtcccgcacgtgcggccggagcggggattaggccccttgcttccggccgtcctggccgtttgcgagccgtcggacccgccggaatacaaggcccgggaccgcttccgcaagcgcttcgacgccctgctctcctcgccgctggccgctttggagccgcacctgcgctgggcgctcgcagaggttggccgggcggttcacggccgagttccagaggcccgccgcgtacagggcatcgactgggcccgcttgttggacgagctgtcaatttgggaccgcggcgcccaacaccgattcgaccgcgatattcgggatatctgggccgaggcgtaccttaaggcggccgacgcgcggcgcgcctgagagaaggagcaacgcatgctgatcgaaatccacatgatccagaaccacagcccgtcaaacctcaatcgcgacgacttaggggcacccaagacctgcctcttcggcggcgttacccgcgcacgaatctcgagccagtgcctcaaacgcagcatccgacgcagcgcggagtttcagcgcgctttggagaaaggcggcggggtccggacgcggcgcttggtcgcaattctgtcggagcgcgcgcacggctcgccctccgcaccccacgacttgatcgagctggtgactaaggcgttcgaaaagggtggggtgaagaaggatcccacgaaggacgacccgcacgcaacgaacattttgttgttcgtgccagaggggacggtagtcgcgatggcgaaagcggtcaaggctgagtacggcaagcccgcggctcaacggacggccgatggcttggctgagacactgacggaactcttcggtcagaaggcgtcagtgccagacattgcgctttgcggacgcatgaccgaacttgactcagacggcctgtttcgcaagatcgactttcgcgttgaggcggcgcttgcagcggctcacgccatctcaacgcacgaggccatcaacgaggtcgattacttcacggctgtcgatgaccaggcggtcgggaccggtgccgggcatgtcaacgaggccatgttcgcatcggcctgcttctacaaacacttctgcatcgactggaaccaacttctcgacaacctcggcggtgacgagccgctggcgagtacgaccgtgtgccagttcctgcgcgctgcggccatgaatgtgccgagcgggaagcaaaagagctttgcggccttcaatccgccggacggcattctagttgaagtcaagcacgaacaccgcctgcccattagctacgcgaacgcgttcgctgatcccgtcccgctcaagactctgcgcggactgattggcgaaagcatcgcgcgcctggggcagcatgttcacgacattacggccgggtacggagtcaaagcgaagcggttctggttttctccggccgggcgccaccggctgacgtggattgaccgaacggctaaggagggtgaaaaggagaagctggccatagacggcgaagatggcacttttgattcgttcgacaaattcgtcagcgccgtaatgcaggaactgggaaggaccgcctcgtgactggaagtaccgttttcatacggctggaagggccactacaatcgtggggcgacacgtcgaagttcgtgattcgccgaagcatggaggccccgacgaaatccggcgtccttgggctgatctgttgcgccatgggtctttcgcgagaggccgcgcgcgaggtgctcacagacctgaataccttggttatgggcgtccgtatcgatcgggcgggcatgcgttggtgggactttcacaccgtcggtgccaaggtcggcattctgaatgcaaagggccacgtgaagaagacggccagtacgggcgagtatgaaacactcatcacccggcgcgagtatctcgccgacgcgagctttctcgttgcactgcaaggcgacgatgagctgactaagatcgtgcacgctgcgctcgagtcgcccaagtggccgattttccttggccgcaagtgctgcgcgccaagcgtgccgctactcgctcctccgtcggacggcgaatcctggacgaacccgcaggtacacggcagcttgagcgctgccctcgccgccgtatcctggcgccctcgatacgattccgaatcgccgcccatacctacgacgcgcgacggaagggcggagcttgattgcttgatggagtggcgggccctaagcgacagcgacgtcgcgcccgatgcggccgaggtatggtacgatgtaccggtctgtttcgatccccccgtccacgagccgcggatcgtcacgcgaagcactacggtagtcccgatcgcgcgagcgctccaacaacacactccgccgccgccgcggccgcgcgctgattacaccagcagagagtacaagaagcaacgcgcggcccgtcttgaggctgatggcggtgtgtgcgtcttctgcaaatcgcccgccagcaccgtccagcacgtaagctaccgtcgcgcgggcggcgctgagacgcaggacgacctccgggcgctttgccggctgtgtcacgatgccgtcacgatgatcgaatacggcctgggcatgggcctcgaccggatcgacccgtgccaaccccgttggcgccaagacattctgcgtactcgggccgaaatcgtgcgtttccgcgcgcttcaagtacggcgccgacgccttagccccgacgaggtcgaatgaccatgtttctatcgtcgctcctgatcgacaccggcgaaaaccccgaccggccgcgtcccggacgactgtggctgcgcaacatgtaccgcgtacaccagcgactttgcatggcgtttccgactgcagcgcgcagcgaaaacgatccgcagttcgtacaaccctaccagcgggacgacttcattcacgtgcacggatgtcgcacgaacgatcaggcttttctctttcgtgttgattctctcgccggcggcagagtagttgttctgatccagtcggcgatcaagccggattgggattacggattccataatgcgcagcaccttctcgccgcgccacccgccatcaagttgtttgatccgcagctcgcggccgggcaacgcgctcgatttcggctgcaggccaatcctaccaaacgcctgcgccgcgaatcgccaaacgctagcggtgatccgacaccgcaacagtgggtgggcaagcgcgtcgccgtgcccgctgacaagctccaggactggctcgcgcgccgcgcagagagctacggattccacttgcgcgaattgacggagttgtgtccgggatacgtgtacgttagtcgcactccagagtccgccggcggtctacggctgcgatctgtcaggtacgagggtctgctggaagtcactgactccgagtcgctggagcgtgccatcatccgtggcatcggccccgccaaagccttcggcttcggcttgctctcgctggcgccggtccggtaacgatgcttccccccgcacggcgccgcgcggaactcagcgcagccccgcggcgggccgatctttgacaagtgaataggcgagaatcccggccggaggcgcgccatggacgatctgcgctcgctgccccgcttcgacgatagcctcagctatctctatctcgagcatgcccgcatcgagcaggacgacaaggccatcgccttctacgacaaggccggcctcacgcccgtgcccatcgcggcgctggcgctgctgatgctgggccccggcaccaccatcacgcacgcggccatcaaggctctggccgacaacaactgcaccgtcgcctgggtcggcgaggacggcttgcgcttctacgccgccggcaccggcggcacgcgcggcagtgccgccctcctgcgccaggcccggctgatgagccatccgcagttgcgcctggcggtcgtgatgcgcatgtaccgaaagcgcttccccggcggactcgacccgaacctgacgttgcaacagatccgcggcatggagggcatccgcgtccgcgaggcttacgccgccgccagcaaggctaccggcgtgccctggaccgggcggaactacaagcgtggcgactgggccgctgccgaccccgtgaaccgcgcactgtcgaccggcaacgcttgcctttacggcctggttcaggccgccctcctgtcggccggctactcgcccgccctcggcttcatccacaccggcaagcagctctcgttcgtctacgacatcgccgacctgtacaaggccgacctggtcgtgccggccgccttcgaaaccgccggctggcaatgcccgtccgtcgaacgccagatgcgcatcgcctgccgcgccaagttcaaggacgctcgcctcatgcagcgcattctgcccgacatcgccgagctcctcgcgctcgagggcttgcccagcgtcgccgacgacccggcctgggacgttgaatcggccgcgcccggcgcgctctgggacccggacggccgcctcgaagggggcctcaactatggtactgatgttgcttgaacgcgtcgccccttctgtgcgcggcgaactcacccgctggctcatccagcctcgcaccggcgtcttcgtcgggaccgtctccgccctcgtccgcgacaagctttgggacaaggtcgtacactccctacaggctgccaaaccccgaaaaagcggaaagcgcgccggcgcgattatggtctataccaccaataccgagcagggcttcgacatccgcgtcttcggccaaaccgatcgatccatcgaagacttcgagggcctcatccttgcaaaaaccatcgcccaaccctaaatacgcagcgttgtccccacgcacgtgggggtgaaccgccaaacatgccgccctgccctcgtatagcccggttgtccccacgcacgtgggggtgaaccgagtctcctggctcgccgggcgcgctgtccgatgttgtccccacgcacgtgggggtgaaccgaagattcgggggttattttagaaataactgagaagttgtccccacgcacgtgggggtgaaccgctagacttgggtagtattgttacgcagggtgcagttgtccccacgcacgtgggggtgaaccgactcatgggcacacaccgcgctatcccgatttgttgtccccacgcacgtgggggtgaaccgcaaagcaattaaattgccaatctttaatttttcgttgtccccacgcacgtgggggtgaaccgcggtgctgaccaggtggtgcatgacgagtcgcgttgtccccacgcacgtgggggtgaaccgttgtgaactgtgcctgctcgcagtcagtaacgagttgtccccacgcacgtgggggtgaaccgataaattattggcatcaacgcatccatatgtaacgttgtccccacgcacgtgggggtgaaccgatgctcgtcgaaccggcccacggtgctacgaagttgtccccacgcacgtgggggtgaaccgctcaaagtgcgactcaccgtgcaaggcggcccgttgtccccacgcacgtgggggtgaaccaagatacactattgatagctcccgcccccacatccgttgtccccacgcacgtgggggtgaaccgcaataagctaagttctccgccggaattttagcgttgtccccacgcacgtgggggtgaaccgaattctgggaaatagctaagagaaatctttagttgtccccacgcacgtgggggtgaaccgtggatagcctcggactgggcgatgttcttggcgttgtccccacgcacgtgggggtgaaccgagtattgggccaagagagagctccggaataggcgttgtccccacgcacgtgggggtgaaccgagtattgggccaagagagagctccggaataggcgttgtccccacgcacgtgggggtgaaccgacctgcatcatgtgcgtctgcgatgcgtccggcgttgtccccacgcacgtgggggtgaatgtaaccgatcgggattgtgtgcggcttgtttcgagttgtccccacgcacgtgggggtgaaccgaaactgacggatgaggagaaggcgcagaaagaagttgtccccacgcacgtgggggtgaaccggcgctgcttgcgattgccgcagcggctcgcaagcgttgtccccacgcacgtgggggtgaaccggctacttggccggccggaagccgccccgcaatcgttgtccccacgcacgtgggggtgaaccggtaatcaacccacccacacgcccagtgcgaaaagttgtccccacgcacgtgggggtgaaccgtccagtacgtcgtacgagacgaacatggccgctgttgtccccacgcacgtgggggtgaaccgaaaaacaatcgcttgcactccgggcgatagatagttgtccccacgcacgtgggggtgaaccgcgtaacggtttgcagaccgcgcgtggttgcaaccgttgtccccacgcacgtgggggtgaaccgatagattaagggcatcgaaatatcaatttaagcgttgtccccacgcacgtgggggtgaaccgtcctcggtccccttgacgacggccggcttgacggttgtccccacgcacgtgggggtgaaccgtcctctgagtccggccgcagacgccagccggccgttgtccccacgcacgtgggggtgaaccgttgctcgcactcgggaccgactcacaactggccgttgtccccacgcacgtgggggtgaaccgagccagtttcgcctgttggtccgtcaatgcagcgttgtccccacgcacgtgggggtgaaccggccagcactgcgacgtatccgggcagggctgggttgtccccacgcacgtgggggtgaaccgagcagggtgagcagagttcagagatcagagttcgttgtccccacgcacgtgggggtgaacccggcttcgggcgtgttcccatatcgctgcgcctcgttgtccccacgcacgtgggggtgaaccggatctctcaaaatgagaaaaacaatggatgcagttgtccccacgcacgtgggggtgaaccggaggacgtccgcgacctcgaggacatcagggcgttgtccccacgcacgtgggggtgaaccggcgtgtgcgctagaagccgtctgcgcgtggcgttgtccccacgcacgtgggggtgaaccggactctccggcattttttcgagatttttttgccgttgtccccacgcacgtgggggtgaacccagggctatcgcatctaaaccgcggttagtcttgccggacggtcgcgttcgggttacactggcaaactgagcgtgtgaggcctcacggagtttcttgaacaaacccg

SEQ ID NO: 600 - DNA, 12610 bp, Artificial Sequence
  Synthetic Oligonucleotide
accagcagaacgtcgtcgaaagtgtaagtcttgcggatcgttttcttcatcatgaactcccttgaatatccataaaatgaatttcgccccggctgtcaagcactttaccgggagcagtccggcagtatgtccgaaagcaaggttggacggagccgaaagaaaaagtcttgacttatttcacccctgttaagtagtttgctcgataagaaaaaaagcttccgaacagggatgaaagcatgaaaaaaactattttggcagtctggctctgtctgctggcggcactggccccggcaatcatcaccgagagcggttctctccgcgcttttctgctgggcagcgagcccgcctgcgcctatgacaactggatttcccatattgccgagggtatagccagccccaattacaacctctacgcgccttacgacgtccaaaccaacggatttgggaatttccgccttcccacagccactgacctgatctattggaacaacatggcggaactcttcgtggcagaggattacgatggcgcacaggccatactcacatccaattccgccccttttcagattgtgcagttcaatgacacagacaccggacgcacctatatcatgctgcgcgagattcccaatcccgcctattatgacgacaacggaacggttacggaagatgatgacgaatcgggcgcatttgtctatggctgggggcttttcatctacagtccccagggcagcaaacccataatcatcaccgttccccatccctgtgatgattttcccactcccgcgatgggatatgaagctctgaagcactgggacgcccgctacctgatgataaacggctccggccgcgaggttcgctggaccaaccagggttcttacaccaactccaaatccctctccgaccccctgcgcaaccccacccatcctttcaacaccctctacaagaaatttgccgacaccatccgcgaccagtttggcgtgagggagttttctgcccagatccattcctacgactggaaccgccatcagggctatgccaactgccagatttctgccggtaatccgcgcccctgccccaacctgcccatccgggacctttcgcctctgaagcgcgacctgatcaatgccggccagcatctgatgattcccgcgaacaccattggcatacatgccgatgtctatctgaacgacttttacagcgtgaactacagcacgcacgatttcattttttcggacggcgtgaacagctatcccgtgaacgaccaggtggacctgcccgcctatactcagaaccagcacatgctttacacccagagcggtttaaccgattacgacgtttacgaacctttcttccatctggaaatggacgaactgcccaactgctatgacgaaacggaaaacgtgtatcactggttctacggctgggacgcgaccagccagagctggaatatggacggccttttcgaccgcttcatcgaatattacggacgctggatctacgatctggagccggtcctggtagatatgttcgccatgaacgacaaccaaaccccgcctgcgccgcaaaaccttgccatatacaaccagtccctgaccagcgtcactctgagctgggagaaaagccatgcttacgattttgaatcctacgaagtgctctacgccacggagtcgatcggcaccgacaacttccaggtcttcaaccgggataacaactcttttctcgcctcacccgattgcgagatgatcacggtgaccaacctgacaaactccaatccctactatttcaggattcgcgccaaagacaagaatggcaactactccaccctttccaacgaagttggcgccaaccttgccccggctggcattacctctttcacagcccacggcctggatggcacagtgcgccttttctggcaggtgaacggtcaggtcggcaaccagggtttcaaggtctatcgtcaggatgccgctggcgacttcactctggtggattcctggctcaccaaccccgccctttcaaatccctccagctacaattttgaatggtgggatacggatgtgagcaacggcagcggctatacctacaaaatcagtagcacaaacctccagaatgtggagtatttccacaactatcccgccgacgcggaaccaaggcccatccacagcctcaccgtcagcaacatgtcagggacgctatccgacgaagtattcttcagcgccaatcccttcgccaccgatggaaacgacgcttactgggacgtgaccaaaggcacccccggcgcctcaaattacgtctggggcgctttcttcgaacagtattggagcaacagcggcaccaacctaagccgggaagttaaggcaatgttcgatgccgattctgagatcaagacctgggtgcttagggtccgcagcgaccagatcgaaacgctcaacatcacagcatccggcaacttcagccgggaggaaaagctctatttgcagaatggcggcacctaccacaacctgctggccgggccctaccaatacagcaacacaaattccgacttccgcaccatgatccttcactggggaaacatgcagccccgggcttcctttgcctcgctggaaaacaaagtctatcagggcggaaccgatatcaccttcggctggagtttccaatatcccttcctcatcgaccatgccgaaatttctattgtcaacgcttccgacagtctgctgctttcggactccgtgacgcccacccaaaccagctttccctggctggtgccggccaacgtggctgaaatgcaggattgccgcttcgtggtggacatcgtggcggtggatggggtgcgtagcaggtttgtatccccctatcgcttttccctgcttccccagatgatcctggcctataacgaagccggcttgaagatgcgctccaatccctggccggatagcaacctcagctttgaacaggtctttggccccgccctcggctatcagatgaccccgaatggcggctggggcatgacgctggatttcgacttcggcactgcctattgggtttcatccaacgatatcaatttctacagcagcatcttgccgctccagagcggggcttattatattgatttggtccccggctggaactttttgcccaacccccatctctgcgcctacgacctggaggacctgagcttcactcttcttggccagttgcacagcttcaccgaaatgctaagccaggaactggtttcgcccgccgtctttgtctggcgcggcgaggattacgaaaaaaccagccgtatcgagccctgggaggctttcctcatctattacaacggctccccggacctggcgccgcagattcgtttcctgcctttctgcgacggtcccaagccgctggctccggaacccgtttttaggctgcggatggaactcgagggagcccatcccgccggaattgaactcggcctgcatcccctggctacaaatgccgtggatttccgctttgaccatcccagcccgccctgtcctccgatttctgattgctcctctctctggatccatcatgccggcgcggattccactgacatccggaacctttgcagcgaataccgccagcccttcagcgggccggaacaggttgaatacttcaacatccatgcccacgcgggcctggaagggccacatgagatcagtttcagcaccgagggagccggcgaccaatggcagattatgctgatgctggatgacgttccccactatctgaacggccaggatacttttacctgggagcctccggctacaggaacctacgaaggctacatccgggtgagcaattaccaggttgctctccaggatctggtccaaagccccatatccgcgctatcggcctatcccaatcccttcaatccggatgtcaccatcgccttcaaccttgccctctcaaacgaggtgagcgtcgatctcttcaacattcgcggccagaaagtgcgctcccttcacaaaggaaaactcgcgggcggaaaccacaggctgcgctgggacggacgtgatgaaaccggaaggggagtggccagcggtgtgtatttcgcccgggtgagcacagccagcgaaaccaaaaccatcaggatgctgctgctgaagtaagcgattatcagggactgcccggcgccgtctgtgcgccggcagaaatggaattacccccacgcaggtggggaatactgaccctcgggtatggtagaggttgtgtcgcccggttcacccccacgcaggtggggaatactggcgtctctgtttgccggaacgttcttctaccgcttcacccccacgcaggtggggaatacgccggcttcttcaccaggctgatgtaagccaccggttcacccccacgcaggtggggaacacggcatccgccgcgcccagccccgtccggatcacggttcacccccacgcaggtggggaacacttcatcctggggcccgcagactactcagacctcggttcacccccacgcaggtggggaacacctctatttcctttacaccatgttcattgggttcggttcacccccacgcaggtggggaacacttcctggtcaatctgctcctgtatcttcagggcggttcacccccacgcaggtggggaacactcggtgtagtcgagcgcctctccggcgaacatcggttcacccccacgcaggtggggaacacagaggtttcataaactctggagcagcggcagtcggttcacccccacgcaggtggggaacactaggttcggctcgccgcttgtagttgagctaccggttcacccccacgcaggtggggaacacggacacggcatttccatgatgggcaagaataccggttcacccccacgcaggtggggaacacatcgccattgccacccaatctttccagatgtccggttcacccccacgcaggtggggaacaccttgatttcgctatgcctatgcggttggttgccggttcacccccacgcaggtggggaacacggggaacggggcgggcaaccgcccccaccccacggttcacccccacgcaggtggggaacacgtcaatgacggacagggagcgagcggtctcagcggttcacccccacgcaggtggggaacactgcttgtcctgtgcggagctaaggcccagaggcggttcacccccacgcaggtggggaacacaagcgggccgttatacgcccaaaaccgctcttcggttcacccccacgcaggtggggaacacgcatcacggtagggacaagcttggcgaatccgcggttcacccccacgcaggtggggaacacacttcgaaagtagacgctttgaggccattgaacaggcttcaagtatggatcacggatgcttggtcatcaatttcaatccttcccattctgtcactatcctttccgcggcaccccaaaactcaattccaaagccttgttcgcaatgcttgctgtaaatcatgatacaagttccaccggcacaaccagacctggccttgtcccacagcttttcccttatcatggccgatacctgaccgacaaatactccagccttgatttcgaggagccagcgtgtaatttctcctctcaggccagagggaactttttcaagcaccagaaccatcatcatggcctccaggatcatccagaccccatgacaagccgccggggctcactttatcatctgggttccaaagcccgcctggcacggctggatcgacatcagcaaggtctggctcatcgtccgaagtttccagaataccgaaaagggcgtgaatgtcggccactatcttctttagcagaccaaattgatagaactggtcacggcaggcaatgcgtgtccttctgtccaggttatcgacccctgcggctgtggctatgaaagccgcgggcacggaggtttccattttataaagatcggcaatgtcataaacaaatgacagttgtttgccagtatgaacgaaacccagggcaggtgaatagccagcggccactatcgcggcgtggcagatgccatagagacaggaattggcaacggacagggctctgttgatggggtcggttttattccagttgctcctgtcgtaattcctcgcactcatgggcacatcgaattcttttgaaagtctgaaataggtatcccgtactctcgctccctcttttccccttatctgttcaagagagagggttgggtccagtttttccttgaacctcaattcatacattctgcgaactatccgcagatgcgtatctcgatttgaccaggcggcagcctgacgcataaggttggcggaactacgggtggtccctgtcccggatgagtaaaagcggactccctgttcccccacccaagccaccaaacagccgcattctgctaaaacaaggatggccgcatgggtgatggatacgcctggccccagcatcagcagggccagtccagcgcagggaacaggagtggagcccatggcatcgtgaaaggcgattgcctgttgttctttgtctattttggcatgctccacatagagataggtgaagcggtcccgcatttttggcattaggtgaaggtctctgttacgcatcacttgccggaaccacggaaaggaggccgaagcccattcctttggcgctgccgatacctttttccaaggcttcccggaacagaaaggcatcatccactgtcagataaccttccagcagggcggaacggtatctcaggggacggtattcgttctcacgccggggcgaatttccccggggctccggtttggaaccgtatacccagcccaggcttaccagttcggtctccccgggcgtgaagcccagtctgccagccttggcggcaaaccattgcgccaccgcatcctttgggttggaatttgtgtcccaggtaagggcgacccgtttgtgcagaacccttcccgttttttcctttcctccgggtccttcccgcaactcgtcgattttgcgtttgacactggcattcacgaggatgcggaagcgcagccgctgacctgctgagaactggggatcgtattccttaacctggggaggggctgccaaaaatcccgtggcattctggaaagcccagtcccaatccggcggcagggacgactgcaccaaaaccatcgccctttgattttctccatcggtgttgttgtccacccgaaagaggaactggcgcttttcaaaatctgcggggtcaaagggctgcagaaacctcgggtctccttccttgcgcttgcgcatggggaaagccatgctgagccgccggtggacattatagatattgttcagccacaagcgcccgggccttggccggtcagggttgccgcctgtgtcgatgagcagttgggatagatacatcatccgttctcctccttcggatcgagtttgcgcctgcgctgctccagcgagcggaatttgattatttcctcgcgtttggccaagatgcgctcacgccaggcggggtcacagggatctatgcggtccatggtcatgccgctgccatattccagcatggtgcaggcatcgtggcagaggcggcagagggcgcgcaagtcctccggcttctcgctgcctccggcgcgtcggtaattcacgtgctgcacagtagtggcgggtgccttgcagaacatgcaggcggcattgtccatcaccaaacgctcagcgcggacccttttgtattcaggattgtcgtaatttgcccggttgcggggcggttgccaggctttgccggaaagcacggtctctgcctcgaagttgcggtccaatggcaggttacagcggatcaccagccggggcaagtggtggggaggctcaaaggacaccggcacgtcgtaatgcgcttcggcgttcggcggagcgtgcacgtcatcatgggccggaacccagtcgagcacacagggaacactgtcaggtatcggttcgcctttttccctcagttgcgccgggatcgaccgcaaagcctctttcagactggcataaaaccctggcgggtgttcatccaccggacgggaggggggacaggattttcgccccagataaagcgtccagactggttttttcagcgcttcagccagttgtgccacgatatccggttcaccctggagcgcaaccaggaagctggcatcagccaaatactcgcgtcgggagagcaaagccccgggtttggatttgatcttgtccgcgcccaggtttttggccagggcagtgccaaccagaactaggccgttgggcattttcaggtcagaaatgcgcagcttctgctccgctcccacagtatggtaatcccaccagcggatgcccgggcggtctatccgcacccccatgcgcaatttggcaatttcacccagccaatactgtccggcttcggcccggctgattcccagggcagcgcagagcaggcctgccactccggatttggtgggcgcgtcggctgtcctgcgcacggcgaatttggcctcattgcttccccaggcctgaaggggagcctccaatctcaggaacagggtattaggcggagaagacatttcaactctctactttctcgttttttacatcatcccattcaaaacccaacatctcaactgcttcgcgaacaagttctagcaggttgcaaactggctttatgtccagcgtgccctgttgaggctttaggggataacgtccattgggcgagaaccacagagcgttgcctttcatctgtccagggaagaaaccggcacttatatccttcacatagttggccagttggccaatgctttgttctaccaagtcagaatccttaacgattcccaccggtcgcacaaaggcatttgcatagctgacaggtgtctcttttatttctaccaatattccatcgggaaggttatgtgcggcaaagctgttctgctttccgctgggattagtgagtgcagcggcctggataaaggctccgacagtatgagctgccaacttttcattaccctggaggttgattatcaaggtattccaatcaattgagtaatatttgtagaaacaggccgaagcaaacatcgcctcgtctatgaatccagcacctgtgtcgtcgccaggctcgtcatcagctgctacatagtaatctatttctgggcgggcgatgtgggttgaaatggcgtgcgacacctgcagggctgcttcaacagtggtattttcccacttgaccttgtctgtgttcttgtccttggtatcgggctcgagcattcttccgcacagagcgatgtcaggggaatgtattgcccccgatattacatctgccgctttcttggctttctctgcaacactcaggccttcgctggtgacaatttgagcaagggcatcgatcttgttccgggtcatgaacaccagcatcttactatgtccgttttcgtgtttcaaaccggctttgttcagaacttcctctgcctgattcctgcagtcctgtcctgtagcttttgtaatcaactcggccaaccgacgggtacggatacccccgagcaagtttttgaattcatcgctcatcctgatgctccgctttaggcactggctggagatgcgggaccgcaacaccccaccgaaataacaggtcttgggcgcgcccaggtcgtcccggttcaggttggccgggctgtggttttggatcatgtgtatttcaatcaacatttgattcctccttgctgattattaaatgctgaaataaatgtgtctgaccatatcgctctgtttgattcccgttcccaagcggagaggtcatcgatgagggcaacccagtccagactggcaatgtcatgtctttttaaaatcgcgagcacttgcgccagcggttcctccagttggttcaactcgagcgtgagcaagcggtcgaacctggctaaaacacgtgggaactctttttcttctttaagtccacggcatattctgcccatgagccaaggcaggctggcgcctttcttttgctcaaagcggaattccgcgaaaagcttggtgactagccagaccaccttccgcctgggggttttggggcttatactgcggagtggccaccacaggccggaaaacaggtcgaaacccggcagggattcatccagacggcgacccctgagctttctgagcaagcccaggtcgccctctttgagttcgcccaggctccgaacaaatttcacggtgctctcattcattatcgcctccggatgaaggttttttaattgattttggttttaggggccagggcttgcgccgagccagttgttctcgttcaagcttggcggcaaccgtaatttccggcactagagaaacggcaaaacgcttcatgaagaatccgtaatcttcatccgcttcctgccagacattgccgctgttttccaccatctcgcccgaatggacgtcaacccgatgctctacgtgcgggatgatgtccgccacggcggtgattcccacggattccttgtaatcgccccggcggtcttgtttcctcatcctgtgcagggagtaggctctttcggatatctggtccagcagttcctcggagcttgtttttccggatagggcaatggtcttttcccaaacgtccacacatttggcttgaacgcttgtgaagcccactaaaaacagcgtggcggtccgagacatgcctttcgcccgtaagaagccgaccaggggtttatgccaatccctgttagcgaaagtgtatttgtccccggacatcagagccacctgggcagtcaggccattattgtcatcccggtaaatcgcgtgagggtcgttccagacaaggttcggaggcactttcaccgcctcattgttgcaggcatagaccagaggctcatgctcttctccgcaggcgctgcattttgctccgtctgacaccgggccaagcaggaataccttgcggggcagccaggtgaggccagtcagcaaggctacatccttctcgttttgggatccaaacgggttcagccaggcaggaacacccaaccgggaagtgggttcccaattcaggaatatcgattccgacagactatcaccctgccagatggcatagaagggaggagttctgttgatgccggctccgattccgctgccgcctacggtggtaaagagtggcaggcgcagcagaccggtaacgcagcaagctgggcaaatgccatcgatgaaatcggtcacatggcggaagtgccagaaattgtttgccgtgggaagctcgtggataaggtccgtgctggggcgtattctggatgttcctggggattggtagaatctggggccatcaccgaacaattcgaaatattcttggttttgttcaagccagtccgtccatgcctgaggcagtggcttatctgataccggcgcttgttttgtattggcaaaacaccaatagcccagggcgaggaggaaacggaaaacggacatgcggtccatcggattgccgtaagccaaacgcagtgtgtgtgcttttcgcaggacctcagccaggccgagcctggcagaatgcccgtcaagctgtagcacactgatccagggtttgtctgtcaaattataatacattgaagctcctgtcgcatggggagggttgatagcttgttgatcctttacagaggccgttccacaggctaacatcattatgccccatagctattatacaccaaatttaccaaggaataatttgtcaagtccaaaatagggctctaatttcaaacttccttaaggccggcaaggtcagattcacaaattcacaaccggtaaatatggcttgtgaatccgtgtgttattgtggcacagtgagttgggggacaaattcacaaaatacgcttatctcttatatccagccggaccaggggagaatgccggtttgcagtggctcatgccgcaaacaagagatgaagggaaggtagagatgatataatatcaatatataataatatataatactattatatattatatatactatttctatatgtattatagactggtagcgtggatacatcatatcctgtttacaatcggcttccgcggatgtataagagaccccttttttgtgaattagcctcataattacccgtctatcagcaggttgcaaattcacaagccatatttaccggttgtgaatttgtgaatttgccttccaacgttggtgagcctggagtgcagcgagcttgcgagtatggactacaggagatgttgctggcgtccatgctcgtgcctcgctcgacgccagcgtcaggaaggtcgatgtccccgtcggccaatcgttctgggaccttcgggctccaaacatatggattacttgcccgattgggaagtaagtcctttattttaggttatctaccacagttggtagcgtaactggaaaagcaattcgtatgaattcgcgcaatttgtggacttcctcccattttgatacccactatcaatagaagccccatttgccccatcccatacacatctaaaatacttcccgctgagttcccattggccgggcgggaatttaaggggaggtttacgggatgttagtgggaaggggcaaacggcctgtccgtgggcgaaaaaggctttgggaaaggaatccgcagttattgtggcagattcggaacgattcttgcatctactatatg

SEQ ID NO: 601 - DNA, 12539 bp, Artificial Sequence
  Synthetic Oligonucleotide
  misc_feature (1412)..(1468): n is a, c, g, or t
tatactattatgagactattagtaactccagttatgcgtgtcgtgctggggcttttcaccgcgattgaggtgccttcggcatgacagagctccggtggtgggtggctggtagatcatcacaccgcttgcagcggttccgacgcaccctgccactcacttacagtcggttccccccagaatacgtggtgaacacatcaccaaggcgcgaaaatgccgatgcattagaggttcacccacacatacgtggggaacacgcaatcagcgcaaccaccaggaacgagagcgtcggttcacccccacctgcgtggggaacacgccagactcgcagtcgcggcttcacctgctagcggttcacccccacctgcgtggggaacacgccttctgctgcgcgctccattctgtccatgacggttcacccccacctgcgtggggaacaccacggcgagatgtggtcgccggaggccgcgtacggttcacccccacctgcgtggggaacacaagtacgcgactgaaacgtacagcctgtttgtgcggttcacccccacctgcgtggggaacacagacatgcgtatgccactcgctatgcggcttccggttcacccccacctgcgtggggaacacaggtgaatcggcttccggcgagaggccatcatcggttcacacccacctgcgtggggaacacccgatgtcatacgtgacggacgtctcatccttcggttcacccccacctgcgtggggaacacaacagcccgctcattggcacttgtcagttctaaggttcacccccacctgcgtggggaacactttccctcctttttggcccgtggccagccattgcggttcacccccacctgcgtggggaacactcatgtactcaagcgctctcgatgtgagcctgcggttcacccccacctgcgtggggaacacgatgcctgcgtgttggtgttctggtacagggtcggttcacccccacctgcgtggggaacacgtctgatgcggtgccggtgatggcgtagagccacggttcacccccacctgcgtggggaacacacctgctgccgtacaacacctctccgaagtggcggttcacccccacctgcgtggggaacacgccaaccctgacatgtacgacccgttgaggtacggttcacccccacctgcgtggggaacactcatgtactcaagcgctctcgatgtgagcctgcggttcacccccacctgcgtggggaacactcggggcgggttactcccgcccgccccgtttacggttcacccccacctgcgtggggaacaccgcgtcggcgtccatgagcttgataaccttggccggttcacccccacctgcgtggggaacacagccgcagcgaccgcagccagcgtcagcatctcggttcacccccacctgcgtgggnnnnnnnnnnnnnnnnnnnnnnnnnnnnnnnnnnnnnnnnnnnnnnnnnnnnnnnnnacccccacctgcgtggggaacacaggtgaatcggcttccggcgagaggccatcatcggttcacccccacctgcgtggggaacacgtgaagttggtgagcgtacccttgcctaccagcggttcacccccacctgcgtggggaacactccgtgccgacctttgtcttcttgcacaggtccggttcacccccacctgcgtggggaacacgagttcgcggttcatctggtcgagcttctcaaccggttcacccccacctgcgtggggaacactttcacaccgcagttgtcacaggtgtactcgtacggttcacccccacctgcgtggggaacacgtagtcgtcagccgctacgccagtgaagatgcccggttcacccccacctgcgtggggaacacgggagcctgcctcgggagcgatactcgtcctgcggttcacccccacctgcgtggggaacacgtcctcgacgttgtacgactgcgcctcggtctcggttcacccccacctgcgtggggaacacgaagccgcctagtacagtccctagcttacccacggttcacccccacctgcgtggggaacaccctgacttgccacgactggaatgcatggtggccactcgtcatcaacgggtttcagtgtcgctatcctgaacagtccgcggttgaggagagactgtcaccagcgccagaccctcgaagtccaccagttgcctcgtttggatgccgtgctgacgataggagaacccctgtggattcctgtctgaccatatctgcagcacccacccggtctccttcgttgtcttgacggccttcatccacaactcgtccctcactcgcccactcgggttcccaagaaaggttccagtcgccggctccaggagccatcgcgacaatgcgcccctcaagttcgtcggcactctccccagcatcattaccaacaccaagcacctccgcgatatctggcagaagtctctccatgagtctgaattcgtggaacgccgtacggcaacgcattcgcgtgccgcgttcgatactctcgggcatctcggccgcggtttgaaaggccagcggaatcgtgagagttgtcttgtacaggtctgctatgtcgtagacgaagctgagcatcttgcccgtgtggatgaaaccgagtcccggagagtatccggccgagaggatcgcggcgtgacacacaccgtacaagcaggcgtttgcagcagatagcgcacgattgaccgggtccgcagcttcccagttgccctggttgtatcgcctgcccttccagtcgatgccatatgcgcgggcggcgtcggcgtatgctttgcgcacacgtaggccctccatccctcttatgctctccagactcacgacgtctggtacggattccgcgaatctgaaacggtacatgcgccaggcaatatgcaggcgggattcatcgtcgctcaccagcgacgcctgcctgatgagccttttggcgctgtgtgttccacctgtactggcggcatacagtcgcgtgccatcctgccctgtccacgccaggagacagttgttccgcgagagcgccgctaccgcagcgtgtgtcaccgtagtgccgggtccgagcatcaacaccgagagctggtcgatgggcactcgcgttgttcgggtgtcctggcggaagcacaggccgagatcatctacatcgagtcgccccgtctcgaggtacacgtagctccagcgatcctggaaccgtggaaggtcgaagagcgtgcgcatccgctatcctctgtcaggtgctacggacaacagtccgaatccaaaagccttggcgctgccgatgccgccgatgatagcctcgcgtaaggcttcagggcctgtcactcgcaggatgccgtcgtagcggaccgaaagatgcgacatgcattcggagtcctcgttctcttcgaggtgtttccgggtcgccctcttgaagctctcgtcggtcactgtcgtggacagtacttcaaatccaccagactgtcctttccgaaccagccattcgcgctgcttttcctccgttaggacgccctcccgctttcgggtctcgttgttccgtctagtggggttggcacgcaggcggaagagcagcgactggccttcttgatagtcatggtggacctccttcacttcgggtggcccagccagcaggtagtccgcattacggaaggcgtactcccaatccggccgtcgtgccgactggacaacaatcatggccctgccgttcaccagagggtccacccggaatagaaaggcttgctcgcttgtccggatcttctgatgcaccccgctaaaggcgcccactcgatagggtctgacaaagtccggatcgcctgcctttgcttccgccagcgggaatcccatgcacaacctctgatggatacgatagggttgtctcatccagagtcggcccgggcgcggtctgtcagggtttatgcctgtgtcgacgagaagagccgacagatacatggtcactccacctcctctggagatagatgacgccgcctggtctccagcgaccggaaccggatgagttcttgccgcttctgaatgatggcctcgcgccactgcgggtcctcaggattgatgcgatccagtcccatgcccagtccgtactcgatcatcgttactgcgtcgtggcacaggcgacagagcgaacggagatcatccacggtctcgttgccgcctgcgcgccgataggtaatgtgctgcacggtggtagcaggagccttgcagaagatgcagaggccagagtcactggctaatctgagggagcgcgccctgcgataggcgctgttcttgtagtctgctcgcggccgtggaagagcggacagatactgctgcagaggttcttcgactgacacgtgcagcttggttctcatcacaagccgtggtgcatatgcggggggaaagaaggaaagcggcgagtcgtaccagacttcaagaggctcctggtgtcgctgtccttggatggtgcctcgccactccaatagacacggtagcgcgttatcgtttggagggaagtctaccccgccaagtcttggtcgccaggggtgtgtctcaagggcctccaggagactctgggcgttgtccgcggcgccaggcgatactactgtgactctcgttgcgacgaccggcactgccggtgcgcatggcttgcgcccaaggtaagtgggccacctgggacacccgagcgcctgtgctacctcctcaataagcgcactctcaccctgcaggccgactagaaagctggcatccgagagatactcacggcgagacaccaaggtctcatattccccggtcgtctgcgtcttcttgacctttcgctccgctgtgagcatgccgtatccagctccggctgtgtgatagtcccattggcgagacccaggacggtcgatccgtacagccatacgtagcagtgccagttcatgcaggcgccgggatgcctcacgccttcccagtccgagcgcgcagcagatgagcccgaggacaccggacttagttggggcatccatggtgcgccgcaacagaaagcgtgagccatcaccccacgattgaagagggccctcgagcctcagcagtacgatgctttcgtctgaggcagtcactatgtcgcctccggcaagaaaccgtccggatccttcaccctgttccattcgaggccagaaacctcttgcacaaccacactcacgaagtcgtcgaatctcgcgtgcgaatcttcacctgcaacaacttcccgctcggtcggctctcctttctgacagcgctcaatccatgtcaattgatagcgcccccccggtgagaaccagaagcgacgagagtcaatgccgtaaccctctgcaatctgatgaacgtattggcccagttgagcgatgctcatacccacgactccccgcggagcattcattgcgacaggctcgacaaacgcgttggcgtagttgacagggattttgccggtccgcttgacttctacgagaatcccgtctggaaggttgtgggctgcgaatgagttctgcttgccggttggtgtcgtcatggcagccgcacgaatgaaatggcccagtgcggacgctgcgagtgcggaagaggaagagccaccgaggttactgatgagttggtcccagtctagagcgaagtacttgtagaagcaggcggaattgaacatggcctcgtcaacgtggcctgcaccaccgcccaactcgcccaggtcgtccacagccgtgaagtagtccacatccgaaaccgcctgatgggttgatatggcgtgagctacctgcattgcggcttcgacgtcctcgaacgcatcggaagtagtcatgcgtccgaacatggcgatgtccactgatcgtctcgaataggcgcgcgagagttcacgcaggaaagctgcgagaggccgcttctgcagtttgcctgcgatccactggcggtagctggcgctccactcgtcactggtacgcatcgcctccaacacatgaacaaacgcatttgcctcagtacgctccaacaggactagctgcggcagtttgtgccgctcatcgctgtcgccgggctcctgtacatcctcgtcgcctatctggacctccttcttggcgatactcgtgcaagcctgcacgactctgtcccattcctcgtctggtacgcttgagtcgttcagcgcctgccgcaccatttcaggaaagtacttcgtcctgattcccgtgtgttcgcgcatcgcttcgacgaaaaggcttgcccctttgttgtgtacgtcgttagaatttcctgggttgcggatactgcgcttcagacactggcttgaaattctcgcgcgagttacgccaccaaatgtgcagctcttgggggcaccaaggtcatctcggttcaggttcgacggactgtggttctgaatcatgtgaatctcgactaacatcgctttccctccctgtttctagacgccagataggcgcgagcccatgcgtcgcgcacattgtgctttgattccctgccgggtcttccgtcccataccgcgaggtcatcaagaagctgcacccagttcaaccctttggctgaaccggcaactaccgcctgtgccaccaccttcaatgcccattgaagctgcggttccagcaaagccattggggattgcaagagcctatcgaaccgcagcaggaaacgaagtgcgtagcgagcggacagtcgccgctcggcgctgccgagcaaccgaggtagcacgctgtcatcggacgaagcgagcggaatcggccactgacagatcagctttgccgccagccaacttgtttctctctgcggtgctgccggactgcgctgtcgcaatggccaccagaggccggtgaacaaatcaaatccctccagggactcactgagagaggcaccctgtttgtgacggagttctgctcgttcgccgtcccctagagccagaagacgccgcacgtagacctcggttggattcatcttgtcgctccctccaattgcccttgctcgtgtctgacggaagcgcgcccacgcgatgtgacagtcatcccggcgtcatgccggagcgcttccaccgcccgaagttgcatctgcctgcgtttcagagccgatccggggtcacaggttgtaagggcaagctgaatcatcgaggcgagcacgtcaagtacttctcgtcgccagcgttccaccgagcctcgctgctctgacgaagtctcctgcgccagtgaccacaacagagtcacgaatgaaccgaacagtcggcgctctgtctcgcagatgaggggattgactaggcacctagccgcaagcttcctgatgcggccgtcacctcttgcccttcccaggagcttcctcaagttgaaccggccaagccaatcgagttcctcgaaggcagagcgacgcaggacatcgtcgtggagaaccttgcgtggtatccgccactcaatccggtgctcatcgaagacctttccctgggatgtgaatggcgcaatacactcgacaacgactgcgtcgcttcctgttccgtcgtagctatcgccggctggcaacgtgccgcactcatgtggttcgacggacaacataatcgctgaggctgtcctcctccagagggacgcctccaaggccgcgtacttgagcggatgcgatgcgcgcagaacgttatcgcgggcgtctggatctgcgttatcgttgcccgtgcgctccttcgtgtagtgaacgtgcgggtctctccatgagcgtgtgtcatcctttcttgcctgacccttggcgaataccaggcttgatacgacggggccgcttcttccacagttgctgcaccgactatctgaggtcgccctcgtcggacccaaccacacagctcgtggttgccacgtgaatccttcgagtgtaccgatctcgctgctcgaccttgggccgggcttccacacgggactgtcatccgcagccggcccgccacgaggcatattcaacatgagtgtgtctaacagcgttctaccgcgccgtatgaagtagacaggaggcgcattattgatggacggcgacttcccagcgccgccctgaatggcaagcaccgggaggcgtatgagccccaaggcacaacacgctgggcagatggcgacatcgtcgtcgtggatgtgtctgaagtggttgatttcagttgccgccgggaagtatgagagaaggtcggacgccggtctgcccggcacctcggacttcaccctcccgtcttgatagaaccgtgggccatctccaaagagttcaaatgcgcccgagtcttcatccagacgtgcaagccagccttcagggattccgcgcgactcccgcagagcttcaatctccgaggagccaggttcagacctgcaccacagagtgacggcaatcagcaatcgaagcagagccagattgtccgtcgcactgggctcgccgagactcaagagcagccccgatcttgccagggcatcacgtatgccgacatgagtctgggagccatccatacgaagcaccggaatccatggttcttgaagcaagttgtatttcacgctacggatcctcccggccagtctgcattgtgccggcgccgtgcgagccacggaccgttcaaggccttgttatccaagtcaccaacaacagcgggtctcccggcactacggtcacactgcgttgtgacaactgtctgtcacaactccggcagccacaagaagaagcgcaagaatcgtccatatgcctcctcgcgcctgcaaggatcggcagtgaggcaatggtgaggcatataccaggagcgcctcatcgccgtgggggagaacgccggcgttggggccaatctagaccaagtggctcgcggtgtcaacggtgcgaactgcctccggattctcgttgtcgagaaagcgctcggttgactccctacgaattcggttaccgatctcgagtgcagtcctaataacgacatcactccgccagcgataccagcgccagctagactcgcattgtggtctgcacacactcccaagacaattcaaccatgtggcgtgtcgtatctccgtaagctagacctgtacacatgagcgcaattgcgtgcagggattggcgttgccggcggacgccgaactgcgagattggctggagcaacggatgcgacagccgcttccctcagatgtattgaagcggcgcgcaatgcgagacccagtgcgggtcgtaaatcaattgaagcccaatgctccgctgggccagctgctagatgcactgcgcaatctcaaaactgccaggcattgaccgccgcatccagcgtccgcccagccgcgaaccgtctgttcgcgaccttgaacttgttgcttgggaactggtcgtggggccggatggactggcgaacgagactcttctctctggggagggttccacactgaactgaggaggactcagtgattcggactggggttctacgtggagttgttctctggaacgggacagaaggaggggagccacttcactcgatgtcagtcagcgcctcggccaatgacacgcgtaagcttcttccgtattcgcttgatcggcgggaagtgcttccctgcccgactgcctgcccacgcgcggcttggcatcggctgagtcaactggctcagattctgcggacttgctgggcctggactttcggagatcggcgtacggcatatatccggcgccggcctcaggctcatccagagtcactccaccatcctcatggaatatcagcctgcccactcaatcatctcctgcccgatagagttcaagtcaaagaactgggatagtccgggttcaggttactgacggagtgcttcgtggccagagggcaaacgcggcgccacgcttcatcccgctgccctcttccgagccgccagaagctatctagaaacatgaccacgatcctaattgtactccatgggcaggtagctcggtttgctctgttgcacggtctgcgttccgggacgcgccccggtgtttcatgtgattgctggaggcatggccacagctaacggacagctaacggattgcccgattatcgctgacaccggatggtatccagtgaggtggccccacagatgcggacaagctatgaagggagggttccgctcaggagtcggcgtgatcttacccgccgttgatactagtgccgtttagagtctcgttgctgcaaacacgtacttgcatggcaacggccgccccctgaacctctgcactgcgatcaaggcggcggtgctcgtggaagtcggtcgtgcggagacaaagaagagccccaagcgtcctcacagtttctatttcgactcagcctccggagtactcctgccttacttgtccctcaacctttcggtcctggaactcggcctgacacttcctctaagaagactgaccctttgtcgctgcttggatacctggggctagggctaaggtacccgacgcgcgaaaggtctgtcgaggccatgttaaacgtgcgacgggaaatcgcatgcgattatcagccggttctgtagggtgtcgacaggagtccgtcccgcacacggcatcatagatgactctcaccaacggtcggaagttcgtgttcaccgtagtagggacactaatcgccgcgagaacaacactgagatgtgcacagtggtgaccagcgtgcgtatctgtctcagtattcgcttagagtagaacacttctgtgccagtctgcggcggttcacgtccctctgtgggccgtggccacaccgcgggacagggatttcactggtctgcgtcacgactaccagttctttcggtgcggttgcgcagcattcacgcgccgaaatcgatgtactcatggccattcctgtgtgtgcagaccgccgcgcgggtgcatccaggcgtttcatgtgacattcacgttgcgattggctacaatgccagagtcgacaactcgtcgacttacgaacaaatgccactcaatgtgacacgaaatcgtggtgaagtgcgcgtcaacgcacggaaacatcaacgcgaggagacccagtgatgcagaacagaaccataatgcggccgaaaaggggcaggccgcgtgaagatgtgaagcaaatcaagataccggagactgcctacaagatgctctacgcgttcgccgcggcacacaacatgacattcggcgatgcggcagcgaagctcatcagggacagcattctcgattttgtcggggagggaccgacgccaggaatcacaggactgcactttgaccgtgtgagaaagcaggtgaaggtgccgataggaacgcatgcggccctgttcctgttcgcgagctaccacagcatgactatcggcgatgcggccgcgctgcttattggagtcagcctgacggagtactacgggctggacgaggacacggagaccggccaggggcgcggaaaacgagggaagaagtcgaagaagactgacgctgcggtcgaacgtgcgaagcgtcgcgagagccaggaccgcctgcacgcactgagggaggccgtgcgacagcaactcgagctgaccgacggcggcccagccactacgtgactggcgtcatgcgccacagagaagagtgttaaccatcgggtctgcgcccgcgttcgagttcgattcgtgcctcatgacagcgaatcacggtgcagctcatgcgtgcacggccctgcgacactgttgctgcacgacacccgcatccgggtggcggctcggacatctgcccgcgctgtccgattcgcgcttctgttcgccagtagcgctcatttccgctcagccagctatagctccatgtggcagcagccacggtttggcgccggcttgagacacgagctaccatgagcgtacggaggtaagggcaattgaccacgacagcagtcatcattctggctctggtgttctacggctcagtctatctgttgttcggcaggcgcatcagatcacgtgtggcgcatcaaaggcagatactccgtgcgcactctcaaaggcacgaggacggcactgtctagccgctgagcggaaggccgccgggaggcctggaacaaccctgaactacaaacgcgtcggtactgtgcgtggcgcttgtttctttgcgacatcgcagggaattgagcgccggtgtgctgaaccttggctgttccagccatagcggttcagatagtccacgttgtcaatcccttctggatacatcgcgcttgtgtgactcgtgtccgagtcaaacgcctcacccggcagtgagacacccttgagttcaacggcgatggccgccgccgtatcccgggagtcaggcgaagacggctactgccacatcgctaagaagagcgcgagattgcgcgcagttgacgcatgatgtgactgatggtcgcagaggctcgagccgttacgagtcgcgtgaaaaccgaaatgtcacccaccttctagtcacctgcaatgtgctcaacgtttgcacgccataactggagttatgtgtgagttcacgtacaggcagacactcacgggaggcgtcgaagtcccgacgtcggagaaaagaccatattggcgcgaggttgcatcggcaacttggggtgcaagtccgcggtcggcgagcatcggccacattactaatagtctcataatagtata

SEQ ID NO: 602 - DNA, 12376 bp, Artificial Sequence
  Synthetic Oligonucleotide
aggtggacaactggccgtcggaaaggccgtcaagagccgtgcgggcggatcggatagacctgttgacagaccgagcgctggtcggccgcccagcctggtttcttactgtctgaatcgcagtattcgaaatcgaacaccctggtcggtggtcaagccctctgttcggatggacgcctgcaagcggtaagggcccggcgtcacaaaagcgagctgggatgcggccgcgaagtcgagattctgcgtccccgcgaagctgatgcgaagcgagcacttccctgccccggcggtcgcgcagtcacgggcgacttcaacgccctgagcgtgtccgaagttccaatcgaacggtgatggcgtgggctcgaattggaagtttccattaaagaggtcgttcgacttccggtagtcgcccgcgcgcgcgcccaggtgctgcgcccatgcggacaccgccgcttcgggatggccttgctgcacgagaaaaccggcatactcccctgccgtactatcatcgttatacccatgtcgagcgatccaatcccaagtgcgttgcgcatcatccaggcgcccggcttgcatcaggtattggagccaggattgtaccgcccgccgatcttccggaaggccgtacagcaaaacatcatcagcgtgatctaccaggcgcgtgtactcgctgaagatgatcgaatcgtaatccggagtgagcgtcaggatacgcgccgtggcggggagggcttggtggttctcgccgacttggaaatagaagttcgccgcgcgcaggagaaggggcgcagaccgcggggcgagggccagcacctggccgaagcactcgcgcgcctctcccttctgtccggcatcgagaaacgcctccccgaggtcggcccatcgatagggattttgcgggtctcgctggagaacctcgcggaataggacaatggccttttggacgtcctcttcgctcatccccgtcaattgctaccgcgctcgcaactccaagggcgcgttggtgcaaacaaagatgcggcacagaacgcggtcaacctccgcgttgttctgccccaacgtctccgagagaatgcccgcctcgcagtaggcagccaaaaccaccccgaggatgaacgtcagcactttcaatccagcacactctcccgacgacggaccttttcgaaagcccgctgatgtaacggcgaatttacctagccatatggcggcgcaaagccgcctctacatcaatctgacccactgccgaacattacagccacatgccgggacggccctaatcgcaatgcggatgatccggtgggcaatgaaggctacgcgggggtggcggcggcggaggtggaggtgggaagggtggccgcggtggcgagggcggtcggggtgggtcgtgcggccgtggaggatttccgcctctggcaagtggggtggcgggctgagccgaagctggccccgcggcggagttccgcgccaccggatgaactagcgggaccaagctcactcgcgagccttccgccggcttcaagtcgaccgacccagacagaacgcgcagcgccactgaagagctgcccgcctccagcttgacccgcgaattcggatcgagcgtggcgcggctccggtcggccaaatagatcatggccgacgaacccgcggtggcgatctcgtcgcccgccaccaccggcaaggatgatacggcggttgccagcgcggccttgccgttgagcgtcagcgcccccgaactggtgaccctgcccaccggatcggcggccatcaggactacggtcgtcatcatgacgataagcagacgcaaatatttcacggctacctcctgtgattgctgattggcgatgggcgatgggaaaacgggtatggcgacgtcctctgtcgtcaatcgccagtcggaaataggccattcccgagccccgcggacattcccgcaacccacgccaggagcatggcattggccggaatatagaagttgaaatccgccaggctatgcaccagaatcgcggccagcgcacccgcgcacgccacggcaagataccgcgcccccgggtctcgcgatccgacggctttccgcaccgccgtcctcaccacggagaacgccagcgcggccacgatggcgaaacccaccagccccagttccgccagcaactgaaggtaatcgttatgcgcgaaatcgtccgtgacgagcggcgaggaaaccttgaatcttaagaacgctgtctcatatccgcccagcccgcacccgaagacggggtaagctctgatcaacggaatcgtctcggcccaaagctgcgcgcggccttctccggtgggatcggtcgaaacgagctggacgaatcgcgcgatcagcttgtccggcggcagaaacacgaagcccgccagcaccagtgcggcgaccaggccgaccgtggctgtttgccgtttccgggagcgcgcggcccagctcagttgccgggttccgagtgccagcgcccccatcacgaacagggaagcaagtgtcgcgaagaaccccatccgtgaaaaggaaaagacgattgcggcaaacatcaatcccgccagcgcccacacgccgcaagcccccagcgccggagtcaccgccgagtgccctcgcgagcgcgtgcgccgccaaagcgccacggggtacaccactgcgaacggcagcgccatctccaggaagcctgcgtagtggttatggttgacgtacgtcccccaccggagttggtccacgcctcggccgaagttctgcgagaggcccagaccggcttccagagcgccgatggcgacgatgggccacatcgccagccagcggttatccgcaaatcgccaagtcagctcgcgcaccagcaggaagatgatcacgtacccgcagacgagcaggaaaaattgaaaagtcgcgatgggtgaaacgctcaggggtacaaagttggctgggcgtccgatgagtgctgctggaggcatcgccgcggtgcgggcgggtgacagcacgcgcaccaggtacaccggcagcggcaccacctgcatcaggatgtagacgggcaagagagccagggtccagcgcaccacgcggccgggtagtggcgcccactggtggcgggggcgggcaaggctcagcaccaccgccagcaggcacagcaccaggaggtagtggtactggtcgattcggagcgctccgccccactcgaagacagcgtaggcgagcaccaatcccattgtggataaagcgccgatgtccgctattcttagagactctcgcgttggcttttcggggtgggactggaggcgcatggactggattgggagcatcaccgtaccgctaataggctagaaagtaaacctgggtcatgggtgacaggtgacaggtgacaggtgacaggaaaggaggctgcgccctggcgcagtaggtgtcagcagacaggttagaggtcacaggtgacagtgaaggagcctcaagcaagctcataggggacaggggacagggaacgagtgtgcgccttgcggcgccataggtggcacgcgacccgggagggaagctgagccctgtgacctataacctattccctgtcctcctgttccctgttttccctgctgtaccctgtaacctataacctattccctgcctacttgttccctgtcttcctgtaccctgtgccctgtaacctattccctatttccccctcattgcggaacgctatggccccctcggagggtatggttcgcgacgctcatgccgaggagggcggacagcagccaccgggtgagcagaattcccaagaagtagatgatgcgatgttcgaaattgaaaccccgcaggaggacggttccccaagccgcgcccaaggtgctgcacgccgctaccaagagccacgatccgatccggaacttgttggacttccaacccggcacgtaggcgttcaggtgaaaatcctcggacttattgtctccgtcatctgcgatcggcaggagttcgatcctttcccaaaaataaatgcaccattggcgatacgcgccaacgagcacggcgatgagcaggcacattgcgcagcccacccaggaattattaggtaaggcaagaatcatttcgatctcctgtccggcgagcaggttataggtgacagccagaggttacaggttacaggtcacaggtgtcaggtgtcaggtgacagaaaaagaggctgcgccctgtccccctgtctttccgttccctgccttcctccgtcccctgtaccttgtgacctgtcacctgtaccctgttctctcttctctaccctatgacctgttccctgtaacctgttccctgtctttctgttccctgtctttctgttccctgtctttctgttccctgtctttctgttccctgtcttcctgttccctgtccactgtccactgttccctgtaacctgtccgctgtcttctcatattcgtgcgctgctcgatagggaaactatgcagcaggacggtggccaaagccgcgccctgcgaggccaaaggtgacagggaaagaggagagaataggcaataggtgacaggttacaggtgacagggaaagaggctgcgccctgcggcgccaaaggtgagcctgttccctgacgcctgacacctgttttcccctgttccctgtccacggtcctctgccttcgggttccctgtcttcccctgtcccctgtgacctgtaacctgtcacctctcttcctgctgtaccctgtcccctgtaacctatcccctgtcctgaccgctcagagccctacgctacagccattttgtccagcccgctcatgacaccttaagtctgatgaccaagctactcacccgttggagagtcagcccttccctggcgcgctgtagtggcggtctctgactgtcggagggtgttgtggcatggccaacttggggtagcgccctaattctgtgttggtcccctccctcttgacaaactgcgatcgcacgtagcatctttccagcagcgaaaaacaaggtaaggaccccgctgctgtcgaacttggacggaggggcggcgaagcgatcgctaggtgcggccctgcttatctcaagtggcttcagtcttagcggttgacccgtaagggaggaagaccgaagtctaaatagtgaaaacgtgtttgaaaatggcacctgactcactcgggatgttgaccgcgattttgatatccgttggcctaatcgtaagcggagtgcatcttcgtcgtgtacctaaacttaaaatcgtgggagcgctgctggctgtacttggcatcttcggactcatggcagctctgggcttcatcagggtttattaacagcactcaccacaatcttcatctctgccagaacctcttggccgatcagcacgcgcgttgagtgcctatattggtaaaagccatgaccagcgacgtatgccccaaatgcgagagtatgaatctcgccgactcccatcggcgaggttggatcgagcggtggattcttagcttttttggtatcgtgcccattcgctgcatggactgtaatacccgtttttactccttccgccgtcccctctactgactccttttttcttcggcactcggttcagctcgccaagttgcacagatttcctttcggccgtcaatgtaacttctcagccaatacccctggactgacttgacaaaaccccattggatgggttaatataggtttccggtagtctagccaaaaggggaggggctgccgatgcaaacaaatgcctccgttaattcgcgccggtgtgagcgcaaaatagcaacaattccaatcaaacttgtggtgaaggccgacctcttcaatgcagacgattcagctctcgcggtcgacatttctccgcgcggcgcctgtgttcgaaccaagctggagttagatccaggagagtgggtgggtgtcgttcccaagggaggatacccgtatgccatccccactcgcacgatttgggtgcgggaggatgagttcagccattggaccttcgcggggcttgagttcttaaacaccccggaaggttagaaaatgcactccatggcacacccttccagtgtttgattggaattccaaaaccccaccaacacacgtttaggacgctacctgcctccccgaaggggaggaatatcattagccgtaggtgaaacctacggaccgagacggcgacgaaaggaacctaattttccgcgtttcctttccgtgggtttcacctaaggctatgggcgacaggcagagggcacaggttacaggtgacaggccaagaggcagcgccgtccggcgcccaaggtcagcctgctgcctgacacctgatacctgacacctgttttcccctgttccctaacccctgttttcccttctttcccctgtaacctgtaacctgtcccctgccttgcggtggcagagccgctggggctcttgcgtgaggcggaagaaccactcgaggccgttctcctgcatccatgcttgcttggcagtcccggcgatgaagtcgaaggccgctcccaccccggccatcgccggcacgcctagccgtgagcggtgctcgaacatcgagcgttcctgtttgggagtgctcaagcctacccagacgacatccggcgccgccgcctggattcgtagctccacttccaccttttcttcctgggtcagcggccgaaagggtggcgagcaggtggctcctggttcgcgtctgctaagcagaggcgataaccgttcttgtggtcttcgggccttgcctttctcgcgtgccgggtgtataccttcatcgcgttaatcatttggtagacagccacccgacaatcgggccgccaggagcgcaacgggccgcccaccagcctcttgccaaggcaaggaggaagttatgagctataacctgctcgaagaaaactggattccagttctatggaaagacgggaatagcaatcgcgtgggcattactgaagctcttaggcaagcaggccggattcgtcaagtcgccgccagcaatcccatggaccgtttggccatcctgcgtttcctcctcgcgcttctctattggtgcaaggggaatccgccggacgatgaagactcggtctcttcgtttccctcggattggttcaggaaacttgatgacaataaggactgtttcaaccttctgggagatggcaagcggttctatcagtgcaatgccaagtctggaacagagggaaagctttccgccaactacctgatgcaagaggtgcccactggcacaaactcttggcacttccggcattcgacagataaagaggacggattatgtccggcgtgctgcgccgcggggttattgcgtttaccgctatttgctacgtcaggggggcgcggcaagccgccaggggtcaaccagaaaccgccggtttatgtcgtaccggtcggcggttcacttgcggaaaccctgcgtctctcctggcgcaaggtatcggacacggacttcggaacgccggcttgggaagagcccgatcttagccttcctcgacatggcaatgttccgctgcttgtgggattgacgtcgctgccccggcgcgtgtggctggacaatccgcaggaacccgacgccaactgcatctcgtgcggacgtaaagcgcctctaatacgccaatgtgtgtttgctggtgtcggcagcgcaaaaacggatgaaaatggcctgggccgcgtatggagcgacccgcacaccatcactgacggcgaggatgtcattaaacccagcaatgcccttggtgcaaccgacgcggcggctgggcaatgggcaaggatagcggcgggaattcttcgggagaaaaagcccaatggcaaaagaggcttgtgggtcgtcagctttgcgacggtgcagaacgacaagtacctggaagcgatggaatatgagattcctctcccgagcacgctagatgatcggcaggtcgcggagagtgtcgaaacgattgacatgtggcaaaaggagggccggaagcttgccggcaaagccaaaccgagagggacttcccgaagacatcttgaaattcctcccatggtcgccgcagttcgcccgcacgtagaagcaaaggtctccgggaaggtcggcgagttgatttcgcgaggccgcgatgcgtgggagcaggcagcccgggaatataggccgatgatggccgccgtcgccaaatcgctttccccgggctataccaccgctgcgctccggcggcgacgccagattgtcaatgtaaggccgaacatgcagccaggcaccccaccggccgggagggccggacggaagaagggaggcgacaaatgactccaacggagcaatacgtcgacgtcctgacacatctgaagtccggtgatctcggactcctgcgcgagcatgccgggcaagggctcgaccaatcggtcgatgcctttgacctcttcgcggggctctggtggccgttgcgggagaggaatcagcgcgcgccccgccgtgcggtggcgtggcttatcgcaaaactctatgccttccggccgatcgagcattcacccgggcagacgcttgcgtggcagcttgggcggtaccggaacgacaatgaccccgagaaagaccctgtcgcggaaaggttcgacaggatgctgaccttgccggttgatatactcgagccggccttgcaatggtcgcttaacctcatcgcctccaaaaacccgaagctcgactgggtgacgctgacaaacgatctttccatttgggaacgcgaaaccacccggctcaagtgggccgaggaattcttgaagtcttcgaaggaggaccgtcatgttaattgaaattcatgccattcaaaatcacagcccggccaacctgaaccgggacgacttgggcgctcccaagacctgctacttcggcggagtactgcgctcccgtatttccagtcagtgcctcaagcggagcatccgcatgagtgacgaattcaagcagttgctcggcggcgttcgcacacggcgactggcgcaattgatcgctccaggcggcccggataccgccgagtttaaaaaggcgatcgcggttttagaaatctgcggcatcgcggcaaaagagaagaaagggaagaaaggcgacgacgaggaatctacgcccgacgaaaaaagcgccggagtggtttatgtgagcaaacaagcggtcaacgagatgtctgagcttctgaaaaccaagtcggccaagaccgataacgagctcgccaaggaatttgcccagataatcgctcgccatacgagcaccccggacatggcactctgtggcagaatgctggaaccaaagaaagcgaaaaagcaggcgtcggaggaaggcggcgcgaagcccaagggcggcgacgtctggaagggacttgacacaaccgttgaggcggcgctgcaagttgcccacgcaatttctactcacgcggctcgcccggagattgactactatgtggccgctgatgatgtgcccggtgaagacgcgggagcaggctttgtagatgaagcaatgttcggctccgcctgcttctacaagtatttttcgattgacttcgaaaccctcatcaacaatctgaagggcaacaaggaactggccgctcatactgtcggcgcgttcatccggggagcggcgttggtgaatcccacgggcaaacagaatagtttcgccgcgcacaacccacccgacggaatgctggtcgaaatcagaaactcacctctcagctatgccaacgcttttgcccgaccagccatagcccagggcgaacgagacatcatatcccagagcgtcgcgcaactcggccagtacgttcacgatatcgacaccggatacggcaaaccaacgaggcggttctggttctcgcccaatcttcgctatcccttgaccgttacggagggggataaggaaaacgccttggccgaaaacaatatcaagtcgctcgaggaattgatcgaggcagtcatcaagggaatcggccatgattgggaggaggttcagaaagtggttgtgaactcggaggtggcctgatgagcgcaaataccctctttctccgcctcgaagccccccttcaggcatggggcgatcagcagtcgaagtttgtgattcggcggacggctgacgccccaaccaggtctggcgtcatggggatgctttgcgcggcgttgggcgtctcccgctcggcggcgccggaaggctggcttccaaggcttagccgcctgcgcatgggcgtccgcatcgatgtgccgggggtccgctggtgggattatcacacggtgggcgccgggatgccgatgcgcactgccgaaggtggaaccaagccaggggccgtgctgacccgccgcgaatacctttgcgacgcctcgtttctcgtcgcttttcagggagagtcggacctcattgccgaactggagtccgcaattaaagcgcccaaatggacgctctatctgggcagaaagtgctgccctccctcgcgccctttactggagcatccggggggtgaatttcctgacttgctttctgccctcaaatcggttccctggcgcaagaggttggagggagacgatcagcccgaagcgctggattgcctgcttgattggaagtcaaccgaagagcagccggaggctcccgatgatgcgctcgtctggtacgacgtgcccgtgaccttcgacccgccctcccaccagccccgatttgtcattcgcaagcaactgcgcgttggactcgacggcgaagtaacgcttgcaactcagccagcacagagctacacgccagcgcctccccgcccaagagcggattacactaataccgagtacagaatccgacgggaaaagcggctcgacgacgactatcacttgtgcgtcttttgcaagtcgcccgccaccaccgtccagcacatcacctatcgccgcgcgggtggcaatgaactcgcggatgacttgcgctctctctgtcgcctctgccacgatgccgtcaccatgatcgaatatggcctaggcatgggcatggaccgcatcaacccggaagagccgcgttggcgcgacttgattatccaaaagcggaacgaaatcatcacgttccgctccctggagactcgccgcaggcgcctggtcgccgaggaggtggagtagccatgtaccggtcctgccttttgattgacgtcgggagtaaccccgaccggcctcggcccggaaggctgtggcttcggaatctctatcacgtccaccagcgcctttggatggcgtttccctccgagaaccgaaaatcccatgatcgcgattttcttaagcctttcaaacccgcggactttggcgagaagccggttcaggtagaacgcggggcgggttccggctttctttttcgcattgagccgcagcccgccgggcgggtcgtgattctcgtccagtccaactccgccgtgaagccggattgggactacgccttccacaacgcccgttttcttttgaatcctctggctgctcccccgcaggtagaggaattcgaccctcgcttcgccaagggccaacagcttcggttccgcatccgcatcaatctaagcaagaagttaaaaacgagcgcaaagggcgtcgatcttaccaaggcgggcgagggaacagatcgccaaggccgcccgaaggcccaaagcaaacgcgtagcgctgacctgggataaggaccagaaccccgacgatgtgatacgaaaatggttcgccgccaagggcgaccaaggtggcttccaggtggaaactttccgcgtcttgcaaatcgggtggggcgcaggaaaccgatcggacccgaggccggcgggcgatcgcatgaaatttcgctcagccttattggaggggacgcttacggttaaagacgcggatagcttcagagaaaccatcgtgggcggcatcgggcacggcaaagccttcggcttcgggcttctttccgtagcccctcgcacaccactcccggcagaggcaacgtgagagttctgacgccaaagcgagccccgaagcagcgcgccgagatcgcccgccgcatgtttgtgcagcgctttcccggtgtggatgtgcaggcgtattccgtcaccgaattgcggggaatggagggcttgcgcgtgcccgccaaatacgcggaactcggcgagcagtacggagtcacctggaaggggcgcaactacgacaaatccaactggaatctggcggacaacatcaatcgcgccctctcgacggccaatgccagcctttacgccttgtgcgccgccgtactctgctcgctgggttacctgccgtctctgggattcgttcacgacgccggcacgttgccctttatctatgatgtggcggacctgtacaaggaaataaccagtttcccggcagcctttcagtccatgcgccaggaccccaatgacaaaggcgacctggtccgcacgctgctgaaggaacgcgtcgag

SEQ ID NO: 603 - DNA, 12376 bp, Artificial Sequence
  Synthetic Oligonucleotide
aggtggacaactggccgtcggaaaggccgtcaagagccgtgcgggcggatcggatagacctgttgacagaccgagcgctggtcggccgcccagcctggtttcttactgtctgaatcgcagtattcgaaatcgaacaccctggtcggtggtcaagccctctgttcggatggacgcctgcaagcggtaagggcccggcgtcacaaaagcgagctgggatgcggccgcgaagtcgagattctgcgtccccgcgaagctgatgcgaagcgagcacttccctgccccggcggtcgcgcagtcacgggcgacttcaacgccctgagcgtgtccgaagttccaatcgaacggtgatggcgtgggctcgaattggaagtttccattaaagaggtcgttcgacttccggtagtcgcccgcgcgcgcgcccaggtgctgcgcccatgcggacaccgccgcttcgggatggccttgctgcacgagaaaaccggcatactcccctgccgtactatcatcgttatacccatgtcgagcgatccaatcccaagtgcgttgcgcatcatccaggcgcccggcttgcatcaggtattggagccaggattgtaccgcccgccgatcttccggaaggccgtacagcaaaacatcatcagcgtgatctaccaggcgcgtgtactcgctgaagatgatcgaatcgtaatccggagtgagcgtcaggatacgcgccgtggcggggagggcttggtggttctcgccgacttggaaatagaagttcgccgcgcgcaggagaaggggcgcagaccgcggggcgagggccagcacctggccgaagcactcgcgcgcctctcccttctgtccggcatcgagaaacgcctccccgaggtcggcccatcgatagggattttgcgggtctcgctggagaacctcgcggaataggacaatggccttttggacgtcctcttcgctcatccccgtcaattgctaccgcgctcgcaactccaagggcgcgttggtgcaaacaaagatgcggcacagaacgcggtcaacctccgcgttgttctgccccaacgtctccgagagaatgcccgcctcgcagtaggcagccaaaaccaccccgaggatgaacgtcagcactttcaatccagcacactctcccgacgacggaccttttcgaaagcccgctgatgtaacggcgaatttacctagccatatggcggcgcaaagccgcctctacatcaatctgacccactgccgaacattacagccacatgccgggacggccctaatcgcaatgcggatgatccggtgggcaatgaaggctacgcgggggtggcggcggcggaggtggaggtgggaagggtggccgcggtggcgagggcggtcggggtgggtcgtgcggccgtggaggatttccgcctctggcaagtggggtggcgggctgagccgaagctggccccgcggcggagttccgcgccaccggatgaactagcgggaccaagctcactcgcgagccttccgccggcttcaagtcgaccgacccagacagaacgcgcagcgccactgaagagctgcccgcctccagcttgacccgcgaattcggatcgagcgtggcgcggctccggtcggccaaatagatcatggccgacgaacccgcggtggcgatctcgtcgcccgccaccaccggcaaggatgatacggcggttgccagcgcggccttgccgttgagcgtcagcgcccccgaactggtgaccctgcccaccggatcggcggccatcaggactacggtcgtcatcatgacgataagcagacgcaaatatttcacggctacctcctgtgattgctgattggcgatgggcgatgggaaaacgggtatggcgacgtcctctgtcgtcaatcgccagtcggaaataggccattcccgagccccgcggacattcccgcaacccacgccaggagcatggcattggccggaatatagaagttgaaatccgccaggctatgcaccagaatcgcggccagcgcacccgcgcacgccacggcaagataccgcgcccccgggtctcgcgatccgacggctttccgcaccgccgtcctcaccacgaagaacgccagcgcggccacgatggcgaaacccaccagccccagttccgccagcaactgaaggtaatcgttatgcgcgaaatcgtccgtgacgagcggcgaggaaaccttgaatcttaagaacgctgtctcatatccgcccagcccgcacccgaagacggggtaagctctgatcaacggaatcgtctcggcccaaagctgcgcgcggccttctccggtgggatcggtcgaaacgagctggacgaatcgcgcgatcagcttgtccggcggcagaaacacgaagcccgccagcaccagtgcggcgaccaggccgaccgtggctgtttgccgtttccgggagcgcgcggcccagctcagttgccgggttccgagtgccagcgcccccatcacgaacagggaagcaagtgtcgcgaagaaccccatccgtgaaaaggaaaagacgattgcggcaaacatcaatcccgccagcgcccacacgccgcaagcccccagcgccggagtcaccgccgagtgccctcgcgagcgcgtgcgccgccaaagcgccacggggtacaccactgcgaacggcagcgccatctccaggaagcctgcgtagtggttatggttgacgtacgtcccccaccggagttggtccacgcctcggccgaagttctgcgagaggcccagaccggcttccagagcgccgatggcgacgatgggccacatcgccagccagcggttatccgcaaatcgccaagtcagctcgcgcaccagcaggaagatgatcacgtacccgcagacgagcaggaaaaattgaaaagtcgcgatgggtgaaacgctcaggggtacaaagttggctgggcgtccgatgagtgctgctggaggcatcgccgcggtgcgggcgggtgacagcacgcgcaccaggtacaccggcagcggcaccacctgcatcaggatgtagacgggcaagagagccagggtccagcgcaccacgcggccgggtagtggcgcccactggtggcgggggcgggcaaggctcagcaccaccgccagcaggcacagcaccaggaggtagtggtactggtcgattcggagcgctccgccccactcgaagacagcgtaggcgagcaccaatcccattgtggataaagcgccgatgtccgctattcttagagactctcgcgttggcttttcggggtgggactggaggcgcatggactggattgggagcatcaccgtaccgctaataggctagaaagtaaacctgggtcatgggtgacaggtgacaggtgacaggtgacaggaaaggaggctgcgccctggcgcagtaggtgtcagcagacaggttagaggtcacaggtgacagtgaaggagcctcaagcaagctcataggggacaggggacagggaacgagtgtgcgccttgcggcgccataggtggcacgcgacccgggagggaagctgagccctgtgacctataacctattccctgtcctcctgttccctgttttccctgctgtaccctgtaacctataacctattccctgcctacttgttccctgtcttcctgtaccctgtgccctgtaacctattccctatttccccctcattgcggaacgctatggccccctcggagggtatggttcgcgacgctcatgccgaggagggcggacagcagccaccgggtgagcagaattcccaagaagtagatgatgcgatgttcgaaattgaaaccccgcaggaggacggttccccaagccgcgcccaaggtgctgcacgccgctaccaagagccacgatccgatccggaacttgttggacttccaacccggcacgtaggcgttcaggtgaaaatcctcggacttattgtctccgtcatctgcgatcggcaggagttcgatcctttcccaaaaataaatgcaccattggcgatacgcgccaacgagcacggcgatgagcaggcacattgcgcagcccacccaggaattattaggtaaggcaagaatcatttcgatctcctgtccggcgagcaggttataggtgacagccagaggttacaggttacaggtcacaggtgtcaggtgtcaggtgacagaaaaagaggctgcgccctgtccccctgtctttccgttccctgccttcctccgtcccctgtaccttgtgacctgtcacctgtaccctgttctctcttctctaccctatgacctgttccctgtaacctgttccctgtctttctgttccctgtctttctgttccctgtctttctgttccctgtctttctgttccctgtcttcctgttccctgtccactgtccactgttccctgtaacctgtccgctgtcttctcatattcgtgcgctgctcgatagggaaactatgcagcaggacggtggccaaagccgcgccctgcgaggccaaaggtgacagggaaagaggagagaataggcaataggtgacaggttacaggtgacagggaaagaggctgcgccctgcggcgccaaaggtgagcctgttccctgacgcctgacacctgttttcccctgttccctgtccacggtcctctgccttcgggttccctgtcttcccctgtcccctgtgacctgtaacctgtcacctctcttcctgctgtaccctgtcccctgtaacctatcccctgtcctgaccgctcagagccctacgctacagccattttgtccagcccgctcatgacaccttaagtctgatgaccaagctactcacccgttggagagtcagcccttccctggcgcgctgtagtggcggtctctgactgtcggagggtgttgtggcatggccaacttggggtagcgccctaattctgtgttggtcccctccctcttgacaaactgcgatcgcacgtagcatctttccagcagcgaaaaacaaggtaaggaccccgctgctgtcgaacttggacggaggggcggcgaagcgatcgctaggtgcggccctgcttatctcaagtggcttcagtcttagcggttgacccgtaagggaggaagaccgaagtctaaatagtgaaaacgtgtttgaaaatggcacctgactcactcgggatgttgaccgcgattttgatatccgttggcctaatcgtaagcggagtgcatcttcgtcgtgtacctaaacttaaaatcgtgggagcgctgctggctgtacttggcatcttcggactcatggcagctctgggcttcatcagggtttattaacagcactcaccacaatcttcatctctgccagaacctcttggccgatcagcacgcgcgttgagtgcctatattggtaaaagccatgaccagcgacgtatgccccaaatgcgagagtatgaatctcgccgactcccatcggcgaggttggatcgagcggtggattcttagcttttttggtatcgtgcccattcgctgcatggactgtaatacccgtttttactccttccgccgtcccctctactgactccttttttcttcggcactcggttcagctcgccaagttgcacagatttcctttcggccgtcaatgtaacttctcagccaatacccctggactgacttgacaaaaccccattggatgggttaatataggtttccggtagtctagccaaaaggggaggggctgccgatgcaaacaaatgcctccgttaattcgcgccggtgtgagcgcaaaatagcaacaattccaatcaaacttgtggtgaaggccgacctcttcaatgcagacgattcagctctcgcggtcgacatttctccgcgcggcgcctgtgttcgaaccaagctggagttagatccaggagagtgggtgggtgtcgttcccaagggaggatacccgtatgccatccccactcgcacgatttgggtgcgggaggatgagttcagccattggaccttcgcggggcttgagttcttaaacaccccggaaggttagaaaatgcactccatggcacacccttccagtgtttgattggaattccaaaaccccaccaacacacgtttaggacgctacctgcctccccgaaggggaggaatatcattagccgtaggtgaaacctacggaccgagacggcgacgaaaggaacctaattttccgcgtttcctttccgtgggtttcacctaaggctatgggcgacaggcagagggcacaggttacaggtgacaggccaagaggcagcgccgtccggcgcccaaggtcagcctgctgcctgacacctgatacctgacacctgttttcccctgttccctaacccctgttttcccttctttcccctgtaacctgtaacctgtcccctgccttgcggtggcagagccgctggggctcttgcgtgaggcggaagaaccactcgaggccgttctcctgcatccatgcttgcttggcagtcccggcgatgaagtcgaaggccgctcccaccccggccatcgccggcacgcctagccgtgagcggtgctcgaacatcgagcgttcctgtttgggagtgctcaagcctacccagacgacatccggcgccgccgcctggattcgtagctccacttccaccttttcttcctgggtcagcggccgaaagggtggcgagcaggtggctcctggttcgcgtctgctaagcagaggcgataaccgttcttgtggtcttcgggccttgcctttctcgcgtgccgggtgtataccttcatcgcgttaatcatttggtagacagccacccgacaatcgggccgccaggagcgcaacgggccgcccaccagcctcttgccaaggcaaggaggaagttatgagctataacctgctcgaagaaaactggattccagttctatggaaagacgggaatagcaatcgcgtgggcattactgaagctcttaggcaagcaggccggattcgtcaagtcgccgccagcaatcccatggaccgtttggccatcctgcgtttcctcctcgcgcttctctattggtgcaaggggaatccgccggacgatgaagactcggtctcttcgtttccctcggattggttcaggaaacttgatgacaataaggactgtttcaaccttctgggagatggcaagcggttctatcagtgcaatgccaagtctggaacagagggaaagctttccgccaactacctgatgcaagaggtgcccactggcacaaactcttggcacttccggcattcgacagataaagaggacggattatgtccggcgtgctgcgccgcggggttattgcgtttaccgctatttgctacgtcaggggggcgcggcaagccgccaggggtcaaccagaaaccgccggtttatgtcgtaccggtcggcggttcacttgcggaaaccctgcgtctctcctggcgcaaggtatcggacacggacttcggaacgccggcttgggaagagcccgatcttagccttcctcgacatggcaatgttccgctgcttgtgggattgacgtcgctgccccggcgcgtgtggctggacaatccgcaggaacccgacgccaactgcatctcgtgcggacgtaaagcgcctctaatacgccaatgtgtgtttgctggtgtcggcagcgcaaaaacggatgaaaatggcctgggccgcgtatggagcgacccgcacaccatcactgacggcgaggatgtcattaaacccagcaatgcccttggtgcaaccgacgcggcggctgggcaatgggcaaggatagcggcgggaattcttcgggagaaaaagcccaatggcaaaagaggcttgtgggtcgtcagctttgcgacggtgcagaacgacaagtacctggaagcgatggaatatgagattcctctcccgagcacgctagatgatcggcaggtcgcggagagtgtcgaaacgattgacatgtggcaaaaggagggccggaagcttgccggcaaagccaaaccgagagggacttcccgaagacatcttgaaattcctcccatggtcgccgcagttcgcccgcacgtagaagcaaaggtctccgggaaggtcggcgagttgatttcgcgaggccgcgatgcgtgggagcaggcagcccgggaatataggccgatgatggccgccgtcgccaaatcgctttccccgggctataccaccgctgcgctccggcggcgacgccagattgtcaatgtaaggccgaacatgcagccaggcaccccaccggccgggagggccggacggaagaagggaggcgacaaatgactccaacggagcaatacgtcgacgtcctgacacatctgaagtccggtgatctcggactcctgcgcgagcatgccgggcaagggctcgaccaatcggtcgatgcctttgacctcttcgcggggctctggtggccgttgcgggagaggaatcagcgcgcgccccgccgtgcggtggcgtggcttatcgcaaaactctatgccttccggccgatcgagcattcacccgggcagacgcttgcgtggcagcttgggcggtaccggaacgacaatgaccccgagaaagaccctgtcgcggaaaggttcgacaggatgctgaccttgccggttgatatactcgagccggccttgcaatggtcgcttaacctcatcgcctccaaaaacccgaagctcgactgggtgacgctgacaaacgatctttccatttgggaacgcgaaaccacccggctcaagtgggccgaggaattcttgaagtcttcgaaggaggaccgtcatgttaattgaaattcatgccattcaaaatcacagcccggccaacctgaaccgggacgacttgggcgctcccaagacctgctacttcggcggagtactgcgctcccgtatttccagtcagtgcctcaagcggagcatccgcatgagtgacgaattcaagcagttgctcggcggcgttcgcacacggcgactggcgcaattgatcgctccaggcggcccggataccgccgagtttaaaaaggcgatcgcggttttagaaatctgcggcatcgcggcaaaagagaagaaagggaagaaaggcgacgacgaggaatctacgcccgacgaaaaaagcgccggagtggtttatgtgagcaaacaagcggtcaacgagatgtctgagcttctgaaaaccaagtcggccaagaccgataacgagctcgccaaggaatttgcccagataatcgctcgccatacgagcaccccggacatggcactctgtggcagaatgctggaaccaaagaaagcgaaaaagcaggcgtcggaggaaggcggcgcgaagcccaagggcggcgacgtctggaagggacttgacacaaccgttgaggcggcgctgcaagttgcccacgcaatttctactcacgcggctcgcccggagattgactactatgtggccgctgatgatgtgcccggtgaagacgcgggagcaggctttgtagatgaagcaatgttcggctccgcctgcttctacaagtatttttcgattgacttcgaaaccctcatcaacaatctgaagggcaacaaggaactggccgctcatactgtcggcgcgttcatccggggagcggcgttggtgaatcccacgggcaaacagaatagtttcgccgcgcacaacccacccgacggaatgctggtcgaaatcagaaactcacctctcagctatgccaacgcttttgcccgaccagccatagcccagggcgaacgagacatcatatcccagagcgtcgcgcaactcggccagtacgttcacgatatcgacaccggatacggcaaaccaacgaggcggttctggttctcgcccaatcttcgctatcccttgaccgttacggagggggataaggaaaacgccttggccgaaaacaatatcaagtcgctcgaggaattgatcgaggcagtcatcaagggaatcggccatgattgggaggaggttcagaaagtggttgtgaactcggaggtggcctgatgagcgcaaataccctctttctccgcctcgaagccccccttcaggcatggggcgatcagcagtcgaagtttgtgattcggcggacggctgacgccccaaccaggtctggcgtcatggggatgctttgcgcggcgttgggcgtctcccgctcggcggcgccggaaggctggcttccaaggcttagccgcctgcgcatgggcgtccgcatcgatgtgccgggggtccgctggtgggattatcacacggtgggcgccgggatgccgatgcgcactgccgaaggtggaaccaagccaggggccgtgctgacccgccgcgaatacctttgcgacgcctcgtttctcgtcgcttttcagggagagtcggacctcattgccgaactggagtccgcaattaaagcgcccaaatggacgctctatctgggcagaaagtgctgccctccctcgcgccctttactggagcatccggggggtgaatttcctgacttgctttctgccctcaaatcggttccctggcgcaagaggttggagggagacgatcagcccgaagcgctggattgcctgcttgattggaagtcaaccgaagagcagccggaggctcccgatgatgcgctcgtctggtacgacgtgcccgtgaccttcgacccgccctcccaccagccccgatttgtcattcgcaagcaactgcgcgttggactcgacggcgaagtaacgcttgcaactcagccagcacagagctacacgccagcgcctccccgcccaagagcggattacactaataccgagtacagaatccgacgggaaaagcggctcgacgacgactatcacttgtgcgtcttttgcaagtcgcccgccaccaccgtccagcacatcacctatcgccgcgcgggtggcaatgaactcgcggatgacttgcgctctctctgtcgcctctgccacgatgccgtcaccatgatcgaatatggcctaggcatgggcatggaccgcatcaacccggaagagccgcgttggcgcgacttgattatccaaaagcggaacgaaatcatcacgttccgctccctggagactcgccgcaggcgcctggtcgccgaggaggtggagtagccatgtaccggtcctgccttttgattgacgtcgggagtaaccccgaccggcctcggcccggaaggctgtggcttcggaatctctatcacgtccaccagcgcctttggatggcgtttccctccgagaaccgaaaatcccatgatcgcgattttcttaagcctttcaaacccgcggactttggcgagaagccggttcaggtagaacgcggggcgggttccggctttctttttcgcattgagccgcagcccgccgggcgggtcgtgattctcgtccagtccaactccgccgtgaagccggattgggactacgccttccacaacgcccgttttcttttgaatcctctggctgctcccccgcaggtagaggaattcgaccctcgcttcgccaagggccaacagcttcggttccgcatccgcatcaatctaagcaagaagttaaaaacgagcgcaaagggcgtcgatcttaccaaggcgggcgagggaacagatcgccaaggccgcccgaaggcccaaagcaaacgcgtagcgctgacctgggataaggaccagaaccccgacgatgtgatacgaaaatggttcgccgccaagggcgaccaaggtggcttccaggtggaaactttccgcgtcttgcaaatcgggtggggcgcaggaaaccgatcggacccgaggccggcgggcgatcgcatgaaatttcgctcagccttattggaggggacgcttacggttaaagacgcggatagcttcagagaaaccatcgtgggcggcatcgggcacggcaaagccttcggcttcgggcttctttccgtagcccctcgcacaccactcccggcagaggcaacgtgagagttctgacgccaaagcgagccccgaagcagcgcgccgagatcgcccgccgcatgtttgtgcagcgctttcccggtgtggatgtgcaggcgtattccgtcaccgaattgcggggaatggagggcttgcgcgtgcccgccaaatacgcggaactcggcgagcagtacggagtcacctggaaggggcgcaactacgacaaatccaactggaatctggcggacaacatcaatcgcgccctctcgacggccaatgccagcctttacgccttgtgcgccgccgtactctgctcgctgggttacctgccgtctctgggattcgttcacgacgccggcacgttgccctttatctatgatgtggcggacctgtacaaggaaataaccagtttcccggcagcctttcagtccatgcgccaggaccccaatgacaaaggcgacctggtccgcacgctgctgaaggaacgcgtcgag

SEQ ID NO: 604 - DNA, 12376 bp, Artificial Sequence
  Synthetic Oligonucleotide
aggtggacaactggccgtcggaaaggccgtcaagagccgtgcgggcggatcggatagacctgttgacagaccgagcgctggtcggccgcccagcctggtttcttactgtctgaatcgcagtattcgaaatcgaacaccctggtcggtggtcaagccctctgttcggatggacgcctgcaagcggtaagggcccggcgtcacaaaagcgagctgggatgcggccgcgaagtcgagattctgcgtccccgcgaagctgatgcgaagcgagcacttccctgccccggcggtcgcgcagtcacgggcgacttcaacgccctgagcgtgtccgaagttccaatcgaacggtgatggcgtgggctcgaattggaagtttccattaaagaggtcgttcgacttccggtagtcgcccgcgcgcgcgcccaggtgctgcgcccatgcggacaccgccgcttcgggatggccttgctgcacgagaaaaccggcatactcccctgccgtactatcatcgttatacccatgtcgagcgatccaatcccaagtgcgttgcgcatcatccaggcgcccggcttgcatcaggtattggagccaggattgtaccgcccgccgatcttccggaaggccgtacagcaaaacatcatcagcgtgatctaccaggcgcgtgtactcgctgaagatgatcgaatcgtaatccggagtgagcgtcaggatacgcgccgtggcggggagggcttggtggttctcgccgacttggaaatagaagttcgccgcgcgcaggagaaggggcgcagaccgcggggcgagggccagcacctggccgaagcactcgcgcgcctctcccttctgtccggcatcgagaaacgcctccccgaggtcggcccatcgatagggattttgcgggtctcgctggagaacctcgcggaataggacaatggccttttggacgtcctcttcgctcatccccgtcaattgctaccgcgctcgcaactccaagggcgcgttggtgcaaacaaagatgcggcacagaacgcggtcaacctccgcgttgttctgccccaacgtctccgagagaatgcccgcctcgcagtaggcagccaaaaccaccccgaggatgaacgtcagcactttcaatccagcacactctcccgacgacggaccttttcgaaagcccgctgatgtaacggcgaatttacctagccatatggcggcgcaaagccgcctctacatcaatctgacccactgccgaacattacagccacatgccgggacggccctaatcgcaatgcggatgatccggtgggcaatgaaggctacgcgggggtggcggcggcggaggtggaggtgggaagggtggccgcggtggcgagggcggtcggggtgggtcgtgcggccgtggaggatttccgcctctggcaagtggggtggcgggctgagccgaagctggccccgcggcggagttccgcgccaccggatgaactagcgggaccaagctcactcgcgagccttccgccggcttcaagtcgaccgacccagacagaacgcgcagcgccactgaagagctgcccgcctccagcttgacccgcgaattcggatcgagcgtggcgcggctccggtcggccaaatagatcatggccgacgaacccgcggtggcgatctcgtcgcccgccaccaccggcaaggatgatacggcggttgccagcgcggccttgccgttgagcgtcagcgcccccgaactggtgaccctgcccaccggatcggcggccatcaggactacggtcgtcatcatgacgataagcagacgcaaatatttcacggctacctcctgtgattgctgattggcgatgggcgatgggaaaacgggtatggcgacgtcctctgtcgtcaatcgccagtcggaaataggccattcccgagccccgcggacattcccgcaacccacgccaggagcatggcattggccggaatatagaagttgaaatccgccaggctatgcaccagaatcgcggccagcgcacccgcgcacgccacggcaagataccgcgcccccgggtctcgcgatccgacggctttccgcaccgccgtcctcaccacggagaacgccagcgcggccacgatggcgaaacccaccagccccagttccgccagcaactgaaggtaatcgttatgcgcgaaatcgtccgtgacgagcggcgaggaaaccttgaatcttaagaacgctgtctcatatccgcccagcccgcacccgaagacggggtaagctctgatcaacggaatcgtctcggcccaaagctgcgcgcggccttctccggtgggatcggtcgaaacgagctggacgaatcgcgcgatcagcttgtccggcggcagaaacacgaagccggccagcaccagtgcggcgaccaggccgaccgtggctgtttgccgtttccgggagcgcgcggcccagctcagttgccgggttccgagtgccagcgcccccatcacgaacagggaagcaagtgtcgcgaagaaccccatccgtgaaaaggaaaagacgattgcggcaaacatcaatcccgccagcgcccacacgccgcaagcccccagcgccggagtcaccgccgagtgccctcgcgagcgcgtgcgccgccaaagcgccacggggtacaccactgcgaacggcagcgccatctccaggaagcctgcgtagtggttatggttgacgtacgtcccccaccggagttggtccacgcctcggccgaagttctgcgagaggcccagaccggcttccagagcgccgatggcgacgatgggccacatcgccagccagcggttatccgcaaatcgccaagtcagctcgcgcaccagcaggaagatgatcacgtacccgcagacgagcaggaaaaattgaaaagtcgcgatgggtgaaacgctcaggggtacaaagttggctgggcgtccgatgagtgctgctggaggcatcgccgcggtgcgggcgggtgacagcacgcgcaccaggtacaccggcagcggcaccacctgcatcaggatgtagacgggcaagagagccagggtccagcgcaccacgcggccgggtagtggcgcccactggtggcgggggcgggcaaggctcagcaccaccgccagcaggcacagcaccaggaggtagtggtactggtcgattcggagcgctccgccccactcgaagacagcgtaggcgagcaccaatcccattgtggataaagcgccgatgtccgctattcttagagactctcgcgttggcttttcggggtgggactggaggcgcatggactggattgggagcatcaccgtaccgctaataggctagaaagtaaacctgggtcatgggtgacaggtgacaggtgacaggtgacaggaaaggaggctgcgccctggcgcagtaggtgtcagcagacaggttagaggtcacaggtgacagtgaaggagcctcaagcaagctcataggggacaggggacagggaacgagtgtgcgccttgcggcgccataggtggcacgcgacccgggagggaagctgagccctgtgacctataacctattccctgtcctcctgttccctgttttccctgctgtaccctgtaacctataacctattccctgcctacttgttccctgtcttcctgtaccctgtgccctgtaacctattccctatttccccctcattgcggaacgctatggccccctcggagggtatggttcgcgacgctcatgccgaggagggcggacagcagccaccgggtgagcagaattcccaagaagtagatgatgcgatgttcgaaattgaaaccccgcaggaggacggttccccaagccgcgcccaaggtgctgcacgccgctaccaagagccacgatccgatccggaacttgttggacttccaacccggcacgtaggcgttcaggtgaaaatcctcggacttattgtctccgtcatctgcgatcggcaggagttcgatcctttcccaaaaataaatgcaccattggcgatacgcgccaacgagcacggcgatgagcaggcacattgcgcagcccacccaggaattattaggtaaggcaagaatcatttcgatctcctgtccggcgagcaggttataggtgacagccagaggttacaggttacaggtcacaggtgtcaggtgtcaggtgacagaaaaagaggctgcgccctgtccccctgtctttccgttccctgccttcctccgtcccctgtaccttgtgacctgtcacctgtaccctgttctctcttctctaccctatgacctgttccctgtaacctgttccctgtctttctgttccctgtctttctgttccctgtctttctgttccctgtctttctgttccctgtcttcctgttccctgtccactgtccactgttccctgtaacctgtccgctgtcttctcatattcgtgcgctgctcgatagggaaactatgcagcaggacggtggccaaagccgcgccctgcgaggccaaaggtgacagggaaagaggagagaataggcaataggtgacaggttacaggtgacagggaaagaggctgcgccctgcggcgccaaaggtgagcctgttccctgacgcctgacacctgttttcccctgttccctgtccacggtcctctgccttcgggttccctgtcttcccctgtcccctgtgacctgtaacctgtcacctctcttcctgctgtaccctgtcccctgtaacctatcccctgtcctgaccgctcagagccctacgctacagccattttgtccagcccgctcatgacaccttaagtctgatgaccaagctactcacccgttggagagtcagcccttccctggcgcgctgtagtggcggtctctgactgtcggagggtgttgtggcatggccaacttggggtagcgccctaattctgtgttggtcccctccctcttgacaaactgcgatcgcacgtagcatctttccagcagcgaaaaacaaggtaaggaccccgctgctgtcgaacttggacggaggggcggcgaagcgatcgctaggtgcggccctgcttatctcaagtggcttcagtcttagcggttgacccgtaagggaggaagaccgaagtctaaatagtgaaaacgtgtttgaaaatggcacctgactcactcgggatgttgaccgcgattttgatatccgttggcctaatcgtaagcggagtgcatcttcgtcgtgtacctaaacttaaaatcgtgggagcgctgctggctgtacttggcatcttcggactcatggcagctctgggcttcatcagggtttattaacagcactcaccacaatcttcatctctgccagaacctcttggccgatcagcacgcgcgttgagtgcctatattggtaaaagccatgaccagcgacgtatgccccaaatgcgagagtatgaatctcgccgactcccatcggcgaggttggatcgagcggtggattcttagcttttttggtatcgtgcccattcgctgcatggactgtaatacccgtttttactccttccgccgtcccctctactgactccttttttcttcggcactcggttcagctcgccaagttgcacagatttcctttcggccgtcaatgtaacttctcagccaatacccctggactgacttgacaaaaccccattggatgggttaatataggtttccggtagtctagccaaaaggggaggggctgccgatgcaaacaaatgcctccgttaattcgcgccggtgtgagcgcaaaatagcaacaattccaatcaaacttgtggtgaaggccgacctcttcaatgcagacgattcagctctcgcggtcgacatttctccgcgcggcgcctgtgttcgaaccaagctggagttagatccaggagagtgggtgggtgtcgttcccaagggaggatacccgtatgccatccccactcgcacgatttgggtgcgggaggatgagttcagccattggaccttcgcggggcttgagttcttaaacaccccggaaggttagaaaatgcactccatggcacacccttccagtgtttgattggaattccaaaaccccaccaacacacgtttaggacgctacctgcctccccgaaggggaggaatatcattagccgtaggtgaaacctacggaccgagacggcgacgaaaggaacctaattttccgcgtttcctttccgtgggtttcacctaaggctatgggcgacaggcagagggcacaggttacaggtgacaggccaagaggcagcgccgtccggcgcccaaggtcagcctgctgcctgacacctgatacctgacacctgttttcccctgttccctaacccctgttttcccttctttcccctgtaacctgtaacctgtcccctgccttgcggtggcagagccgctggggctcttgcgtgaggcggaagaaccactcgaggccgttctcctgcatccatgcttgcttggcagtcccggcgatgaagtcgaaggccgctcccaccccggccatcgccggcacgcctagccgtgagcggtgctcgaacatcgagcgttcctgtttgggagtgctcaagcctacccagacgacatccggcgccgccgcctggattcgtagctccacttccaccttttcttcctgggtcagcggccgaaagggtggcgagcaggtggctcctggttcgcgtctgctaagcagaggcgataaccgttcttgtggtcttcgggccttgcctttctcgcgtgccgggtgtataccttcatcgcgttaatcatttggtagacagccacccgacaatcgggccgccaggagcgcaacgggccgcccaccagcctcttgccaaggcaaggaggaagttatgagctataacctgctcgaagaaaactggattccagttctatggaaagacgggaatagcaatcgcgtgggcattactgaagctcttaggcaagcaggccggattcgtcaagtcgccgccagcaatcccatggaccgtttggccatcctgcgtttcctcctcgcgcttctctattggtgcaaggggaatccgccggacgatgaagactcggtctcttcgtttccctcggattggttcaggaaacttgatgacaataaggactgtttcaaccttctgggagatggcaagcggttctatcagtgcaatgccaagtctggaacagagggaaagctttccgccaactacctgatgcaagaggtgcccactggcacaaactcttggcacttccggcattcgacagataaagaggacggattatgtccggcgtgctgcgccgcggggttattgcgtttaccgctatttgctacgtcaggggggcgcggcaagccgccaggggtcaaccagaaaccgccggtttatgtcgtaccggtcggcggttcacttgcggaaaccctgcgtctctcctggcgcaaggtatcggacacggacttcggaacgccggcttgggaagagcccgatcttagccttcctcgacatggcaatgttccgctgcttgtgggattgacgtcgctgccccggcgcgtgtggctggacaatccgcaggaacccgacgccaactgcatctcgtgcggacgtaaagcgcctctaatacgccaatgtgtgtttgctggtgtcggcagcgcaaaaacggatgaaaatggcctgggccgcgtatggagcgacccgcacaccatcactgacggcgaggatgtcattaaacccagcaatgcccttggtgcaaccgacgcggcggctgggcaatgggcaaggatagcggcgggaattcttcgggagaaaaagcccaatggcaaaagaggcttgtgggtcgtcagctttgcgacggtgcagaacgacaagtacctggaagcgatggaatatgagattcctctcccgagcacgctagatgatcggcaggtcgcggagagtgtcgaaacgattgacatgtggcaaaaggagggccggaagcttgccggcaaagccaaaccgagagggacttcccgaagacatcttgaaattcctcccatggtcgccgcagttcgcccgcacgtagaagcaaaggtctccgggaaggtcggcgagttgatttcgcgaggccgcgatgcgtgggagcaggcagcccgggaatataggccgatgatggccgccgtcgccaaatcgctttccccgggctataccaccgctgcgctccggcggcgacgccagattgtcaatgtaaggccgaacatgcagccaggcaccccaccggccgggagggccggacggaagaagggaggcgacaaatgactccaacggagcaatacgtcgacgtcctgacacatctgaagtccggtgatctcggactcctgcgcgagcatgccgggcaagggctcgaccaatcggtcgatgcctttgacctcttcgcggggctctggtggccgttgcgggagaggaatcagcgcgcgccccgccgtgcggtggcgtggcttatcgcaaaactctatgccttccggccgatcgagcattcacccgggcagacgcttgcgtggcagcttgggcggtaccggaacgacaatgaccccgagaaagaccctgtcgcggaaaggttcgacaggatgctgaccttgccggttgatatactcgagccggccttgcaatggtcgcttaacctcatcgcctccaaaaacccgaagctcgactgggtgacgctgacaaacgatctttccatttgggaacgcgaaaccacccggctcaagtgggccgaggaattcttgaagtcttcgaaggaggaccgtcatgttaattgaaattcatgccattcaaaatcacagcccggccaacctgaaccgggacgacttgggcgctcccaagacctgctacttcggcggagtactgcgctcccgtatttccagtcagtgcctcaagcggagcatccgcatgagtgacgaattcaagcagttgctcggcggcgttcgcacacggcgactggcgcaattgatcgctccaggcggcccggataccgccgagtttaaaaaggcgatcgcggttttagaaatctgcggcatcgcggcaaaagagaagaaagggaagaaaggcgacgacgaggaatctacgcccgacgaaaaaagcgccggagtggtttatgtgagcaaacaagcggtcaacgagatgtctgagcttctgaaaaccaagtcggccaagaccgataacgagctcgccaaggaatttgcccagataatcgctcgccatacgagcaccccggacatggcactctgtggcagaatgctggaaccaaagaaagcgaaaaagcaggcgtcggaggaaggcggcgcgaagcccaagggcggcgacgtctggaagggacttgacacaaccgttgaggcggcgctgcaagttgcccacgcaatttctactcacgcggctcgcccggagattgactactatgtggccgctgatgatgtgcccggtgaagacgcgggagcaggctttgtagatgaagcaatgttcggctccgcctgcttctacaagtatttttcgattgacttcgaaaccctcatcaacaatctgaagggcaacaaggaactggccgctcatactgtcggcgcgttcatccggggagcggcgttggtgaatcccacgggcaaacagaatagtttcgccgcgcacaacccacccgacggaatgctggtcgaaatcagaaactcacctctcagctatgccaacgcttttgcccgaccagccatagcccagggcgaacgagacatcatatcccagagcgtcgcgcaactcggccagtacgttcacgatatcgacaccggatacggcaaaccaacgaggcggttctggttctcgcccaatcttcgctatcccttgaccgttacggagggggataaggaaaacgccttggccgaaaacaatatcaagtcgctcgaggaattgatcgaggcagtcatcaagggaatcggccatgattgggaggaggttcagaaagtggttgtgaactcggaggtggcctgatgagcgcaaataccctctttctccgcctcgaagccccccttcaggcatggggcgatcagcagtcgaagtttgtgattcggcggacggctgacgccccaaccaggtctggcgtcatggggatgctttgcgcggcgttgggcgtctcccgctcggcggcgccggaaggctggcttccaaggcttagccgcctgcgcatgggcgtccgcatcgatgtgccgggggtccgctggtgggattatcacacggtgggcgccgggatgccgatgcgcactgccgaaggtggaaccaagccaggggccgtgctgacccgccgcgaatacctttgcgacgcctcgtttctcgtcgcttttcagggagagtcggacctcattgccgaactggagtccgcaattaaagcgcccaaatggacgctctatctgggcagaaagtgctgccctccctcgcgccctttactggagcatccggggggtgaatttcctgacttgctttctgccctcaaatcggttccctggcgcaagaggttggagggagacgatcagcccgaagcgctggattgcctgcttgattggaagtcaaccgaagagcagccggaggctcccgatgatgcgctcgtctggtacgacgtgcccgtgaccttcgacccgccctcccaccagccccgatttgtcattcgcaagcaactgcgcgttggactcgacggcgaagtaacgcttgcaactcagccagcacagagctacacgccagcgcctccccgcccaagagcggattacactaataccgagtacagaatccgacgggaaaagcggctcgacgacgactatcacttgtgcgtcttttgcaagtcgcccgccaccaccgtccagcacatcacctatcgccgcgcgggtggcaatgaactcgcggatgacttgcgctctctctgtcgcctctgccacgatgccgtcaccatgatcgaatatggcctaggcatgggcatggaccgcatcaacccggaagagccgcgttggcgcgacttgattatccaaaagcggaacgaaatcatcacgttccgctccctggagactcgccgcaggcgcctggtcgccgaggaggtggagtagccatgtaccggtcctgccttttgattgacgtcgggagtaaccccgaccggcctcggcccggaaggctgtggcttcggaatctctatcacgtccaccagcgcctttggatggcgtttccctccgagaaccgaaaatcccatgatcgcgattttcttaagcctttcaaacccgcggactttggcgagaagccggttcaggtagaacgcggggcgggttccggctttctttttcgcattgagccgcagcccgccgggcgggtcgtgattctcgtccagtccaactccgccgtgaagccggattgggactacgccttccacaacgcccgttttcttttgaatcctctggctgctcccccgcaggtagaggaattcgaccctcgcttcgccaagggccaacagcttcggttccgcatccgcatcaatctaagcaagaagttaaaaacgagcgcaaagggcgtcgatcttaccaaggcgggcgagggaacagatcgccaaggccgcccgaaggcccaaagcaaacgcgtagcgctgacctgggataaggaccagaaccccgacgatgtgatacgaaaatggttcgccgccaagggcgaccaaggtggcttccaggtggaaactttccgcgtcttgcaaatcgggtggggcgcaggaaaccgatcggacccgaggccggcgggcgatcgcatgaaatttcgctcagccttattggaggggacgcttacggttaaagacgcggatagcttcagagaaaccatcgtgggcggcatcgggcacggcaaagccttcggcttcgggcttctttccgtagcccctcgcacaccactcccggcagaggcaacgtgagagttctgacgccaaagcgagccccgaagcagcgcgccgagatcgcccgccgcatgtttgtgcagcgctttcccggtgtggatgtgcaggcgtattccgtcaccgaattgcggggaatggagggcttgcgcgtgcccgccaaatacgcggaactcggcgagcagtacggagtcacctggaaggggcgcaactacgacaaatccaactggaatctggcggacaacatcaatcgcgccctctcgacggccaatgccagcctttacgccttgtgcgccgccgtactctgctcgctgggttacctgccgtctctgggattcgttcacgacgccggcacgttgccctttatctatgatgtggcggacctgtacaaggaaataaccagtttcccggcagcctttcagtccatgcgccaggaccccaatgacaaaggcgacctggtccgcacgctgctgaaggaacgcgtcgag

SEQ ID NO: 605 - DNA, 12376 bp, Artificial Sequence; identical to SEQ ID NO: 602
  Synthetic Oligonucleotide

SEQ ID NO: 606 - DNA, 12376 bp, Artificial Sequence; identical to SEQ ID NO: 602
  Synthetic Oligonucleotide

SEQ ID NO: 607 - DNA, 12376 bp, Artificial Sequence
  Synthetic Oligonucleotide
aggtggacaactggccgtcggaaaggccgtcaagagccgtgcgggcggatcggatagacctgttgacagaccgagcgctggtcggccgcccagcctggtttcttactgtctgaatcgcagtattcgaaatcgaacaccctggtcggtggtcaagccctctgttcggatggacgcctgcaagcggtaagggcccggcgtcacaaaagcgagctgggatgcggccgcgaagtcgagattctgcgtccccgcgaagctgatgcgaagcgagcacttccctgccccggcggtcgcgcagtcacgggcgacttcaacgccctgagcgtgtccgaagttccaatcgaacggtgatggcgtgggctcgaattggaagtttccattaaagaggtcgttcgacttccggtagtcgcccgcgcgcgcgcccaggtgctgcgcccatgcggacaccgccgcttcgggatggccttgctgcacgagaaaaccggcatactcccctgccgtactatcatcgttatacccatgtcgagcgatccaatcccaagtgcgttgcgcatcatccaggcgcccggcttgcatcaggtattggagccaggattgtaccgcccgccgatcttccggaaggccgtacagcaaaacatcatcagcgtgatctaccaggcgcgtgtactcgctgaagatgatcgaatcgtaatccggagtgagcgtcaggatacgcgccgtggcggggagggcttggtggttctcgccgacttggaaatagaagttcgccgcgcgcaggagaaggggcgcagaccgcggggcgagggccagcacctggccgaagcactcgcgcgcctctcccttctgtccggcatcgagaaacgcctccccgaggtcggcccatcgatagggattttgcgggtctcgctggagaacctcgcggaataggacaatggccttttggacgtcctcttcgctcatccccgtcaattgctaccgcgctcgcaactccaagggcgcgttggtgcaaacaaagatgcggcacagaacgcggtcaacctccgcgttgttctgccccaacgtctccgagagaatgcccgcctcgcagtaggcagccaaaaccaccccgaggatgaacgtcagcactttcaatccagcacactctcccgacgacggaccttttcgaaagcccgctgatgtaacggcgaatttacctagccatatggcggcgcaaagccgcctctacatcaatctgacccactgccgaacattacagccacatgccgggacggccctaatcgcaatgcggatgatccggtgggcaatgaaggctacgcgggggtggcggcggcggaggtggaggtgggaagggtggccgcggtggcgagggcggtcggggtgggtcgtgcggccgtggaggatttccgcctctggcaagtggggtggcgggctgagccgaagctggccccgcggcggagttccgcgccaccggatgaactagcgggaccaagctcactcgcgagccttccgccggcttcaagtcgaccgacccagacagaacgcgcagcgccactgaagagctgcccgcctccagcttgacccgcgaattcggatcgagcgtggcgcggctccggtcggccaaatagatcatggccgacgaacccgcggtggcgatctcgtcgcccgcaaccaccggcaaggatgatacggcggttgccagcgcggccttgccgttgagcgtcagcgcccccgaactggtgaccctgcccaccggatcggcggccatcaggactacggtcgtcatcatgacgataagcagacgcaaatatttcacggctacctcctgtgattgctgattggcgatgggcgatgggaaaacgggtatggcgacgtcctctgtcgtcaatcgccagtcggaaataggccattcccgagccccgcggacattcccgcaacccacgccaggagcatggcattggccggaatatagaagttgaaatccgccaggctatgcaccagaatcgcggccagcgcacccgcgcacgccacggcaagataccgcgcccccgggtctcgcgatccgacggctttccgcaccgccgtcctcaccacgaagaacgccagcgcggccacgatggcgaaacccaccagccccagttccgccagcaactgaaggtaatcgttatgcgcgaaatcgtccgtgacgagcggcgaggaaaccttgaatcttaagaacgctgtctcatatccgcccagcccgcacccgaagacggggtaagctctgatcaacggaatcgtctcggcccaaagctgcgcgcggccttctccggtggggtcggtcgaaacgagctggacgaatcgcgcgatcagcttgtccggcggcagaaacacgaagcccgccagcaccagtgcggcgaccaggccgaccgtggctgtttgccgtttccgggagcgcgcggcccagctcagttgccgggttccgagtgccagcgcccccatcacgaacagggaagcaagtgtcgcgaagaaccccatccgtgaaaaggaaaagacgattgcggcaaacatcaatcccgccagcgcccacacgccgcaagcccccagcgccggagtcaccgccgagtgccctcgcgagcgcgtgcgccgccaaagcgccacggggtacaccactgcgaacggcagcgccatctccaggaagcctgcgtagtggttatggttgacgtacgtcccccaccggagttggtccacgcctcggccgaagttctgcgagaggcccagaccggcttccagagcgccgatggcgacgatgggccacatcgccagccagcggttatccgcaaatcgccaagtcagctcgcgcaccagcaggaagatgatcacgtacccgcagacgagcaggaaaaattgaaaagtcgcgatgggtgaaacgctcaggggtacaaagttggctgggcgtccgatgagtgctgctggaggcatcgccgcggtgcgggcgggtgacagcacgcgcaccaggtacaccggcagcggcaccacctgcatcaggatgtagacgggcaagagagccagggtccagcgcaccacgcggccgggtagtggcgcccactggtggcgggggcgggcaaggctcagcaccaccgccagcaggcacagcaccaggaggtagtggtactggtcgattcggagcgctccgccccactcgaagacagcgtaggcgagcaccaatcccattgtggataaagcgccgatgtccgctattcttagagactctcgcgttggcttttcggggtgggactggaggcgcatggactggattgggagcatcaccgtaccgctaataggctagaaagtaaacctgggtcatgggtgacaggtgacaggtgacaggtgacaggaaaggaggctgcgccctggcgcagtaggtgtcagcagacaggttagaggtcacaggtgacagtgaaggagcctcaagcaagctcataggggacaggggacagggaacgagtgtgcgccttgcggcgccataggtggcacgcgacccgggagggaagctgagccctgtgacctataacctattccctgtcctcctgttccctgttttccctgctgtaccctgtaacctataacctattccctgcctacttgttccctgtcttcctgtaccctgtgccctgtaacctattccctatttccccctcattgcggaacgctatggccccctcggagggtatggttcgcgacgctcatgccgaggagggcggacagcagccaccgggtgagcagaattcccaagaagtagatgatgcgatgttcgaaattgaaaccccgcaggaggacggttccccaagccgcgcccaaggtgctgcacgccgctaccaagagccacgatccgatccggaacttgttggacttccaacccggcacgtaggcgttcaggtgaaaatcctcggacttattgtctccgtcatctgcgatcggcaggagttcgatcctttcccaaaaataaatgcaccattggcgatacgcgccaacgagcacggcgatgagcaggcacattgcgcagcccacccaggaattattaggtaaggcaagaatcatttcgatctcctgtccggcgagcaggttataggtgacagccagaggttacaggttacaggtcacaggtgtcaggtgtcaggtgacagaaaaagaggctgcgccctgtccccctgtctttccgttccctgccttcctccgtcccctgtaccttgtgacctgtcacctgtaccctgttctctcttctctaccctatgacctgttccctgtaacctgttccctgtctttctgttccctgtctttctgttccctgtctttctgttccctgtctttctgttccctgtcttcctgttccctgtccactgtccactgttccctgtaacctgtccgctgtcttctcatattcgtgcgctgctcgatagggaaactatgcagcaggacggtggccaaagccgcgccctgcgaggccaaaggtgacagggaaagaggagagaataggcaataggtgacaggttacaggtgacagggaaagaggctgcgccctgcggcgccaaaggtgagcctgttccctgacgcctgacacctgttttcccctgttccctgtccacggtcctctgccttcgggttccctgtcttcccctgtcccctgtgacctgtaacctgtcacctctcttcctgctgtaccctgtcccctgtaacctatcccctgtcctgaccgctcagagccctacgctacagccattttgtccagcccgctcatgacaccttaagtctgatgaccaagctactcacccgttggagagtcagcccttccctggcgcgctgtagtggcggtctctgactgtcggagggtgttgtggcatggccaacttggggtagcgccctaattctgtgttggtcccctccctcttgacaaactgcgatcgcacgtagcatctttccagcagcgaaaaacaaggtaaggaccccgctgctgtcgaacttggacggaggggcggcgaagcgatcgctaggtgcggccctgcttatctcaagtggcttcagtcttagcggttgacccgtaagggaggaagaccgaagtctaaatagtgaaaacgtgtttgaaaatggcacctgactcactcgggatgttgaccgcgattttgatatccgttggcctaatcgtaagcggagtgcatcttcgtcgtgtacctaaacttaaaatcgtgggagcgctgctggctgtacttggcatcttcggactcatggcagctctgggcttcatcagggtttattaacagcactcaccacaatcttcatctctgccagaacctcttggccgatcagcacgcgcgttgagtgcctatattggtaaaagccatgaccagcgacgtatgccccaaatgcgagagtatgaatctcgccgactcccatcggcgaggttggatcgagcggtggattcttagcttttttggtatcgtgcccattcgctgcatggactgtaatacccgtttttactccttccgccgtcccctctactgactccttttttcttcggcactcggttcagctcgccaagttgcacagatttcctttcggccgtcaatgtaacttctcagccaatacccctggactgacttgacaaaaccccattggatgggttaatataggtttccggtagtctagccaaaaggggaggggctgccgatgcaaacaaatgcctccgttaattcgcgccggtgtgagcgcaaaatagcaacaattccaatcaaacttgtggtgaaggccgacctcttcaatgcagacgattcagctctcgcggtcgacatttctccgcgcggcgcctgtgttcgaaccaagctggagttagatccaggagagtgggtgggtgtcgttcccaagggaggatacccgtatgccatccccactcgcacgatttgggtgcgggaggatgagttcagccattggaccttcgcggggcttgagttcttaaacaccccggaaggttagaaaatgcactccatggcacacccttccagtgtttgattggaattccaaaaccccaccaacacacgtttaggacgctacctgcctccccgaaggggaggaatatcattagccgtaggtgaaacctacggaccgagacggcgacgaaaggaacctaattttccgcgtttcctttccgtgggtttcacctaaggctatgggcgacaggcagagggcacaggttacaggtgacaggccaagaggcagcgccgtccggcgcccaaggtcagcctgctgcctgacacctgatacctgacacctgttttcccctgttccctaacccctgttttcccttctttcccctgtaacctgtaacctgtcccctgccttgcggtggcagagccgctggggctcttgcgtgaggcggaagaaccactcgaggccgttctcctgcatccatgcttgcttggcagtcccggcgatgaagtcgaaggccgctcccaccccggccatcgccggcacgcctagccgtgagcggtgctcgaacatcgagcgttcctgtttgggagtgctcaagcctacccagacgacatccggcgccgccgcctggattcgtagctccacttccaccttttcttcctgggtcagcggccgaaagggtggcgagcaggtggctcctggttcgcgtctgctaagcagaggcgataaccgttcttgtggtcttcgggccttgcctttctcgcgtgccgggtgtataccttcatcgcgttaatcatttggtagacagccacccgacaatcgggccgccaggagcgcaacgggccgcccaccagcctcttgccaaggcaaggaggaagttatgagctataacctgctcgaagaaaactggattccagttctatggaaagacgggaatagcaatcgcgtgggcattactgaagctcttaggcaagcaggccggattcgtcaagtcgccgccagcaatcccatggaccgtttggccatcctgcgtttcctcctcgcgcttctctattggtgcaaggggaatccgccggacgatgaagactcggtctcttcgtttccctcggattggttcaggaaacttgatgacaataaggactgtttcaaccttctgggagatggcaagcggttctatcagtgcaatgccaagtctggaacagagggaaagctttccgccaactacctgatgcaagaggtgcccactggcacaaactcttggcacttccggcattcgacagataaagaggacggattatgtccggcgtgctgcgccgcggggttattgcgtttaccgctatttgctacgtcaggggggcgcggcaagccgccaggggtcaaccagaaaccgccggtttatgtcgtaccggtcggcggttcacttgcggaaaccctgcgtctctcctggcgcaaggtatcggacacggacttcggaacgccggcttgggaagagcccgatcttagccttcctcgacatggcaatgttccgctgcttgtgggattgacgtcgctgccccggcgcgtgtggctggacaatccgcaggaacccgacgccaactgcatctcgtgcggacgtaaagcgcctctaatacgccaatgtgtgtttgctggtgtcggcagcgcaaaaacggatgaaaatggcctgggccgcgtatggagcgacccgcacaccatcactgacggcgaggatgtcattaaacccagcaatgcccttggtgcaaccgacgcggcggctgggcaatgggcaaggatagcggcgggaattcttcgggagaaaaagcccaatggcaaaagaggcttgtgggtcgtcagctttgcgacggtgcagaacgacaagtacctggaagcgatggaatatgagattcctctcccgagcacgctagatgatcggcaggtcgcggagagtgtcgaaacgattgacatgtggcaaaaggagggccggaagcttgccggcaaagccaaaccgagagggacttcccgaagacatcttgaaattcctcccatggtcgccgcagttcgcccgcacgtagaagcaaaggtctccgggaaggtcggcgagttgatttcgcgaggccgcgatgcgtgggagcaggcagcccgggaatataggccgatgatggccgccgtcgccaaatcgctttccccgggctataccaccgctgcgctccggcggcgacgccagattgtcaatgtaaggccgaacatgcagccaggcaccccaccggccgggagggccggacggaagaagggaggcgacaaatgactccaacggagcaatacgtcgacgtcctgacacatctgaagtccggtgatctcggactcctgcgcgagcatgccgggcaagggctcgaccaatcggtcgatgcctttgacctcttcgcggggctctggtggccgttgcgggagaggaatcagcgcgcgccccgccgtgcggtggcgtggcttatcgcaaaactctatgccttccggccgatcgagcattcacccgggcagacgcttgcgtggcagcttgggcggtaccggaacgacaatgaccccgagaaagaccctgtcgcggaaaggttcgacaggatgctgaccttgccggttgatatactcgagccggccttgcaatggtcgcttaacctcatcgcctccaaaaacccgaagctcgactgggtgacgctgacaaacgatctttccatttgggaacgcgaaaccacccggctcaagtgggccgaggaattcttgaagtcttcgaaggaggaccgtcatgttaattgaaattcatgccattcaaaatcacagcccggccaacctgaaccgggacgacttgggcgctcccaagacctgctacttcggcggagtactgcgctcccgtatttccagtcagtgcctcaagcggagcatccgcatgagtgacgaattcaagcagttgctcggcggcgttcgcacacggcgactggcgcaattgatcgctccaggcggcccggataccgccgagtttaaaaaggcgatcgcggttttagaaatctgcggcatcgcggcaaaagagaagaaagggaagaaaggcgacgacgaggaatctacgcccgacgaaaaaagcgccggagtggtttatgtgagcaaacaagcggtcaacgagatgtctgagcttctgaaaaccaagtcggccaagaccgataacgagctcgccaaggaatttgcccagataatcgctcgccatacgagcaccccggacatggcactctgtggcagaatgctggaaccaaagaaagcgaaaaagcaggcgtcggaggaaggcggcgcgaagcccaagggcggcgacgtctggaagggacttgacacaaccgttgaggcggcgctgcaagttgcccacgcaatttctactcacgcggctcgcccggagattgactactatgtggccgctgatgatgtgcccggtgaagacgcgggagcaggctttgtagatgaagcaatgttcggctccgcctgcttctacaagtatttttcgattgacttcgaaaccctcatcaacaatctgaagggcaacaaggaactggccgctcatactgtcggcgcgttcatccggggagcggcgttggtgaatcccacgggcaaacagaatagtttcgccgcgcacaacccacccgacggaatgctggtcgaaatcagaaactcacctctcagctatgccaacgcttttgcccgaccagccatagcccagggcgaacgagacatcatatcccagagcgtcgcgcaactcggccagtacgttcacgatatcgacaccggatacggcaaaccaacgaggcggttctggttctcgcccaatcttcgctatcccttgaccgttacggagggggataaggaaaacgccttggccgaaaacaatatcaagtcgctcgaggaattgatcgaggcagtcatcaagggaatcggccatgattgggaggaggttcagaaagtggttgtgaactcggaggtggcctgatgagcgcaaataccctctttctccgcctcgaagccccccttcaggcatggggcgatcagcagtcgaagtttgtgattcggcggacggctgacgccccaaccaggtctggcgtcatggggatgctttgcgcggcgttgggcgtctcccgctcggcggcgccggaaggctggcttccaaggcttagccgcctgcgcatgggcgtccgcatcgatgtgccgggggtccgctggtgggattatcacacggtgggcgccgggatgccgatgcgcactgccgaaggtggaaccaagccaggggccgtgctgacccgccgcgaatacctttgcgacgcctcgtttctcgtcgcttttcagggagagtcggacctcattgccgaactggagtccgcaattaaagcgcccaaatggacgctctatctgggcagaaagtgctgccctccctcgcgccctttactggagcatccggggggtgaatttcctgacttgctttctgccctcaaatcggttccctggcgcaagaggttggagggagacgatcagcccgaagcgctggattgcctgcttgattggaagtcaaccgaagagcagccggaggctcccgatgatgcgctcgtctggtacgacgtgcccgtgaccttcgacccgccctcccaccagccccgatttgtcattcgcaagcaactgcgcgttggactcgacggcgaagtaacgcttgcaactcagccagcacagagctacacgccagcgcctccccgcccaagagcggattacactaataccgagtacagaatccgacgggaaaagcggctcgacgacgactatcacttgtgcgtcttttgcaagtcgcccgccaccaccgtccagcacatcacctatcgccgcgcgggtggcaatgaactcgcggatgacttgcgctctctctgtcgcctctgccacgatgccgtcaccatgatcgaatatggcctaggcatgggcatggaccgcatcaacccggaagagccgcgttggcgcgacttgattatccaaaagcggaacgaaatcatcacgttccgctccctggagactcgccgcaggcgcctggtcgccgaggaggtggagtagccatgtaccggtcctgccttttgattgacgtcgggagtaaccccgaccggcctcggcccggaaggctgtggcttcggaatctctatcacgtccaccagcgcctttggatggcgtttccctccgagaaccgaaaatcccatgatcgcgattttcttaagcctttcaaacccgcggactttggcgagaagccggttcaggtagaacgcggggcgggttccggctttctttttcgcattgagccgcagcccgccgggcgggtcgtgattctcgtccagtccaactccgccgtgaagccggattgggactacgccttccacaacgcccgttttcttttgaatcctctggctgctcccccgcaggtagaggaattcgaccctcgcttcgccaagggccaacagcttcggttccgcatccgcatcaatctaagcaagaagttaaaaacgagcgcaaagggcgtcgatcttaccaaggcgggcgagggaacagatcgccaaggccgcccgaaggcccaaagcaaacgcgtagcgctgacctgggataaggaccagaaccccgacgatgtgatacgaaaatggttcgccgccaagggcgaccaaggtggcttccaggtggaaactttccgcgtcttgcaaatcgggtggggcgcaggaaaccgatcggacccgaggccggcgggcgatcgcatgaaatttcgctcagccttattggaggggacgcttacggttaaagacgcggatagcttcagagaaaccatcgtgggcggcatcgggcacggcaaagccttcggcttcgggcttctttccgtagcccctcgcacaccactcccggcagaggcaacgtgagagttctgacgccaaagcgagccccgaagcagcgcgccgagatcgcccgccgcatgtttgtgcagcgctttcccggtgtggatgtgcaggcgtattccgtcaccgaattgcggggaatggagggcttgcgcgtgcccgccaaatacgcggaactcggcgagcagtacggagtcacctggaaggggcgcaactacgacaaatccaactggaatctggcggacaacatcaatcgcgccctctcgacggccaatgccagcctttacgccttgtgcgccgccgtactctgctcgctgggttacctgccgtctctgggattcgttcacgacgccggcacgttgccctttatctatgatgtggcggacctgtacaaggaaataaccagtttcccggcagcctttcagtccatgcgccaggaccccaatgacaaaggcgacctggtccgcacgctgctgaaggaacgcgtcgag

SEQ ID NO: 608 - DNA, 12370 bp, Artificial Sequence
  Synthetic Oligonucleotide
acaactggccgtcggaaaggccgtcaagagccgtgcgggcggatcggatagacctgttgacagaccgagcgctggtcggccgcccagcctggtttcttactgtctgaatcgcagtattcgaaatcgaacaccctggtcggtggtcaagccctctgttcggatggacgcctgcaagcggtaagggcccggcgtcacaaaagcgagctgggatgcggccgcgaagtcgagattctgcgtccccgcgaagctgatgcgaagcgagcacttccctgccccggcggtcgcgcagtcacgggcgacttcaacgccctgagcgtgtccgaagttccaatcgaacggtgatggcgtgggctcgaattggaagtttccattaaagaggtcgttcgacttccggtagtcgcccgcgcgcgcgcccaggtgctgcgcccatgcggacaccgccgcttcgggatggccttgctgcacgagaaaaccggcatactcccctgccgtactatcatcgttatacccatgtcgagcgatccaatcccaagtgcgttgcgcatcatccaggcgcccggcttgcatcaggtattggagccaggattgtaccgcccgccgatcttccggaaggccgtacagcaaaacatcatcagcgtgatctaccaggcgcgtgtactcgctgaagatgatcgaatcgtaatccggagtgagcgtcaggatacgcgccgtggcggggagggcttggtggttctcgccgacttggaaatagaagttcgccgcgcgcaggagaaggggcgcagaccgcggggcgagggccagcacctggccgaagcactcgcgcgcctctcccttctgtccggcatcgagaaacgcctccccgaggtcggcccatcgatagggattttgcgggtctcgctggagaacctcgcggaataggacaatggccttttggacgtcctcttcgctcatccccgtcaattgctaccgcgctcgcaactccaagggcgcgttggtgcaaacaaagatgcggcacagaacgcggtcaacctccgcgttgttctgccccaacgtctccgagagaatgcccgcctcgcagtaggcagccaaaaccaccccgaggatgaacgtcagcactttcaatccagcacactctcccgacgacggaccttttcgaaagcccgctgatgtaacggcgaatttacctagccatatggcggcgcaaagccgcctctacatcaatctgacccactgccgaacattacagccacatgccgggacggccctaatcgcaatgcggatgatccggtgggcaatgaaggctacgcgggggtggcggcggcggaggtggaggtgggaagggtggccgcggtggcgagggcggtcggggtgggtcgtgcggccgtggaggatttccgcctctggcaagtggggtggcgggctgagccgaagctggccccgcggcggagttccgcgccaccggatgaactagcgggaccaagctcactcgcgagccttccgccggcttcaagtcgaccgacccagacagaacgcgcagcgccactgaagagctgcccgcctccagcttgacccgcgaattcggatcgagcgtggcgcggctccggtcggccaaatagatcatggccgacgaacccgcggtggcgatctcgtcgcccgccaccaccggcaaggatgatacggcggttgccagcgcggccttgccgttgagcgtcagcgcccccgaactggtgaccctgcccaccggatcggcggccatcaggactacggtcgtcatcatgacgataagcagacgcaaatatttcacggctacctcctgtgattgctgattggcgatgggcgatgggaaaacgggtatggcgacgtcctctgtcgtcaatcgccagtcggaaataggccattcccgagccccgcggacattcccgcaacccacgccaggagcatggcattggccggaatatagaagttgaaatccgccaggctatgcaccagaatcgcggccagcgcacccgcgcacgccacggcaagataccgcgcccccgggtctcgcgatccgacggctttccgcaccgccgtcctcaccacgaagaacgccagcgcggccacgatggcgaaacccaccagccccagttccgccagcaactgaaggtaatcgttatgcgcgaaatcgtccgtgacgagcggcgaggaaaccttgaatcttaagaacgctgtctcatatccgcccagcccgcacccgaagacggggtaagctctgatcaacggaatcgtctcggcccaaagctgcgcgcggccttctccggtgggatcggtcgaaacgagctggacgaatcgcgcgatcagcttgtccggcggcagaaacacgaagcccgccagcaccagtgcggcgaccaggccgaccgtggctgtttgccgtttccgggagcgcgcggcccagctcagttgccgggttccgagtgccagcgcccccatcacgaacagggaagcaagtgtcgcgaagaaccccatccgtgaaaaggaaaagacgattgcggcaaacatcaatcccgccagcgcccacacgccgcaagcccccagcgccggagtcaccgccgagtgccctcgcgagcgcgtgcgccgccaaagcgccacggggtacaccactgcgaacggcagcgccatctccaggaagcctgcgtagtggttatggttgacgtacgtcccccaccggagttggtccacgcctcggccgaagttctgcgagaggcccagaccggcttccagagcgccgatggcgacgatgggccacatcgccagccagcggttatccgcaaatcgccaagtcagctcgcgcaccagcaggaagatgatcacgtacccgcagacgagcaggaaaaattgaaaagtcgcgatgggtgaaacgctcaggggtacaaagttggctgggcgtccgatgagtgctgctggaggcatcgccgcggtgcgggcgggtgacagcacgcgcaccaggtacaccggcagcggcaccacctgcatcaggatgtagacgggcaagagagccagggtccagcgcaccacgcggccgggtagtggcgcccactggtggcgggggcgggcaaggctcagcaccaccgccagcaggcacagcaccaggaggtagtggtactggtcgattcggagcgctccgccccactcgaagacagcgtaggcgagcaccaatcccattgtggataaagcgccgatgtccgctattcttagagactctcgcgttggcttttcggggtgggactggaggcgcatggactggattgggagcatcaccgtaccgctaataggctagaaagtaaacctgggtcatgggtgacaggtgacaggtgacaggtgacaggaaaggaggctgcgccctggcgcagtaggtgtcagcagacaggttagaggtcacaggtgacagtgaaggagcctcaagcaagctcataggggacaggggacagggaacgagtgtgcgccttgcggcgccataggtggcacgcgacccgggagggaagctgagccctgtgacctataacctattccctgtcctcctgttccctgttttccctgctgtaccctgtaacctataacctattccctgcctacttgttccctgtcttcctgtaccctgtgccctgtaacctattccctatttccccctcattgcggaacgctatggccccctcggagggtatggttcgcgacgctcatgccgaggagggcggacagcagccaccgggtgagcagaattcccaagaagtagatgatgcgatgttcgaaattgaaaccccgcaggaggacggttccccaagccgcgcccaaggtgctgcacgccgctaccaagagccacgatccgatccggaacttgttggacttccaacccggcacgtaggcgttcaggtgaaaatcctcggacttattgtctccgtcatctgcgatcggcaggagttcgatcctttcccaaaaataaatgcaccattggcgatacgcgccaacgagcacggcgatgagcaggcacattgcgcagcccacccaggaattattaggtaaggcaagaatcatttcgatctcctgtccggcgagcaggttataggtgacagccagaggttacaggttacaggtcacaggtgtcaggtgtcaggtgacagaaaaagaggctgcgccctgtccccctgtctttccgttccctgccttcctccgtcccctgtaccttgtgacctgtcacctgtaccctgttctctcttctctaccctatgacctgttccctgtaacctgttccctgtctttctgttccctgtctttctgttccctgtctttctgttccctgtctttctgttccctgtcttcctgttccctgtccactgtccactgttccctgtaacctgtccgctgtcttctcatattcgtgcgctgctcgatagggaaactatgcagcaggacggtggccaaagccgcgccctgcgaggccaaaggtgacagggaaagaggagagaataggcaataggtgacaggttacaggtgacagggaaagaggctgcgccctgcggcgccaaaggtgagcctgttccctgacgcctgacacctgttttcccctgttccctgtccacggtcctctgccttcgggttccctgtcttcccctgtcccctgtgacctgtaacctgtcacctctcttcctgctgtaccctgtcccctgtaacctatcccctgtcctgaccgctcagagccctacgctacagccattttgtccagcccgctcatgacaccttaagtctgatgaccaagctactcacccgttggagagtcagcccttccctggcgcgctgtagtggcggtctctgactgtcggagggtgttgtggcatggccaacttggggtagcgccctaattctgtgttggtcccctccctcttgacaaactgcgatcgcacgtagcatctttccagcagcgaaaaacaaggtaaggaccccgctgctgtcgaacttggacggaggggcggcgaagcgatcgctaggtgcggccctgcttatctcaagtggcttcagtcttagcggttgacccgtaagggaggaagaccgaagtctaaatagtgaaaacgtgtttgaaaatggcacctgactcactcgggatgttgaccgcgattttgatatccgttggcctaatcgtaagcggagtgcatcttcgtcgtgtacctaaacttaaaatcgtgggagcgctgctggctgtacttggcatcttcggactcatggcagctctgggcttcatcagggtttattaacagcactcaccacaatcttcatctctgccagaacctcttggccgatcagcacgcgcgttgagtgcctatattggtaaaagccatgaccagcgacgtatgccccaaatgcgagagtatgaatctcgccgactcccatcggcgaggttggatcgagcggtggattcttagcttttttggtatcgtgcccattcgctgcatggactgtaatacccgtttttactccttccgccgtcccctctactgactccttttttcttcggcactcggttcagctcgccaagttgcacagatttcctttcggccgtcaatgtaacttctcagccaatacccctggactgacttgacaaaaccccattggatgggttaatataggtttccggtagtctagccaaaaggggaggggctgccgatgcaaacaaatgcctccgttaattcgcgccggtgtgagcgcaaaatagcaacaattccaatcaaacttgtggtgaaggccgacctcttcaatgcagacgattcagctctcgcggtcgacatttctccgcgcggcgcctgtgttcgaaccaagctggagttagatccaggagagtgggtgggtgtcgttcccaagggaggatacccgtatgccatccccactcgcacgatttgggtgcgggaggatgagttcagccattggaccttcgcggggcttgagttcttaaacaccccggaaggttagaaaatgcactccatggcacacccttccagtgtttgattggaattccaaaaccccaccaacacacgtttaggacgctacctgcctccccgaaggggaggaatatcattagccgtaggtgaaacctacggaccgagacggcgacgaaaggaacctaattttccgcgtttcctttccgtgggtttcacctaaggctatgggcgacaggcagagggcacaggttacaggtgacaggccaagaggcagcgccgtccggcgcccaaggtcagcctgctgcctgacacctgatacctgacacctgttttcccctgttccctaacccctgttttcccttctttcccctgtaacctgtaacctgtcccctgccttgcggtggcagagccgctggggctcttgcgtgaggcggaagaaccactcgaggccgttctcctgcatccatgcttgcttggcagtcccggcgatgaagtcgaaggccgctcccaccccggccatcgccggcacgcctagccgtgagcggtgctcgaacatcgagcgttcctgtttgggagtgctcaagcctacccagacgacatccggcgccgccgcctggattcgtagctccacttccaccttttcttcctgggtcagcggccgaaagggtggcgagcaggtggctcctggttcgcgtctgctaagcagaggcgataaccgttcttgtggtcttcgggccttgcctttctcgcgtgccgggtgtataccttcatcgcgttaatcatttggtagacagccacccgacaatcgggccgccaggagcgcaacgggccgcccaccagcctcttgccaaggcaaggaggaagttatgagctataacctgctcgaagaaaactggattccagttctatggaaagacgggaatagcaatcgcgtgggcattactgaagctcttaggcaagcaggccggattcgtcaagtcgccgccagcaatcccatggaccgtttggccatcctgcgtttcctcctcgcgcttctctattggtgcaaggggaatccgccggacgatgaagactcggtctcttcgtttccctcggattggttcaggaaacttgatgacaataaggactgtttcaaccttctgggagatggcaagcggttctatcagtgcaatgccaagtctggaacagagggaaagctttccgccaactacctgatgcaagaggtgcccactggcacaaactcttggcacttccggcattcgacagataaagaggacggattatgtccggcgtgctgcgccgcggggttattgcgtttaccgctatttgctacgtcaggggggcgcggcaagccgccaggggtcaaccagaaaccgccggtttatgtcgtaccggtcggcggttcacttgcggaaaccctgcgtctctcctggcgcaaggtatcggacacggacttcggaacgccggcttgggaagagcccgatcttagccttcctcgacatggcaatgttccgctgcttgtgggattgacgtcgctgccccggcgcgtgtggctggacaatccgcaggaacccgacgccaactgcatctcgtgcggacgtaaagcgcctctaatacgccaatgtgtgtttgctggtgtcggcagcgcaaaaacggatgaaaatggcctgggccgcgtatggagcgacccgcacaccatcactgacggcgaggatgtcattaaacccagcaatgcccttggtgcaaccgacgcggcggctgggcaatgggcaaggatagcggcgggaattcttcgggagaaaaagcccaatggcaaaagaggcttgtgggtcgtcagctttgcgacggtgcagaacgacaagtacctggaagcgatggaatatgagattcctctcccgagcacgctagatgatcggcaggtcgcggagagtgtcgaaacgattgacatgtggcaaaaggagggccggaagcttgccggcaaagccaaaccgagagggacttcccgaagacatcttgaaattcctcccatggtcgccgcagttcgcccgcacgtagaagcaaaggtctccgggaaggtcggcgagttgatttcgcgaggccgcgatgcgtgggagcaggcagcccgggaatataggccgatgatggccgccgtcgccaaatcgctttccccgggctataccaccgctgcgctccggcggcgacgccagattgtcaatgtaaggccgaacatgcagccaggcaccccaccggccgggagggccggacggaagaagggaggcgacaaatgactccaacggagcaatacgtcgacgtcctgacacatctgaagtccggtgatctcggactcctgcgcgagcatgccgggcaagggctcgaccaatcggtcgatgcctttgacctcttcgcggggctctggtggccgttgcgggagaggaatcagcgcgcgccccgccgtgcggtggcgtggcttatcgcaaaactctatgccttccggccgatcgagcattcacccgggcagacgcttgcgtggcagcttgggcggtaccggaacgacaatgaccccgagaaagaccctgtcgcggaaaggttcgacaggatgctgaccttgccggttgatatactcgagccggccttgcaatggtcgcttaacctcatcgcctccaaaaacccgaagctcgactgggtgacgctgacaaacgatctttccatttgggaacgcgaaaccacccggctcaagtgggccgaggaattcttgaagtcttcgaaggaggaccgtcatgttaattgaaattcatgccattcaaaatcacagcccggccaacctgaaccgggacgacttgggcgctcccaagacctgctacttcggcggagtactgcgctcccgtatttccagtcagtgcctcaagcggagcatccgcatgagtgacgaattcaagcagttgctcggcggcgttcgcacacggcgactggcgcaattgatcgctccaggcggcccggataccgccgagtttaaaaaggcgatcgcggttttagaaatctgcggcatcgcggcaaaagagaagaaagggaagaaaggcgacgacgaggaatctacgcccgacgaaaaaagcgccggagtggtttatgtgagcaaacaagcggtcaacgagatgtctgagcttctgaaaaccaagtcggccaagaccgataacgagctcgccaaggaatttgcccagataatcgctcgccatacgagcaccccggacatggcactctgtggcagaatgctggaaccaaagaaagcgaaaaagcaggcgtcggaggaaggcggcgcgaagcccaagggcggcgacgtctggaagggacttgacacaaccgttgaggcggcgctgcaagttgcccacgcaatttctactcacgcggctcgcccggagattgactactatgtggccgctgatgatgtgcccggtgaagacgcgggagcaggctttgtagatgaagcaatgttcggctccgcctgcttctacaagtatttttcgattgacttcgaaaccctcatcaacaatctgaagggcaacaaggaactggccgctcatactgtcggcgcgttcatccggggagcggcgttggtgaatcccacgggcaaacagaatagtttcgccgcgcacaacccacccgacggaatgctggtcgaaatcagaaactcacctctcagctatgccaacgcttttgcccgaccagccatagcccagggcgaacgagacatcatatcccagagcgtcgcgcaactcggccagtacgttcacgatatcgacaccggatacggcaaaccaacgaggcggttctggttctcgcccaatcttcgctatcccttgaccgttacggagggggataaggaaaacgccttggccgaaaacaatatcaagtcgctcgaggaattgatcgaggcagtcatcaagggaatcggccatgattgggaggaggttcagaaagtggttgtgaactcggaggtggcctgatgagcgcaaataccctctttctccgcctcgaagccccccttcaggcatggggcgatcagcagtcgaagtttgtgattcggcggacggctgacgccccaaccaggtctggcgtcatggggatgctttgcgcggcgttgggcgtctcccgctcggcggcgccggaaggctggcttccaaggcttagccgcctgcgcatgggcgtccgcatcgatgtgccgggggtccgctggtgggattatcacacggtgggcgccgggatgccgatgcgcactgccgaaggtggaaccaagccaggggccgtgctgacccgccgcgaatacctttgcgacgcctcgtttctcgtcgcttttcagggagagtcggacctcattgccgaactggagtccgcaattaaagcgcccaaatggacgctctatctgggcagaaagtgctgccctccctcgcgccctttactggagcatccggggggtgaatttcctgacttgctttctgccctcaaatcggttccctggcgcaagaggttggagggagacgatcagcccgaagcgctggattgcctgcttgattggaagtcaaccgaagagcagccggaggctcccgatgatgcgctcgtctggtacgacgtgcccgtgaccttcgacccgccctcccaccagccccgatttgtcattcgcaagcaactgcgcgttggactcgacggcgaagtaacgcttgcaactcagccagcacagagctacacgccagcgcctccccgcccaagagcggattacactaataccgagtacagaatccgacgggaaaagcggctcgacgacgactatcacttgtgcgtcttttgcaagtcgcccgccaccaccgtccagcacatcacctatcgccgcgcgggtggcaatgaactcgcggatgacttgcgctctctctgtcgcctctgccacgatgccgtcaccatgatcgaatatggcctaggcatgggcatggaccgcatcaacccggaagagccgcgttggcgcgacttgattatccaaaagcggaacgaaatcatcacgttccgctccctggagactcgccgcaggcgcctggtcgccgaggaggtggagtagccatgtaccggtcctgccttttgattgacgtcgggagtaaccccgaccggcctcggcccggaaggctgtggcttcggaatctctatcacgtccaccagcgcctttggatggcgtttccctccgagaaccgaaaatcccatgatcgcgattttcttaagcctttcaaacccgcggactttggcgagaagccggttcaggtagaacgcggggcgggttccggctttctttttcgcattgagccgcagcccgccgggcgggtcgtgattctcgtccagtccaactccgccgtgaagccggattgggactacgccttccacaacgcccgttttcttttgaatcctctggctgctcccccgcaggtagaggaattcgaccctcgcttcgccaagggccaacagcttcggttccgcatccgcatcaatctaagcaagaagttaaaaacgagcgcaaagggcgtcgatcttaccaaggcgggcgagggaacagatcgccaaggccgcccgaaggcccaaagcaaacgcgtagcgctgacctgggataaggaccagaaccccgacgatgtgatacgaaaatggttcgccgccaagggcgaccaaggtggcttccaggtggaaactttccgcgtcttgcaaatcgggtggggcgcaggaaaccgatcggacccgaggccggcgggcgatcgcatgaaatttcgctcagccttattggaggggacgcttacggttaaagacgcggatagcttcagagaaaccatcgtgggcggcatcgggcacggcaaagccttcggcttcgggcttctttccgtagcccctcgcacaccactcccggcagaggcaacgtgagagttctgacgccaaagcgagccccgaagcagcgcgccgagatcgcccgccgcatgtttgtgcagcgctttcccggtgtggatgtgcaggcgtattccgtcaccgaattgcggggaatggagggcttgcgcgtgcccgccaaatacgcggaactcggcgagcagtacggagtcacctggaaggggcgcaactacgacaaatccaactggaatctggcggacaacatcaatcgcgccctctcgacggccaatgccagcctttccgccttgtgcgccgccgtactctgctcgctgggttacctgccgtctctgggattcgttcacgacgccggcacgttgccctttatctatgatgtggcggacctgtacaaggaaataaccagtttcccggcagcctttcagtccatgcgccaggaccccaatgacaaaggcgacctggtccgcacgctgctgaaggaacgcgtcgag

SEQ ID NO: 609 - DNA, 12346 bp, Artificial Sequence
  Synthetic Oligonucleotide
aggtggacaactggccgtcggaaaggccgtcaagagccgtgcgggcggatcggatagacctgttgacagaccgagcgctggtcggccgcccagcctggtttcttactgtctgaatcgcagtattcgaaatcgaacaccctggtcggtggtcaagccctctgttcggatggacgcctgcaagcggtaagggcccggcgtcacaaaagcgagctgggatgcggccgcgaagtcgagattctgcgtccccgcgaagctgatgcgaagcgagcacttccctgccccggcggtcgcgcagtcacgggcgacttcaacgccctgagcgtgtccgaagttccaatcgaacggtgatggcgtgggctcgaattggaagtttccattaaagaggtcgttcgacttccggtagtcgcccgcgcgcgcgcccaggtgctgcgcccatgcggacaccgccgcttcgggatggccttgctgcacgagaaaaccggcatactcccctgccgtactatcatcgttatacccatgtcgagcgatccaatcccaagtgcgttgcgcatcatccaggcgcccggcttgcatcaggtattggagccaggattgtaccgcccgccgatcttccggaaggccgtacagcaaaacatcatcagcgtgatctaccaggcgcgtgtactcgctgaagatgatcgaatcgtaatccggagtgagcgtcaggatacgcgccgtggcggggagggcttggtggttctcgccgacttggaaatagaagttcgccgcgcgcaggagaaggggcgcagaccgcggggcgagggccagcacctggccgaagcactcgcgcgcctctcccttctgtccggcatcgagaaacgcctccccgaggtcggcccatcgatagggattttgcgggtctcgctggagaacctcgcggaataggacaatggccttttggacgtcctcttcgctcatccccgtcaattgctaccgcgctcgcaactccaagggcgcgttggtgcaaacaaagatgcggcacagaacgcggtcaacctccgcgttgttctgccccaacgtctccgagagaatgcccgcctcgcagtaggcagccaaaaccaccccgaggatgaacgtcagcactttcaatccagcacactctcccgacgacggaccttttcgaaagcccgctgatgtaacggcgaatttacctagccatatggcggcgcaaagccgcctctacatcaatctgacccactgccgaacattacagccacatgccgggacggccctaatcgcaatgcggatgatccggtgggcaatgaaggctacgcgggggtggcggcggcggaggtggaggtgggaagggtggccgcggtggcgagggcggtcggggtgggtcgtgcggccgtggaggatttccgcctctggcaagtggggtggcgggctgagccgaagctggccccgcggcggagttccgcgccaccggatgaactagcgggaccaagctcactcgcgagccttccgccggcttcaagtcgaccgacccagacagaacgcgcagcgccactgaagagctgcccgcctccagcttgacccgcgaattcggatcgagcgtggcgcggctccggtcggccaaatagatcatggccgacgaacccgcggtggcgatctcgtcgcccgccaccaccggcaaggatgatacggcggttgccagcgcggccttgccgttgagcgtcagcgcccccgaactggtgaccctgcccaccggatcggcggccatcaggactacggtcgtcatcatgacgataagcagacgcaaatatttcacggctacctcctgtgattgctgattggcgatgggcgatgggaaaacgggtatggcgacgtcctctgtcgtcaatcgccagtcggaaataggccattcccgagccccgcggacattcccgcaacccacgccaggagcatggcattggccggaatatagaagttgaaatccgccaggctatgcaccagaatcgcggccagcgcacccgcgcacgccacggcaagataccgcgcccccgggtctcgcgatccgacggctttccgcaccgccgtcctcaccacgaagaacgccagcgcggccacgatggcgaaacccaccagccccagttccgccagcaactgaaggtaatcgttatgcgcgaaatcgtccgtgacgagcggcgaggaaaccttgaatcttaagaacgctgtctcatatccgcccagcccgcacccgaagacggggtaagctctgatcaacggaatcgtctcggcccaaagctgcgcgcggccttctccggtgggatcggtcgaaacgagctggacgaatcgcgcgatcagcttgtccggcggcagaaacacgaagcccgccagcaccagtgcggcgaccaggccgaccgtggctgtttgccgtttccgggagcgcgcggcccagctcagttgccgggttccgagtgccagcgcccccatcacgaacagggaagcaagtgtcgcgaagaaccccatccgtgaaaaggaaaagacgattgcggcaaacatcaatcccgccagcgcccacacgccgcaagcccccagcgccggagtcaccgccgagtgccctcgcgagcgcgtgcgccgccaaagcgccacggggtacaccactgcgaacggcagcgccatctccaggaagcctgcgtagtggttatggttgacgtacgtcccccaccggagttggtccacgcctcggccgaagttctgcgagaggcccagaccggcttccagagcgccgatggcgacgatgggccacatcgccagccagcggttatccgcaaatcgccaagtcagctcgcgcaccagcaggaagatgatcacgtacccgcagacgagcaggaaaaattgaaaagtcgcgatgggtgaaacgctcaggggtacaaagttggctgggcgtccgatgagtgctgctggaggcatcgccgcggtgcgggcgggtgacagcacgcgcaccaggtacaccggcagcggcaccacctgcatcaggatgtagacgggcaagagagccagggtccagcgcaccacgcggccgggtagtggcgcccactggtggcgggggcgggcaaggctcagcaccaccgccagcaggcacagcaccaggaggtagtggtactggtcgattcggagcgctccgccccactcgaagacagcgtaggcgagcaccaatcccattgtggataaagcgccgatgtccgctattcttagagactctcgcgttggcttttcggggtgggactggaggcgcatggactggattgggagcatcaccgtaccgctaataggctagaaagtaaacctgggtcatgggtgacaggtgacaggtgacaggtgacaggaaaggaggctgcgccctggcgcagtaggtgtcagcagacaggttagaggtcacaggtgacagtgaaggagcctcaagcaagctcataggggacaggggacagggaacgagtgtgcgccttgcggcgccataggtggcacgcgacccgggagggaagctgagccctgtgacctataacctattccctgtcctcctgttccctgttttccctgctgtaccctgtaacctataacctattccctgcctacttgttccctgtcttcctgtaccctgtgccctgtaacctattccctatttccccctcattgcggaacgctatggccccctcggagggtatggttcgcgacgctcatgccgaggagggcggacagcagccaccgggtgagcagaattcccaagaagtagatgatgcgatgttcgaaattgaaaccccgcaggaggacggttccccaagccgcgcccaaggtgctgcacgccgctaccaagagccacgatccgatccggaacttgttggacttccaacccggcacgtaggcgttcaggtgaaaatcctcggacttattgtctccgtcatctgcgatcggcaggagttcgatcctttcccaaaaataaatgcaccattggcgatacgcgccaacgagcacggcgatgagcaggcacattgcgcagcccacccaggaattattaggtaaggcaagaatcatttcgatctcctgtccggcgagcaggttataggtgacagccagaggttacaggttacaggtcacaggtgtcaggtgtcaggtgacagaaaaagaggctgcgccctgtccccctgtctttccgttccctgccttcctccgtcccctgtaccttgtgacctgtcacctgtaccctgttctctcttctctaccctatgacctgttccctgtaacctgttccctgtctttctgttccctgtctttctgttccctgtcttcctgttccctgtccactgtccactgttccctgtaacctgtccgctgtcttctcatattcgtgcgctgctcgatagggaaactatgcagcaggacggtggccaaagccgcgccctgcgaggccaaaggtgacagggaaagaggagagaataggcaataggtgacaggttacaggtgacagggaaagaggctgcgccctgcggcgccaaaggtgagcctgttccctgacgcctgacacctgttttcccctgttccctgtccacggtcctctgccttcgggttccctgtcttcccctgtcccctgtgacctgtaacctgtcacctctcttcctgctgtaccctgtcccctgtaacctatcccctgtcctgaccgctcagagccctacgctacagccattttgtccagcccgctcatgacaccttaagtctgatgaccaagctactcacccgttggagagtcagcccttccctggcgcgctgtagtggcggtctctgactgtcggagggtgttgtggcatggccaacttggggtagcgccctaattctgtgttggtcccctccctcttgacaaactgcgatcgcacgtagcatctttccagcagcgaaaaacaaggtaaggaccccgctgctgtcgaacttggacggaggggcggcgaagcgatcgctaggtgcggccctgcttatctcaagtggcttcagtcttagcggttgacccgtaagggaggaagaccgaagtctaaatagtgaaaacgtgtttgaaaatggcacctgactcactcgggatgttgaccgcgattttgatatccgttggcctaatcgtaagcggagtgcatcttcgtcgtgtacctaaacttaaaatcgtgggagcgctgctggctgtacttggcatcttcggactcatggcagctctgggcttcatcagggtttattaacagcactcaccacaatcttcatctctgccagaacctcttggccgatcagcacgcgcgttgagtgcctatattggtaaaagccatgaccagcgacgtatgccccaaatgcgagagtatgaatctcgccgactcccatcggcgaggttggatcgagcggtggattcttagcttttttggtatcgtgcccattcgctgcatggactgtaatacccgtttttactccttccgccgtcccctctactgactccttttttcttcggcactcggttcagctcgccaagttgcacagatttcctttcggccgtcaatgtaacttctcagccaatacccctggactgacttgacaaaaccccattggatgggttaatataggtttccggtagtctagccaaaaggggaggggctgccgatgcaaacaaatgcctccgttaattcgcgccggtgtgagcgcaaaatagcaacaattccaatcaaacttgtggtgaaggccgacctcttcaatgcagacgattcagctctcgcggtcgacatttctccgcgcggcgcctgtgttcgaaccaagctggagttagatccaggagagtgggtgggtgtcgttcccaagggaggatacccgtatgccatccccactcgcacgatttgggtgcgggaggatgagttcagccattggaccttcgcggggcttgagttcttaaacaccccggaaggttagaaaatgcactccatggcacacccttccagtgtttgattggaattccaaaaccccaccaacacacgtttaggacgctacctgcctccccgaaggggaggaatatcattagccgtaggtgaaacctacggaccgagacggcgacgaaaggaacctaattttccgcgtttcctttccgtgggtttcacctaaggctatgggcgacaggcagagggcacaggttacaggtgacaggccaagaggcagcgccgtccggcgcccaaggtcagcctgctgcctgacacctgatacctgacacctgttttcccctgttccctaacccctgttttcccttctttcccctgtaacctgtaacctgtcccctgccttgcggtggcagagccgctggggctcttgcgtgaggcggaagaaccactcgaggccgttctcctgcatccatgcttgcttggcagtcccggcgatgaagtcgaaggccgctcccaccccggccatcgccggcacgcctagccgtgagcggtgctcgaacatcgagcgttcctgtttgggagtgctcaagcctacccagacgacatccggcgccgccgcctggattcgtagctccacttccaccttttcttcctgggtcagcggccgaaagggtggcgagcaggtggctcctggttcgcgtctgctaagcagaggcgataaccgttcttgtggtcttcgggccttgcctttctcgcgtgccgggtgtataccttcatcgcgttaatcatttggtagacagccacccgacaatcgggccgccaggagcgcaacgggccgcccaccagcctcttgccaaggcaaggaggaagttatgagctataacctgctcgaagaaaactggattccagttctatggaaagacgggaatagcaatcgcgtgggcattactgaagctcttaggcaagcaggccggattcgtcaagtcgccgccagcaatcccatggaccgtttggccatcctgcgtttcctcctcgcgcttctctattggtgcaaggggaatccgccggacgatgaagactcggtctcttcgtttccctcggattggttcaggaaacttgatgacaataaggactgtttcaaccttctgggagatggcaagcggttctatcagtgcaatgccaagtctggaacagagggaaagctttccgccaactacctgatgcaagaggtgcccactggcacaaactcttggcacttccggcattcgacagataaagaggacggattatgtccggcgtgctgcgccgcggggttattgcgtttaccgctatttgctacgtcaggggggcgcggcaagccgccaggggtcaaccagaaaccgccggtttatgtcgtaccggtcggcggttcacttgcggaaaccctgcgtctctcctggcgcaaggtatcggacacggacttcggaacgccggcttgggaagagcccgatcttagccttcctcgacatggcaatgttccgctgcttgtgggattgacgtcgctgccccggcgcgtgtggctggacaatccgcaggaacccgacgccaactgcatctcgtgcggacgtaaagcgcctctaatacgccaatgtgtgtttgctggtgtcggcagcgcaaaaacggatgaaaatggcctgggccgcgtatggagcgacccgcacaccatcactgacggcgaggatgtcattaaacccagcaatgcccttggtgcaaccgacgcggcggctgggcaatgggcaaggatagcggcgggaattcttcgggagaaaaagcccaatggcaaaagaggcttgtgggtcgtcagctttgcgacggtgcagaacgacaagtacctggaagcgatggaatatgagattcctctcccgagcacgctagatgatcggcaggtcgcggagagtgtcgaaacgattgacatgtggcaaaaggagggccggaagcttgccggcaaagccaaaccgagagggacttcccgaagacatcttgaaattcctcccatggtcgccgcagttcgcccgcacgtagaagcaaaggtctccgggaaggtcggcgagttgatttcgcgaggccgcgatgcgtgggagcaggcagcccgggaatataggccgatgatggccgccgtcgccaaatcgctttccccgggctataccaccgctgcgctccggcggcgacgccagattgtcaatgtaaggccgaacatgcagccaggcaccccaccggccgggagggccggacggaagaagggaggcgacaaatgactccaacggagcaatacgtcgacgtcctgacacatctgaagtccggtgatctcggactcctgcgcgagcatgccgggcaagggctcgaccaatcggtcgatgcctttgacctcttcgcggggctctggtggccgttgcgggagaggaatcagcgcgcgccccgccgtgcggtggcgtggcttatcgcaaaactctatgccttccggccgatcgagcattcacccgggcagacgcttgcgtggcagcttgggcggtaccggaacgacaatgaccccgagaaagaccctgtcgcggaaaggttcgacaggatgctgaccttgccggttgatatactcgagccggccttgcaatggtcgcttaacctcatcgcctccaaaaacccgaagctcgactgggtgacgctgacaaacgatctttccatttgggaacgcgaaaccacccggctcaagtgggccgaggaattcttgaagtcttcgaaggaggaccgtcatgttaattgaaattcatgccattcaaaatcacagcccggccaacctgaaccgggacgacttgggcgctcccaagacctgctacttcggcggagtactgcgctcccgtatttccagtcagtgcctcaagcggagcatccgcatgagtgacgaattcaagcagttgctcggcggcgttcgcacacggcgactggcgcaattgatcgctccaggcggcccggataccgccgagtttaaaaaggcgatcgcggttttagaaatctgcggcatcgcggcaaaagagaagaaagggaagaaaggcgacgacgaggaatctacgcccgacgaaaaaagcgccggagtggtttatgtgagcaaacaagcggtcaacgagatgtctgagcttctgaaaaccaagtcggccaagaccgataacgagctcgccaaggaatttgcccagataatcgctcgccatacgagcaccccggacatggcactctgtggcagaatgctggaaccaaagaaagcgaaaaagcaggcgtcggaggaaggcggcgcgaagcccaagggcggcgacgtctggaagggacttgacacaaccgttgaggcggcgctgcaagttgcccacgcaatttctactcacgcggctcgcccggagattgactactatgtggccgctgatgatgtgcccggtgaagacgcgggagcaggctttgtagatgaagcaatgttcggctccgcctgcttctacaagtatttttcgattgacttcgaaaccctcatcaacaatctgaagggcaacaaggaactggccgctcatactgtcggcgcgttcatccggggagcggcgttggtgaatcccacgggcaaacagaatagtttcgccgcgcacaacccacccgacggaatgctggtcgaaatcagaaactcacctctcagctatgccaacgcttttgcccgaccagccatagcccagggcgaacgagacatcatatcccagagcgtcgcgcaactcggccagtacgttcacgatatcgacaccggatacggcaaaccaacgaggcggttctggttctcgcccaatcttcgctatcccttgaccgttacggagggggataaggaaaacgccttggccgaaaacaatatcaagtcgctcgaggaattgatcgaggcagtcatcaagggaatcggccatgattgggaggaggttcagaaagtggttgtgaactcggaggtggcctgatgagcgcaaataccctctttctccgcctcgaagccccccttcaggcatggggcgatcagcagtcgaagtttgtgattcggcggacggctgacgccccaaccaggtctggcgtcatggggatgctttgcgcggcgttgggcgtctcccgctcggcggcgccggaaggctggcttccaaggcttagccgcctgcgcatgggcgtccgcatcgatgtgccgggggtccgctggtgggattatcacacggtgggcgccgggatgccgatgcgcactgccgaaggtggaaccaagccaggggccgtgctgacccgccgcgaatacctttgcgacgcctcgtttctcgtcgcttttcagggagagtcggacctcattgccgaactggagtccgcaattaaagcgcccaaatggacgctctatctgggcagaaagtgctgccctccctcgcgccctttactggagcatccggggggtgaatttcctgacttgctttctgccctcaaatcggttccctggcgcaagaggttggagggagacgatcagcccgaagcgctggattgcctgcttgattggaagtcaaccgaagagcagccggaggctcccgatgatgcgctcgtctggtacgacgtgcccgtgaccttcgacccgccctcccaccagccccgatttgtcattcgcaagcaactgcgcgttggactcgacggcgaagtaacgcttgcaactcagccagcacagagctacacgccagcgcctccccgcccaagagcggattacactaataccgagtacagaatccgacgggaaaagcggctcgacgacgactatcacttgtgcgtcttttgcaagtcgcccgccaccaccgtccagcacatcacctatcgccgcgcgggtggcaatgaactcgcggatgacttgcgctctctctgtcgcctctgccacgatgccgtcaccatgatcgaatatggcctaggcatgggcatggaccgcatcaacccggaagagccgcgttggcgcgacttgattatccaaaagcggaacgaaatcatcacgttccgctccctggagactcgccgcaggcgcctggtcgccgaggaggtggagtagccatgtaccggtcctgccttttgattgacgtcgggagtaaccccgaccggcctcggcccggaaggctgtggcttcggaatctctatcacgtccaccagcgcctttggatggcgtttccctccgagaaccgaaaatcccatgatcgcgattttcttaagcctttcaaacccgcggactttggcgagaagccggttcaggtagaacgcggggcgggttccggctttctttttcgcattgagccgcagcccgccgggcgggtcgtgattctcgtccagtccaactccgccgtgaagccggattgggactacgccttccacaacgcccgttttcttttgaatcctctggctgctcccccgcaggtagaggaattcgaccctcgcttcgccaagggccaacagcttcggttccgcatccgcatcaatctaagcaagaagttaaaaacgagcgcaaagggcgtcgatcttaccaaggcgggcgagggaacagatcgccaaggccgcccgaaggcccaaagcaaacgcgtagcgctgacctgggataaggaccagaaccccgacgatgtgatacgaaaatggttcgccgccaagggcgaccaaggtggcttccaggtggaaactttccgcgtcttgcaaatcgggtggggcgcaggaaaccgatcggacccgaggccggcgggcgatcgcatgaaatttcgctcagccttattggaggggacgcttacggttaaagacgcggatagcttcagagaaaccatcgtgggcggcatcgggcacggcaaagccttcggcttcgggcttctttccgtagcccctcgcacaccactcccggcagaggcaacgtgagagttctgacgccaaagcgagccccgaagcagcgcgccgagatcgcccgccgcatgtttgtgcagcgctttcccggtgtggatgtgcaggcgtattccgtcaccgaattgcggggaatggagggcttgcgcgtgcccgccaaatacgcggaactcggcgagcagtacggagtcacctggaaggggcgcaactacgacaaatccaactggaatctggcggacaacatcaatcgcgccctctcgacggccaatgccagcctttacgccttgtgcgccgccgtactctgctcgctgggttacctgccgtctctgggattcgttcacgacgccggcacgttgccctttatctatgatgtggcggacctgtacaaggaaataaccagtttcccggcagcctttcagtccatgcgccaggaccccaatgacaaaggcgacctggtccgcacgctgctgaaggaacgcgtcgag

SEQ ID NO: 610 - DNA, 12346 bp, Artificial Sequence
  Synthetic Oligonucleotide
aggtggacaactggccgtcggaaaggccgtcaagagccgtgcgggcggatcggatagacctgttgacagaccgagcgctggtcggccgcccagcctggtttcttactgtctgaatcgcagtattcgaaatcgaacaccctggtcggtggtcaagccctctgttcggatggacgcctgcaagcggtaagggcccggcgtcacaaaagcgagctgggatgcggccgcgaagtcgagattctgcgtccccgcgaagctgatgcgaagcgagcacttccctgccccggcggtcgcgcagtcacgggcgacttcaacgccctgagcgtgtccgaagttccaatcgaacggtgatggcgtgggctcgaattggaagtttccattaaagaggtcgttcgacttccggtagtcgcccgcgcgcgcgcccaggtgctgcgcccatgcggacaccgccgcttcgggatggccttgctgcacgagaaaaccggcatactcccctgccgtactatcatcgttatacccatgtcgagcgatccaatcccaagtgcgttgcgcatcatccaggcgcccggcttgcatcaggtattggagccaggattgtaccgcccgccgatcttccggaaggccgtacagcaaaacatcatcagcgtgatctaccaggcgcgtgtactcgctgaagatgatcgaatcgtaatccggagtgagcgtcaggatacgcgccgtggcggggagggcttggtggttctcgccgacttggaaatagaagttcgccgcgcgcaggagaaggggcgcagaccgcggggcgagggccagcacctggccgaagcactcgcgcgcctctcccttctgtccggcatcgagaaacgcctccccgaggtcggcccatcgatagggattttgcgggtctcgctggagaacctcgcggaataggacaatggccttttggacgtcctcttcgctcatccccgtcaattgctaccgcgctcgcaactccaagggcgcgttggtgcaaacaaagatgcggcacagaacgcggtcaacctccgcgttgttctgccccaacgtctccgagagaatgcccgcctcgcagtaggcagccaaaaccaccccgaggatgaacgtcagcactttcaatccagcacactctcccgacgacggaccttttcgaaagcccgctgatgtaacggcgaatttacctagccatatggcggcgcaaagccgcctctacatcaatctgacccactgccgaacattacagccacatgccgggacggccctaatcgcaatgcggatgatccggtgggcaatgaaggctacgcgggggtggcggcggcggaggtggaggtgggaagggtggccgcggtggcgagggcggtcggggtgggtcgtgcggccgtggaggatttccgcctctggcaagtggggtggcgggctgagccgaagctggccccgcggcggagttccgcgccaccggatgaactagcgggaccaagctcactcgcgagccttccgccggcttcaagtcgaccgacccagacagaacgcgcagcgccactgaagagctgcccgcctccagcttgacccgcgaattcggatcgagcgtggcgcggctccggtcggccaaatagatcatggccgacgaacccgcggtggcgatctcgtcgcccgccaccaccggcaaggatgatacggcggttgccagcgcggccttgccgttgagcgtcagcgcccccgaactggtgaccctgcccaccggatcggcggccatcaggactacggtcgtcatcatgacgataagcagacgcaaatatttcacggctacctcctgtgattgctgattggcgatgggcgatgggaaaacgggtatggcgacgtcctctgtcgtcaatcgccagtcggaaataggccattcccgagccccgcggacattcccgcaacccacgccaggagcatggcattggccggaatatagaagttgaaatccgccaggctatgcaccagaatcgcggccagcgcacccgcgcacgccacggcaagataccgcgcccccgggtctcgcgatccgacggctttccgcaccgccgtcctcaccacggagaacgccagcgcggccacgatggcgaaacccaccagccccagttccgccagcaactgaaggtaatcgttatgcgcgaaatcgtccgtgacgagcggcgaggaaaccttgaatcttaagaacgctgtctcatatccgcccagcccgcacccgaagacggggtaagctctgatcaacggaatcgtctcggcccaaagctgcgcgcggccttctccggtgggatcggtcgaaacgagctggacgaatcgcgcgatcagcttgtccggcggcagaaacacgaagcccgccagcaccagtgcggcgaccaggccgaccgtggctgtttgccgtttccgggagcgcgcggcccagctcagttgccgggttccgagtgccagcgcccccatcacgaacagggaagcaagtgtcgcgaagaaccccatccgtgaaaaggaaaagacgattgcggcaaacatcaatcccgccagcgcccacacgccgcaagcccccagcgccggagtcaccgccgagtgccctcgcgagcgcgtgcgccgccaaagcgccacggggtacaccactgcgaacggcagcgccatctccaggaagcctgcgtagtggttatggttgacgtacgtcccccaccggagttggtccacgcctcggccgaagttctgcgagaggcccagaccggcttccagagcgccgatggcgacgatgggccacatcgccagccagcggttatccgcaaatcgccaagtcagctcgcgcaccagcaggaagatgatcacgtacccgcagacgagcaggaaaaattgaaaagtcgcgatgggtgaaacgctcaggggtacaaagttggctgggcgtccgatgagtgctgctggaggcatcgccgcggtgcgggcgggtgacagcacgcgcaccaggtacaccggcagcggcaccacctgcatcaggatgtagacgggcaagagagccagggtccagcgcaccacgcggccgggtagtggcgcccactggtggcgggggcgggcaaggctcagcaccaccgccagcaggcacagcaccaggaggtagtggtactggtcgattcggagcgctccgccccactcgaagacagcgtaggcgagcaccaatcccattgtggataaagcgccgatgtccgctattcttagagactctcgcgttggcttttcggggtgggactggaggcgcatggactggattgggagcatcaccgtaccgctaataggctagaaagtaaacctgggtcatgggtgacaggtgacaggtgacaggtgacaggaaaggaggctgcgccctggcgcagtaggtgtcagcagacaggttagaggtcacaggtgacagtgaaggagcctcaagcaagctcataggggacaggggacagggaacgagtgtgcgccttgcggcgccataggtggcacgcgacccgggagggaagctgagccctgtgacctataacctattccctgtcctcctgttccctgttttccctgctgtaccctgtaacctataacctattccctgcctacttgttccctgtcttcctgtaccctgtgccctgtaacctattccctatttccccctcattgcggaacgctatggccccctcggagggtatggttcgcgacgctcatgccgaggagggcggacagcagccaccgggtgagcagaattcccaagaagtagatgatgcgatgttcgaaattgaaaccccgcaggaggacggttccccaagccgcgcccaaggtgctgcacgccgctaccaagagccacgatccgatccggaacttgttggacttccaacccggcacgtaggcgttcaggtgaaaatcctcggacttattgtctccgtcatctgcgatcggcaggagttcgatcctttcccaaaaataaatgcaccattggcgatacgcgccaacgagcacggcgatgagcaggcacattgcgcagcccacccaggaattattaggtaaggcaagaatcatttcgatctcctgtccggcgagcaggttataggtgacagccagaggttacaggttacaggtcacaggtgtcaggtgtcaggtgacagaaaaagaggctgcgccctgtccccctgtctttccgttccctgccttcctccgtcccctgtaccttgtgacctgtcacctgtaccctgttctctcttctctaccctatgacctgttccctgtaacctgttccctgtctttctgttccctgtctttctgttccctgtcttcctgttccctgtccactgtccactgttccctgtaacctgtccgctgtcttctcatattcgtgcgctgctcgatagggaaactatgcagcaggacggtggccaaagccgcgccctgcgaggccaaaggtgacagggaaagaggagagaataggcaataggtgacaggttacaggtgacagggaaagaggctgcgccctgcggcgccaaaggtgagcctgttccctgacgcctgacacctgttttcccctgttccctgtccacggtcctctgccttcgggttccctgtcttcccctgtcccctgtgacctgtaacctgtcacctctcttcctgctgtaccctgtcccctgtaacctatcccctgtcctgaccgctcagagccctacgctacagccattttgtccagcccgctcatgacaccttaagtctgatgaccaagctactcacccgttggagagtcagcccttccctggcgcgctgtagtggcggtctctgactgtcggagggtgttgtggcatggccaacttggggtagcgccctaattctgtgttggtcccctccctcttgacaaactgcgatcgcacgtagcatctttccagcagcgaaaaacaaggtaaggaccccgctgctgtcgaacttggacggaggggcggcgaagcgatcgctaggtgcggccctgcttatctcaagtggcttcagtcttagcggttgacccgtaagggaggaagaccgaagtctaaatagtgaaaacgtgtttgaaaatggcacctgactcactcgggatgttgaccgcgattttgatatccgttggcctaatcgtaagcggagtgcatcttcgtcgtgtacctaaacttaaaatcgtgggagcgctgctggctgtacttggcatcttcggactcatggcagctctgggcttcatcagggtttattaacagcactcaccacaatcttcatctctgccagaacctcttggccgatcagcacgcgcgttgagtgcctatattggtaaaagccatgaccagcgacgtatgccccaaatgcgagagtatgaatctcgccgactcccatcggcgaggttggatcgagcggtggattcttagcttttttggtatcgtgcccattcgctgcatggactgtaatacccgtttttactccttccgccgtcccctctactgactccttttttcttcggcactcggttcagctcgccaagttgcacagatttcctttcggccgtcaatgtaacttctcagccaatacccctggactgacttgacaaaaccccattggatgggttaatataggtttccggtagtctagccaaaaggggaggggctgccgatgcaaacaaatgcctccgttaattcgcgccggtgtgagcgcaaaatagcaacaattccaatcaaacttgtggtgaaggccgacctcttcaatgcagacgattcagctctcgcggtcgacatttctccgcgcggcgcctgtgttcgaaccaagctggagttagatccaggagagtgggtgggtgtcgttcccaagggaggatacccgtatgccatccccactcgcacgatttgggtgcgggaggatgagttcagccattggaccttcgcggggcttgagttcttaaacaccccggaaggttagaaaatgcactccatggcacacccttccagtgtttgattggaattccaaaaccccaccaacacacgtttaggacgctacctgcctccccgaaggggaggaatatcattagccgtaggtgaaacctacggaccgagacggcgacgaaaggaacctaattttccgcgtttcctttccgtgggtttcacctaaggctatgggcgacaggcagagggcacaggttacaggtgacaggccaagaggcagcgccgtccggcgcccaaggtcagcctgctgcctgacacctgatacctgacacctgttttcccctgttccctaacccctgttttcccttctttcccctgtaacctgtaacctgtcccctgccttgcggtggcagagccgctggggctcttgcgtgaggcggaagaaccactcgaggccgttctcctgcatccatgcttgcttggcagtcccggcgatgaagtcgaaggccgctcccaccccggccatcgccggcacgcctagccgtgagcggtgctcgaacatcgagcgttcctgtttgggagtgctcaagcctacccagacgacatccggcgccgccgcctggattcgtagctccacttccaccttttcttcctgggtcagcggccgaaagggtggcgagcaggtggctcctggttcgcgtctgctaagcagaggcgataaccgttcttgtggtcttcgggccttgcctttctcgcgtgccgggtgtataccttcatcgcgttaatcatttggtagacagccacccgacaatcgggccgccaggagcgcaacgggccgcccaccagcctcttgccaaggcaaggaggaagttatgagctataacctgctcgaagaaaactggattccagttctatggaaagacgggaatagcaatcgcgtgggcattactgaagctcttaggcaagcaggccggattcgtcaagtcgccgccagcaatcccatggaccgtttggccatcctgcgtttcctcctcgcgcttctctattggtgcaaggggaatccgccggacgatgaagactcggtctcttcgtttccctcggattggttcaggaaacttgatgacaataaggactgtttcaaccttctgggagatggcaagcggttctatcagtgcaatgccaagtctggaacagagggaaagctttccgccaactacctgatgcaagaggtgcccactggcacaaactcttggcacttccggcattcgacagataaagaggacggattatgtccggcgtgctgcgccgcggggttattgcgtttaccgctatttgctacgtcaggggggcgcggcaagccgccaggggtcaaccagaaaccgccggtttatgtcgtaccggtcggcggttcacttgcggaaaccctgcgtctctcctggcgcaaggtatcggacacggacttcggaacgccggcttgggaagagcccgatcttagccttcctcgacatggcaatgttccgctgcttgtgggattgacgtcgctgccccggcgcgtgtggctggacaatccgcaggaacccgacgccaactgcatctcgtgcggacgtaaagcgcctctaatacgccaatgtgtgtttgctggtgtcggcagcgcaaaaacggatgaaaatggcctgggccgcgtatggagcgacccgcacaccatcactgacggcgaggatgtcattaaacccagcaatgcccttggtgcaaccgacgcggcggctgggcaatgggcaaggatagcggcgggaattcttcgggagaaaaagcccaatggcaaaagaggcttgtgggtcgtcagctttgcgacggtgcagaacgacaagtacctggaagcgatggaatatgagattcctctcccgagcacgctagatgatcggcaggtcgcggagagtgtcgaaacgattgacatgtggcaaaaggagggccggaagcttgccggcaaagccaaaccgagagggacttcccgaagacatcttgaaattcctcccatggtcgccgcagttcgcccgcacgtagaagcaaaggtctccgggaaggtcggcgagttgatttcgcgaggccgcgatgcgtgggagcaggcagcccgggaatataggccgatgatggccgccgtcgccaaatcgctttccccgggctataccaccgctgcgctccggcggcgacgccagattgtcaatgtaaggccgaacatgcagccaggcaccccaccggccgggagggccggacggaagaagggaggcgacaaatgactccaacggagcaatacgtcgacgtcctgacacatctgaagtccggtgatctcggactcctgcgcgagcatgccgggcaagggctcgaccaatcggtcgatgcctttgacctcttcgcggggctctggtggccgttgcgggagaggaatcagcgcgcgccccgccgtgcggtggcgtggcttatcgcaaaactctatgccttccggccgatcgagcattcacccgggcagacgcttgcgtggcagcttgggcggtaccggaacgacaatgaccccgagaaagaccctgtcgcggaaaggttcgacaggatgctgaccttgccggttgatatactcgagccggccttgcaatggtcgcttaacctcatcgcctccaaaaacccgaagctcgactgggtgacgctgacaaacgatctttccatttgggaacgcgaaaccacccggctcaagtgggccgaggaattcttgaagtcttcgaaggaggaccgtcatgttaattgaaattcatgccattcaaaatcacagcccggccaacctgaaccgggacgacttgggcgctcccaagacctgctacttcggcggagtactgcgctcccgtatttccagtcagtgcctcaagcggagcatccgcatgagtgacgaattcaagcagttgctcggcggcgttcgcacacggcgactggcgcaattgatcgctccaggcggcccggataccgccgagtttaaaaaggcgatcgcggttttagaaatctgcggcatcgcggcaaaagagaagaaagggaagaaaggcgacgacgaggaatctacgcccgacgaaaaaagcgccggagtggtttatgtgagcaaacaagcggtcaacgagatgtctgagcttctgaaaaccaagtcggccaagaccgataacgagctcgccaaggaatttgcccagataatcgctcgccatacgagcaccccggacatggcactctgtggcagaatgctggaaccaaagaaagcgaaaaagcaggcgtcggaggaaggcggcgcgaagcccaagggcggcgacgtctggaagggacttgacacaaccgttgaggcggcgctgcaagttgcccacgcaatttctactcacgcggctcgcccggagattgactactatgtggccgctgatgatgtgcccggtgaagacgcgggagcaggctttgtagatgaagcaatgttcggctccgcctgcttctacaagtatttttcgattgacttcgaaaccctcatcaacaatctgaagggcaacaaggaactggccgctcatactgtcggcgcgttcatccggggagcggcgttggtgaatcccacgggcaaacagaatagtttcgccgcgcacaacccacccgacggaatgctggtcgaaatcagaaactcacctctcagctatgccaacgcttttgcccgaccagccatagcccagggcgaacgagacatcatatcccagagcgtcgcgcaactcggccagtacgttcacgatatcgacaccggatacggcaaaccaacgaggcggttctggttctcgcccaatcttcgctatcccttgaccgttacggagggggataaggaaaacgccttggccgaaaacaatatcaagtcgctcgaggaattgatcgaggcagtcatcaagggaatcggccatgattgggaggaggttcagaaagtggttgtgaactcggaggtggcctgatgagcgcaaataccctctttctccgcctcgaagccccccttcaggcatggggcgatcagcagtcgaagtttgtgattcggcggacggctgacgccccaaccaggtctggcgtcatggggatgctttgcgcggcgttgggcgtctcccgctcggcggcgccggaaggctggcttccaaggcttagccgcctgcgcatgggcgtccgcatcgatgtgccgggggtccgctggtgggattatcacacggtgggcgccgggatgccgatgcgcactgccgaaggtggaaccaagccaggggccgtgctgacccgccgcgaatacctttgcgacgcctcgtttctcgtcgcttttcagggagagtcggacctcattgccgaactggagtccgcaattaaagcgcccaaatggacgctctatctgggcagaaagtgctgccctccctcgcgccctttactggagcatccggggggtgaatttcctgacttgctttctgccctcaaatcggttccctggcgcaagaggttggagggagacgatcagcccgaagcgctggattgcctgcttgattggaagtcaaccgaagagcagccggaggctcccgatgatgcgctcgtctggtacgacgtgcccgtgaccttcgacccgccctcccaccagccccgatttgtcattcgcaagcaactgcgcgttggactcgacggcgaagtaacgcttgcaactcagccagcacagagctacacgccagcgcctccccgcccaagagcggattacactaataccgagtacagaatccgacgggaaaagcggctcgacgacgactatcacttgtgcgtcttttgcaagtcgcccgccaccaccgtccagcacatcacctatcgccgcgcgggtggcaatgaactcgcggatgacttgcgctctctctgtcgcctctgccacgatgccgtcaccatgatcgaatatggcctaggcatgggcatggaccgcatcaacccggaagagccgcgttggcgcgacttgattatccaaaagcggaacgaaatcatcacgttccgctccctggagactcgccgcaggcgcctggtcgccgaggaggtggagtagccatgtaccggtcctgccttttgattgacgtcgggagtaaccccgaccggcctcggcccggaaggctgtggcttcggaatctctatcacgtccaccagcgcctttggatggcgtttccctccgagaaccgaaaatcccatgatcgcgattttcttaagcctttcaaacccgcggactttggcgagaagccggttcaggtagaacgcggggcgggttccggctttctttttcgcattgagccgcagcccgccgggcgggtcgtgattctcgtccagtccaactccgccgtgaagccggattgggactacgccttccacaacgcccgttttcttttgaatcctctggctgctcccccgcaggtagaggaattcgaccctcgcttcgccaagggccaacagcttcggttccgcatccgcatcaatctaagcaagaagttaaaaacgagcgcaaagggcgtcgatcttaccaaggcgggcgagggaacagatcgccaaggccgcccgaaggcccaaagcaaacgcgtagcgctgacctgggataaggaccagaaccccgacgatgtgatacgaaaatggttcgccgccaagggcgaccaaggtggcttccaggtggaaactttccgcgtcttgcaaatcgggtggggcgcaggaaaccgatcggacccgaggccggcgggcgatcgcatgaaatttcgctcagccttattggaggggacgcttacggttaaagacgcggatagcttcagagaaaccatcgtgggcggcatcgggcacggcaaagccttcggcttcgggcttctttccgtagcccctcgcacaccactcccggcagaggcaacgtgagagttctgacgccaaagcgagccccgaagcagcgcgccgagatcgcccgccgcatgtttgtgcagcgctttcccggtgtggatgtgcaggcgtattccgtcaccgaattgcggggaatggagggcttgcgcgtgcccgccaaatacgcggaactcggcgagcagtacggagtcacctggaaggggcgcaactacgacaaatccaactggaatctggcggacaacatcaatcgcgccctctcgacggccaatgccagcctttacgccttgtgcgccgccgtactctgctcgctgggttacctgccgtctctgggattcgttcacgacgccggcacgttgccctttatctatgatgtggcggacctgtacaaggaaataaccagtttcccggcagcctttcagtccatgcgccaggaccccaatgacaaaggcgacctggtccgcacgctgctgaaggaacgcgtcgag

SEQ ID NO: 611 - DNA, 12244 bp, Artificial Sequence
  Synthetic Oligonucleotide
aggtggacaactggccgtcggaaaggccgtcaagagccgtgcgggcggatcggatagacctgttgacagaccgagcgctggtcggccgcccagcctggtttcttactgtctgaatcgcagtattcgaaatcgaacaccctggtcggtggtcaagccctctgttcggatggacgcctgcaagcggtaagggcccggcgtcacaaaagcgagctgggatgcggccgcgaagtcgagattctgcgtccccgcgaagctgatgcgaagcgagcacttccctgccccggcggtcgcgcagtcacgggcgacttcaacgccctgagcgtgtccgaagttccaatcgaacggtgatggcgtgggctcgaattggaagtttccattaaagaggtcgttcgacttccggtagtcgcccgcgcgcgcgcccaggtgctgcgcccatgcggacaccgccgcttcgggatggccttgctgcacgagaaaaccggcatactcccctgccgtactatcatcgttatacccatgtcgagcgatccaatcccaagtgcgttgcgcatcatccaggcgcccggcttgcatcaggtattggagccaggattgtaccgcccgccgatcttccggaaggccgtacagcaaaacatcatcagcgtgatctaccaggcgcgtgtactcgctgaagatgatcgaatcgtaatccggagtgagcgtcaggatacgcgccgtggcggggagggcttggtggttctcgccgacttggaaatagaagttcgccgcgcgcaggagaaggggcgcagaccgcggggcgagggccagcacctggccgaagcactcgcgcgcctctcccttctgtccggcatcgagaaacgcctccccgaggtcggcccatcgatagggattttgcgggtctcgctggagaacctcgcggaataggacaatggccttttggacgtcctcttcgctcatccccgtcaattgctaccgcgctcgcaactccaagggcgcgttggtgcaaacaaagatgcggcacagaacgcggtcaacctccgcgttgttctgccccaacgtctccgagagaatgcccgcctcgcagtaggcagccaaaaccaccccgaggatgaacgtcagcactttcaatccagcacactctcccgacgacggaccttttcgaaagcccgctgatgtaacggcgaatttacctagccatatggcggcgcaaagccgcctctacatcaatctgacccactgccgaacattacagccacatgccgggacggccctaatcgcaatgcggatgatccggtgggcaatgaaggctacgcgggggtggcggcggcggaggtggaggtgggaagggtggccgcggtggcgagggcggtcggggtgggtcgtgcggccgtggaggatttccgcctctggcaagtggggtggcgggctgagccgaagctggccccgcggcggagttccgcgccaccggatgaactagcgggaccaagctcactcgcgagccttccgccggcttcaagtcgaccgacccagacagaacgcgcagcgccactgaagagctgcccgcctccagcttgacccgcgaattcggatcgagcgtggcgcggctccggtcggccaaatagatcatggccgacgaacccgcggtggcgatctcgtcgcccgccaccaccggcaaggatgatacggcggttgccagcgcggccttgccgttgagcgtcagcgcccccgaactggtgaccctgcccaccggatcggcggccatcaggactacggtcgtcatcatgacgataagcagacgcaaatatttcacggctacctcctgtgattgctgattggcgatgggcgatgggaaaacgggtatggcgacgtcctctgtcgtcaatcgccagtcggaaataggccattcccgagccccgcggacattcccgcaacccacgccaggagcatggcattggccggaatatagaagttgaaatccgccaggctatgcaccagaatcgcggccagcgcacccgcgcacgccacggcaagataccgcgcccccgggtctcgcgatccgacggctttccgcaccgccgtcctcaccacgaagaacgccagcgcggccacgatggcgaaacccaccagccccagttccgccagcaactgaaggtaatcgttatgcgcgaaatcgtccgtgacgagcggcgaggaaaccttgaatcttaagaacgctgtctcatatccgcccagcccgcacccgaagacggggtaagctctgatcaacggaatcgtctcggcccaaagctgcgcgcggccttctccggtgggatcggtcgaaacgagctggacgaatcgcgcgatcagcttgtccggcggcagaaacacgaagcccgccagcaccagtgcggcgaccaggccgaccgtggctgtttgccgtttccgggagcgcgcggcccagctcagttgccgggttccgagtgccagcgcccccatcacgaacagggaagcaagtgtcgcgaagaaccccatccgtgaaaaggaaaagacgattgcggcaaacatcaatcccgccagcgcccacacgccgcaagcccccagcgccggagtcaccgccgagtgccctcgcgagcgcgtgcgccgccaaagcgccacggggtacaccactgcgaacggcagcgccatctccaggaagcctgcgtagtggttatggttgacgtacgtcccccaccggagttggtccacgcctcggccgaagttctgcgagaggcccagaccggcttccagagcgccgatggcgacgatgggccacatcgccagccagcggttatccgcaaatcgccaagtcagctcgcgcaccagcaggaagatgatcacgtacccgcagacgagcaggaaaaattgaaaagtcgcgatgggtgaaacgctcaggggtacaaagttggctgggcgtccgatgagtgctgctggaggcatcgccgcggtgcgggcgggtgacagcacgcgcaccaggtacaccggcagcggcaccacctgcatcaggatgtagacgggcaagagagccagggtccagcgcaccacgcggccgggtagtggcgcccactggtggcgggggcgggcaaggctcagcaccaccgccagcaggcacagcaccaggaggtagtggtactggtcgattcggagcgctccgccccactcgaagacagcgtaggcgagcaccaatcccattgtggataaagcgccgatgtccgctattcttagagactctcgcgttggcttttcggggtgggactggaggcgcatggactggattgggagcatcaccgtaccgctaataggctagaaagtaaacctgggtcatgggtgacaggtgacaggtgacaggtgacaggaaaggaggctgcgccctggcgcagtaggtgtcagcagacaggttagaggtcacaggtgacagtgaaggagcctcaagcaagctcataggggacaggggacagggaacgagtgtgcgccttgcggcgccataggtggcacgcgacccgggagggaagctgagccctgtgacctataacctattccctgtcctcctgttccctgttttccctgctgtaccctgtaacctataacctattccctgcctacttgttccctgtcttcctgtaccctgtgccctgtaacctattccctatttccccctcattgcggaacgctatggccccctcggagggtatggttcgcgacgctcatgccgaggagggcggacagcagccaccgggtgagcagaattcccaagaagtagatgatgcgatgttcgaaattgaaaccccgcaggaggacggttccccaagccgcgcccaaggtgctgcacgccgctaccaagagccacgatccgatccggaacttgttggacttccaacccggcacgtaggcgttcaggtgaaaatcctcggacttattgtctccgtcatctgcgatcggcaggagttcgatcctttcccaaaaataaatgcaccattggcgatacgcgccaacgagcacggcgatgagcaggcacattgcgcagcccacccaggaattattaggtaaggcaagaatcatttcgatctcctgtccggcgagcaggttataggtgacagccagaggttacaggttacaggtcacaggtgtcaggtgtcaggtgacagaaaaagaggctgcgccctgtccccctgtctttccgttccctgccttcctccgtcccctgtaccttgtgacctgtcacctgtaccctgttctctcttctctaccctatgacctgttccctgtaacctgttccctgtctttctgttccctgtctttctgttccctgtctttctgttccctgtctttctgttccctgtcttcctgttccctgtccactgtccactgttccctgtaacctgtccgctgtcttctcatattcgtgcgctgctcgatagggaaactatgcagcaggacggtggccaaagccgcgccctgcgaggccaaaggtgacagggaaagaggagagaataggcaataggtgacaggttacaggtgacagggaaagaggctgcgccctgcggcgccaaaggtgagcctgttccctgacgcctgacacctgttttcccctgttccctgtccacggtcctctgccttcgggttccctgtcttcccctgtcccctgtgacctgtaacctgtcacctctcttcctgctgtaccctgtcccctgtaacctatcccctgtcctgaccgctcagagccctacgctacagccattttgtccagcccgctcatgacaccttaagtctgatgaccaagctactcacccgttggagagtcagcccttccctggcgcgctgtagtggcggtctctgactgtcggagggtgttgtggcatggccaacttggggtagcgccctaattctgtgttggtcccctccctcttgacaaactgcgatcgcacgtagcatctttccagcagcgaaaaacaaggtaaggaccccgctgctgtcgaacttggacggaggggcggcgaagcgatcgctaggtgcggccctgcttatctcaagtggcttcagtcttagcggttgacccgtaagggaggaagaccgaagtctaaatagtgaaaacgtgtttgaaaatggcacctgactcactcgggatgttgaccgcgattttgatatccgttggcctaatcgtaagcggagtgcatcttcgtcgtgtacctaaacttaaaatcgtgggagcgctgctggctgtacttggcatcttcggactcatggcagctctgggcttcatcagggtttattaacagcactcaccacaatcttcatctctgccagaacctcttggccgatcagcacgcgcgttgagtgcctatattggtaaaagccatgaccagcgacgtatgccccaaatgcgagagtatgaatctcgccgactcccatcggcgaggttggatcgagcggtggattcttagcttttttggtatcgtgcccattcgctgcatggactgtaatacccgtttttactccttccgccgtcccctctactgactccttttttcttcggcactcggttcagctcgccaagttgcacagatttcctttcggccgtcaatgtaacttctcagccaatacccctggactgacttgacaaaaccccattggatgggttaatataggtttccggtagtctagccaaaaggggaggggctgccgatgcaaacaaatgcctccgttaattcgcgccggtgtgagcgcaaaatagcaacaattccaatcaaacttgtggtgaaggccgacctcttcaatgcagacgattcagctctcgcggtcgacatttctccgcgcggcgcctgtgttcgaaccaagctggagttagatccaggagagtgggtgggtgtcgttcccaagggaggatacccgtatgccatccccactcgcacgatttgggtgcgggaggatgagttcagccattggaccttcgcggggcttgagttcttaaacaccccggaaggttagaaaatgcactccatggcacacccttccagtgtttgattggaattccaaaaccccaccaacacacgtttaggacgctacctgcctccccgaaggggaggaatatcattagccgtaggtgaaacctacggaccgagacggcgacgaaaggaacctaattttccgcgtttcctttccgtgggtttcacctaaggctatgggcgacaggcagagggcacaggttacaggtgacaggccaagaggcagcgccgtccggcgcccaaggtcagcctgctgcctgacacctgatacctgacacctgttttcccctgttccctaacccctgttttcccttctttcccctgtaacctgtaacctgtcccctgccttgcggtggcagagccgctggggctcttgcgtgaggcggaagaaccactcgaggccgttctcctgcatccatgcttgcttggcagtcccggcgatgaagtcgaaggccgctcccaccccggccatcgccggcacgcctagccgtgagcggtgctcgaacatcgagcgttcctgtttgggagtgctcaagcctacccagacgacatccggcgccgccgcctggattcgtagctccacttccaccttttcttcctgggtcagcggccgaaagggtggcgagcaggtggctcctggttcgcgtctgctaagcagaggcgataaccgttcttgtggtcttcgggccttgcctttctcgcgtgccgggtgtataccttcatcgcgttaatcatttggtagacagccacccgacaatcgggccgccaggagcgcaacgggccgcccaccagcctcttgccaaggcaaggaggaagttatgagctataacctgctcgaagaaaactggattccagttctatggaaagacgggaatagcaatcgcgtgggcattactgaagctcttaggcaagcaggccggattcgtcaagtcgccgccagcaatcccatggaccgtttggccatcctgcgtttcctcctcgcgcttctctattggtgcaaggggaatccgccggacgatgaagactcggtctcttcgtttccctcggattggttcaggaaacttgatgacaataaggactgtttcaaccttctgggagatggcaagcggttctatcagtgcaatgccaagtctggaacagagggaaagctttccgccaactacctgatgcaagaggtgcccactggcacaaactcttggcacttccggcattcgacagataaagaggacggattatgtccggcgtgctgcgccgcggggttattgcgtttaccgctatttgctacgtcaggggggcgcggcaagccgccaggggtcaaccagaaaccgccggtttatgtcgtaccggtcggcggttcacttgcggaaaccctgcgtctctcctggcgcaaggtatcggacacggacttcggaacgccggcttgggaagagcccgatcttagccttcctcgacatggcaatgttccgctgcttgtgggattgacgtcgctgccccggcgcgtgtggctggacaatccgcaggaacccgacgccaactgcatctcgtgcggacgtaaagcgcctctaatacgccaatgtgtgtttgctggtgtcggcagcgcaaaaacggatgaaaatggcctgggccgcgtatggagcgacccgcacaccatcactgacggcgaggatgtcattaaacccagcaatgcccttggtgcaaccgacgcggcggctgggcaatgggcaaggatagcggcgggaattcttcgggagaaaaagcccaatggcaaaagaggcttgtgggtcgtcagctttgcgacggtgcagaacgacaagtacctggaagcgatggaatatgagattcctctcccgagcacgctagatgatcggcaggtcgcggagagtgtcgaaacgattgacatgtggcaaaaggagggccggaagcttgccggcaaagccaaaccgagagggacttcccgaagacatcttgaaattcctcccatggtcgccgcagttcgcccgcacgtagaagcaaaggtctccgggaaggtcggcgagttgatttcgcgaggccgcgatgcgtgggagcaggcagcccgggaatataggccgatgatggccgccgtcgccaaatcgctttccccgggctataccaccgctgcgctccggcggcgacgccagattgtcaatgtaaggccgaacatgcagccaggcaccccaccggccgggagggccggacggaagaagggaggcgacaaatgactccaacggagcaatacgtcgacgtcctgacacatctgaagtccggtgatctcggactcctgcgcgagcatgccgggcaagggctcgaccaatcggtcgatgcctttgacctcttcgcggggctctggtggccgttgcgggagaggaatcagcgcgcgccccgccgtgcggtggcgtggcttatcgcaaaactctatgccttccggccgatcgagcattcacccgggcagacgcttgcgtggcagcttgggcggtaccggaacgacaatgaccccgagaaagaccctgtcgcggaaaggttcgacaggatgctgaccttgccggttgatatactcgagccggccttgcaatggtcgcttaacctcatcgcctccaaaaacccgaagctcgactgggtgacgctgacaaacgatctttccatttgggaacgcgaaaccacccggctcaagtgggccgaggaattcttgaagtcttcgaaggaggaccgtcatgttaattgaaattcatgccattcaaaatcacagcccggccaacctgaaccgggacgacttgggcgctcccaagacctgctacttcggcggagtactgcgctcccgtatttccagtcagtgcctcaagcggagcatccgcatgagtgacgaattcaagcagttgctcggcggcgttcgcacacggcgactggcgcaattgatcgctccaggcggcccggataccgccgagtttaaaaaggcgatcgcggttttagaaatctgcggcatcgcggcaaaagagaagaaagggaagaaaggcgacgacgaggaatctacgcccgacgaaaaaagcgccggagtggtttatgtgagcaaacaagcggtcaacgagatgtctgagcttctgaaaaccaagtcggccaagaccgataacgagctcgccaaggaatttgcccagataatcgctcgccatacgagcaccccggacatggcactctgtggcagaatgctggaaccaaagaaagcgaaaaagcaggcgtcggaggaaggcggcgcgaagcccaagggcggcgacgtctggaagggacttgacacaaccgttgaggcggcgctgcaagttgcccacgcaatttctactcacgcggctcgcccggagattgactactatgtggccgctgatgatgtgcccggtgaagacgcgggagcaggctttgtagatgaagcaatgttcggctccgcctgcttctacaagtatttttcgattgacttcgaaaccctcatcaacaatctgaagggcaacaaggaactggccgctcatactgtcggcgcgttcatccggggagcggcgttggtgaatcccacgggcaaacagaatagtttcgccgcgcacaacccacccgacggaatgctggtcgaaatcagaaactcacctctcagctatgccaacgcttttgcccgaccagccatagcccagggcgaacgagacatcatatcccagagcgtcgcgcaactcggccagtacgttcacgatatcgacaccggatacggcaaaccaacgaggcggttctggttctcgcccaatcttcgctatcccttgaccgttacggagggggataaggaaaacgccttggccgaaaacaatatcaagtcgctcgaggaattgatcgaggcagtcatcaagggaatcggccatgattgggaggaggttcagaaagtggttgtgaactcggaggtggcctgatgagcgcaaataccctctttctccgcctcgaagccccccttcaggcatggggcgatcagcagtcgaagtttgtgattcggcggacggctgacgccccaaccaggtctggcgtcatggggatgctttgcgcggcgttgggcgtctcccgctcggcggcgccggaaggctggcttccaaggcttagccgcctgcgcatgggcgtccgcatcgatgtgccgggggtccgctggtgggattatcacacggtgggcgccgggatgccgatgcgcactgccgaaggtggaaccaagccaggggccgtgctgacccgccgcgaatacctttgcgacgcctcgtttctcgtcgcttttcagggagagtcggacctcattgccgaactggagtccgcaattaaagcgcccaaatggacgctctatctgggcagaaagtgctgccctccctcgcgccctttactggagcatccggggggtgaatttcctgacttgctttctgccctcaaatcggttccctggcgcaagaggttggagggagacgatcagcccgaagcgctggattgcctgcttgattggaagtcaaccgaagagcagccggaggctcccgatgatgcgctcgtctggtacgacgtgcccgtgaccttcgacccgccctcccaccagccccgatttgtcattcgcaagcaactgcgcgttggactcgacggcgaagtaacgcttgcaactcagccagcacagagctacacgccagcgcctccccgcccaagagcggattacactaataccgagtacagaatccgacgggaaaagcggctcgacgacgactatcacttgtgcgtcttttgcaagtcgcccgccaccaccgtccagcacatcacctatcgccgcgcgggtggcaatgaactcgcggatgacttgcgctctctctgtcgcctctgccacgatgccgtcaccatgatcgaatatggcctaggcatgggcatggaccgcatcaacccggaagagccgcgttggcgcgacttgattatccaaaagcggaacgaaatcatcacgttccgctccctggagactcgccgcaggcgcctggtcgccgaggaggtggagtagccatgtaccggtcctgccttttgattgacgtcgggagtaaccccgaccggcctcggcccggaaggctgtggcttcggaatctctatcacgtccaccagcgcctttggatggcgtttccctccgagaaccgaaaatcccatgatcgcgattttcttaagcctttcaaacccgcggactttggcgagaagccggttcaggtagaacgcggggcgggttccggctttctttttcgcattgagccgcagcccgccgggcgggtcgtgattctcgtccagtccaactccgccgtgaagccggattgggactacgccttccacaacgcccgttttcttttgaatcctctggctgctcccccgcaggtagaggaattcgaccctcgcttcgccaagggccaacagcttcggttccgcatccgcatcaatctaagcaagaagttaaaaacgagcgcaaagggcgtcgatcttaccaaggcgggcgagggaacagatcgccaaggccgcccgaaggcccaaagcaaacgcgtagcgctgacctgggataaggaccagaaccccgacgatgtgatacgaaaatggttcgccgccaagggcgaccaaggtggcttccaggtggaaactttccgcgtcttgcaaatcgggtggggcgcaggaaaccgatcggacccgaggccggcgggcgatcgcatgaaatttcgctcagccttattggaggggacgcttacggttaaagacgcggatagcttcagagaaaccatcgtgggcggcatcgggcacggcaaagccttcggcttcgggcttctttccgtagcccctcgcacaccactcccggcagaggcaacgtgagagttctgacgccaaagcgagccccgaagcagcgcgccgagatcgcccgccgcatgtttgtgcagcgctttcccggtgtggatgtgcaggcgtattccgtcaccgaattgcggggaatggagggcttgcgcgtgcccgccaaatacgcggaactcggcgagcagtacggagtcacctggaaggggcgcaactacgacaaatccaactggaatctggcggacaacatcaatcgcgccctctcgacggccaatgccagcctttacgccttgtgcgccgccgtactctgctcgctgggttacctgccgtctctgggattcgttcacgacgccggcacg

SEQ ID NO: 612 - DNA, 12196 bp, Artificial Sequence
  Synthetic Oligonucleotide
aggtggacaactggccgtcggaaaggccgtcaagagccgtgcgggcggatcggatagacctgttgacagaccgagcgctggtcggccgcccagcctggtttcttactgtctgaatcgcagtattcgaaatcgaacaccctggtcggtggtcaagccctctgttcggatggacgcctgcaagcggtaagggcccggcgtcacaaaagcgagctgggatgcggccgcgaagtcgagattctgcgtccccgcgaagctgatgcgaagcgagcacttccctgccccggcggtcgcgcagtcacgggcgacttcaacgccctgagcgtgtccgaagttccaatcgaacggtgatggcgtgggctcgaattggaagtttccattaaagaggtcgttcgacttccggtagtcgcccgcgcgcgcgcccaggtgctgcgcccatgcggacaccgccgcttcgggatggccttgctgcacgagaaaaccggcatactcccctgccgtactatcatcgttatacccatgtcgagcgatccaatcccaagtgcgttgcgcatcatccaggcgcccggcttgcatcaggtattggagccaggattgtaccgcccgccgatcttccggaaggccgtacagcaaaacatcatcagcgtgatctaccaggcgcgtgtactcgctgaagatgatcgaatcgtaatccggagtgagcgtcaggatacgcgccgtggcggggagggcttggtggttctcgccgacttggaaatagaagttcgccgcgcgcaggagaaggggcgcagaccgcggggcgagggccagcacctggccgaagcactcgcgcgcctctcccttctgtccggcatcgagaaacgcctccccgaggtcggcccatcgatagggattttgcgggtctcgctggagaacctcgcggaataggacaatggccttttggacgtcctcttcgctcatccccgtcaattgctaccgcgctcgcaactccaagggcgcgttggtgcaaacaaagatgcggcacagaacgcggtcaacctccgcgttgttctgccccaacgtctccgagagaatgcccgcctcgcagtaggcagccaaaaccaccccgaggatgaacgtcagcactttcaatccagcacactctcccgacgacggaccttttcgaaagcccgctgatgtaacggcgaatttacctagccatatggcggcgcaaagccgcctctacatcaatctgacccactgccgaacattacagccacatgccgggacggccctaatcgcaatgcggatgatccggtgggcaatgaaggctacgcgggggtggcggcggcggaggtggaggtgggaagggtggccgcggtggcgagggcggtcggggtgggtcgtgcggccgtggaggatttccgcctctggcaagtggggtggcgggctgagccgaagctggccccgcggcggagttccgcgccaccggatgaactagcgggaccaagctcactcgcgagccttccgccggcttcaagtcgaccgacccagacagaacgcgcagcgccactgaagagctgcccgcctccagcttgacccgcgaattcggatcgagcgtggcgcggctccggtcggccaaatagatcatggccgacgaacccgcggtggcgatctcgtcgcccgccaccaccggcaaggatgatacggcggttgccagcgcggccttgccgttgagcgtcagcgcccccgaactggtgaccctgcccaccggatcggcggccatcaggactacggtcgtcatcatgacgataagcagacgcaaatatttcacggctacctcctgtgattgctgattggcgatgggcgatgggaaaacgggtatggcgacgtcctctgtcgtcaatcgccagtcggaaataggccattcccgagccccgcggacattcccgcaacccacgccaggagcatggcattggccggaatatagaagttgaaatccgccaggctatgcaccagaatcgcggccagcgcacccgcgcacgccacggcaagataccgcgcccccgggtctcgcgatccgacggctttccgcaccgccgtcctcaccacggagaacgccagcgcggccacgatggcgaaacccaccagccccagttccgccagcaactgaaggtaatcgttatgcgcgaaatcgtccgtgacgagcggcgaggaaaccttgaatcttaagaacgctgtctcatatccgcccagcccgcacccgaagacggggtaagctctgatcaacggaatcgtctcggcccaaagctgcgcgcggccttctccggtgggatcggtcgaaacgagctggacgaatcgcgcgatcagcttgtccggcggcagaaacacgaagcccgccagcaccagtgcggcgaccaggccgaccgtggctgtttgccgtttccgggagcgcgcggcccagctcagttgccgggttccgagtgccagcgcccccatcacgaacagggaagcaagtgtcgcgaagaaccccatccgtgaaaaggaaaagacgattgcggcaaacatcaatcccgccagcgcccacacgccgcaagcccccagcgccggagtcaccgccgagtgccctcgcgagcgcgtgcgccgccaaagcgccacggggtacaccactgcgaacggcagcgccatctccaggaagcctgcgtagtggttatggttgacgtacgtcccccaccggagttggtccacgcctcggccgaagttctgcgagaggcccagaccggcttccagagcgccgatggcgacgatgggccacatcgccagccagcggttatccgcaaatcgccaagtcagctcgcgcaccagcaggaagatgatcacgtacccgcagacgagcaggaaaaattgaaaagtcgcgatgggtgaaacgctcaggggtacaaagttggctgggcgtccgatgagtgctgctggaggcatcgccgcggtgcgggcgggtgacagcacgcgcaccaggtacaccggcagcggcaccacctgcatcaggatgtagacgggcaagagagccagggtccagcgcaccacgcggccgggtagtggcgcccactggtggcgggggcgggcaaggctcagcaccaccgccagcaggcacagcaccaggaggtagtggtactggtcgattcggagcgctccgccccactcgaagacagcgtaggcgagcaccaatcccattgtggataaagcgccgatgtccgctattcttagagactctcgcgttggcttttcggggtgggactggaggcgcatggactggattgggagcatcaccgtaccgctaataggctagaaagtaaacctgggtcatgggtgacaggtgacaggtgacaggtgacaggaaaggaggctgcgccctggcgcagtaggtgtcagcagacaggttagaggtcacaggtgacagtgaaggagcctcaagcaagctcataggggacaggggacagggaacgagtgtgcgccttgcggcgccataggtggcacgcgacccgggagggaagctgagccctgtgacctataacctattccctgtcctcctgttccctgttttccctgctgtaccctgtaacctataacctattccctgcctacttgttccctgtcttcctgtaccctgtgccctgtaacctattccctatttccccctcattgcggaacgctatggccccctcggagggtatggttcgcgacgctcatgccgaggagggcggacagcagccaccgggtgagcagaattcccaagaagtagatgatgcgatgttcgaaattgaaaccccgcaggaggacggttccccaagccgcgcccaaggtgctgcacgccgctaccaagagccacgatccgatccggaacttgttggacttccaacccggcacgtaggcgttcaggtgaaaatcctcggacttattgtctccgtcatctgcgatcggcaggagttcgatcctttcccaaaaataaatgcaccattggcgatacgcgccaacgagcacggcgatgagcaggcacattgcgcagcccacccaggaattattaggtaaggcaagaatcatttcgatctcctgtccggcgagcaggttataggtgacagccagaggttacaggttacaggtcacaggtgtcaggtgtcaggtgacagaaaaagaggctgcgccctgtccccctgtctttccgttccctgccttcctccgtcccctgtaccttgtgacctgtcacctgtaccctgttctctcttctctaccctatgacctgttccctgtaacctgttccctgtctttctgttccctgtctttctgttccctgtctttctgttccctgtctttctgttccctgtcttcctgttccctgtccactgtccactgttccctgtaacctgtccgctgtcttctcatattcgtgcgctgctcgatagggaaactatgcagcaggacggtggccaaagccgcgccctgcgaggccaaaggtgacagggaaagaggagagaataggcaataggtgacaggttacaggtgacagggaaagaggctgcgccctgcggcgccaaaggtgagcctgttccctgacgcctgacacctgttttcccctgttccctgtccacggtcctctgccttcgggttccctgtcttcccctgtcccctgtgacctgtaacctgtcacctctcttcctgctgtaccctgtcccctgtaacctatcccctgtcctgaccgctcagagccctacgctacagccattttgtccagcccgctcatgacaccttaagtctgatgaccaagctactcacccgttggagagtcagcccttccctggcgcgctgtagtggcggtctctgactgtcggagggtgttgtggcatggccaacttggggtagcgccctaattctgtgttggtcccctccctcttgacaaactgcgatcgcacgtagcatctttccagcagcgaaaaacaaggtaaggaccccgctgctgtcgaacttggacggaggggcggcgaagcgatcgctaggtgcggccctgcttatctcaagtggcttcagtcttagcggttgacccgtaagggaggaagaccgaagtctaaatagtgaaaacgtgtttgaaaatggcacctgactcactcgggatgttgaccgcgattttgatatccgttggcctaatcgtaagcggagtgcatcttcgtcgtgtacctaaacttaaaatcgtgggagcgctgctggctgtacttggcatcttcggactcatggcagctctgggcttcatcagggtttattaacagcactcaccacaatcttcatctctgccagaacctcttggccgatcagcacgcgcgttgagtgcctatattggtaaaagccatgaccagcgacgtatgccccaaatgcgagagtatgaatctcgccgactcccatcggcgaggttggatcgagcggtggattcttagcttttttggtatcgtgcccattcgctgcatggactgtaatacccgtttttactccttccgccgtcccctctactgactccttttttcttcggcactcggttcagctcgccaagttgcacagatttcctttcggccgtcaatgtaacttctcagccaatacccctggactgacttgacaaaaccccattggatgggttaatataggtttccggtagtctagccaaaaggggaggggctgccgatgcaaacaaatgcctccgttaattcgcgccggtgtgagcgcaaaatagcaacaattccaatcaaacttgtggtgaaggccgacctcttcaatgcagacgattcagctctcgcggtcgacatttctccgcgcggcgcctgtgttcgaaccaagctggagttagatccaggagagtgggtgggtgtcgttcccaagggaggatacccgtatgccatccccactcgcacgatttgggtgcgggaggatgagttcagccattggaccttcgcggggcttgagttcttaaacaccccggaaggttagaaaatgcactccatggcacacccttccagtgtttgattggaattccaaaaccccaccaacacacgtttaggacgctacctgcctccccgaaggggaggaatatcattagccgtaggtgaaacctacggaccgagacggcgacgaaaggaacctaattttccgcgtttcctttccgtgggtttcacctaaggctatgggcgacaggcagagggcacaggttacaggtgacaggccaagaggcagcgccgtccggcgcccaaggtcagcctgctgcctgacacctgatacctgacacctgttttcccctgttccctaacccctgttttcccttctttcccctgtaacctgtaacctgtcccctgccttgcggtggcagagccgctggggctcttgcgtgaggcggaagaaccactcgaggccgttctcctgcatccatgcttgcttggcagtcccggcgatgaagtcgaaggccgctcccaccccggccatcgccggcacgcctagccgtgagcggtgctcgaacatcgagcgttcctgtttgggagtgctcaagcctacccagacgacatccggcgccgccgcctggattcgtagctccacttccaccttttcttcctgggtcagcggccgaaagggtggcgagcaggtggctcctggttcgcgtctgctaagcagaggcgataaccgttcttgtggtcttcgggccttgcctttctcgcgtgccgggtgtataccttcatcgcgttaatcatttggtagacagccacccgacaatcgggccgccaggagcgcaacgggccgcccaccagcctcttgccaaggcaaggaggaagttatgagctataacctgctcgaagaaaactggattccagttctatggaaagacgggaatagcaatcgcgtgggcattactgaagctcttaggcaagcaggccggattcgtcaagtcgccgccagcaatcccatggaccgtttggccatcctgcgtttcctcctcgcgcttctctattggtgcaaggggaatccgccggacgatgaagactcggtctcttcgtttccctcggattggttcaggaaacttgatgacaataaggactgtttcaaccttctgggagatggcaagcggttctatcagtgcaatgccaagtctggaacagagggaaagctttccgccaactacctgatgcaagaggtgcccactggcacaaactcttggcacttccggcattcgacagataaagaggacggattatgtccggcgtgctgcgccgcggggttattgcgtttaccgctatttgctacgtcaggggggcgcggcaagccgccaggggtcaaccagaaaccgccggtttatgtcgtaccggtcggcggttcacttgcggaaaccctgcgtctctcctggcgcaaggtatcggacacggacttcggaacgccggcttgggaagagcccgatcttagccttcctcgacatggcaatgttccgctgcttgtgggattgacgtcgctgccccggcgcgtgtggctggacaatccgcaggaacccgacgccaactgcatctcgtgcggacgtaaagcgcctctaatacgccaatgtgtgtttgctggtgtcggcagcgcaaaaacggatgaaaatggcctgggccgcgtatggagcgacccgcacaccatcactgacggcgaggatgtcattaaacccagcaatgcccttggtgcaaccgacgcggcggctgggcaatgggcaaggatagcggcgggaattcttcgggagaaaaagcccaatggcaaaagaggcttgtgggtcgtcagctttgcgacggtgcagaacgacaagtacctggaagcgatggaatatgagattcctctcccgagcacgctagatgatcggcaggtcgcggagagtgtcgaaacgattgacatgtggcaaaaggagggccggaagcttgccggcaaagccaaaccgagagggacttcccgaagacatcttgaaattcctcccatggtcgccgcagttcgcccgcacgtagaagcaaaggtctccgggaaggtcggcgagttgatttcgcgaggccgcgatgcgtgggagcaggcagcccgggaatataggccgatgatggccgccgtcgccaaatcgctttccccgggctataccaccgctgcgctccggcggcgacgccagattgtcaatgtaaggccgaacatgcagccaggcaccccaccggccgggagggccggacggaagaagggaggcgacaaatgactccaacggagcaatacgtcgacgtcctgacacatctgaagtccggtgatctcggactcctgcgcgagcatgccgggcaagggctcgaccaatcggtcgatgcctttgacctcttcgcggggctctggtggccgttgcgggagaggaatcagcgcgcgccccgccgtgcggtggcgtggcttatcgcaaaactctatgccttccggccgatcgagcattcacccgggcagacgcttgcgtggcagcttgggcggtaccggaacgacaatgaccccgagaaagaccctgtcgcggaaaggttcgacaggatgctgaccttgccggttgatatactcgagccggccttgcaatggtcgcttaacctcatcgcctccaaaaacccgaagctcgactgggtgacgctgacaaacgatctttccatttgggaacgcgaaaccacccggctcaagtgggccgaggaattcttgaagtcttcgaaggaggaccgtcatgttaattgaaattcatgccattcaaaatcacagcccggccaacctgaaccgggacgacttgggcgctcccaagacctgctacttcggcggagtactgcgctcccgtatttccagtcagtgcctcaagcggagcatccgcatgagtgacgaattcaagcagttgctcggcggcgttcgcacacggcgactggcgcaattgatcgctccaggcggcccggataccgccgagtttaaaaaggcgatcgcggttttagaaatctgcggcatcgcggcaaaagagaagaaagggaagaaaggcgacgacgaggaatctacgcccgacgaaaaaagcgccggagtggtttatgtgagcaaacaagcggtcaacgagatgtctgagcttctgaaaaccaagtcggccaagaccgataacgagctcgccaaggaatttgcccagataatcgctcgccatacgagcaccccggacatggcactctgtggcagaatgctggaaccaaagaaagcgaaaaagcaggcgtcggaggaaggcggcgcgaagcccaagggcggcgacgtctggaagggacttgacacaaccgttgaggcggcgctgcaagttgcccacgcaatttctactcacgcggctcgcccggagattgactactatgtggccgctgatgatgtgcccggtgaagacgcgggagcaggctttgtagatgaagcaatgttcggctccgcctgcttctacaagtatttttcgattgacttcgaaaccctcatcaacaatctgaagggcaacaaggaactggccgctcatactgtcggcgcgttcatccggggagcggcgttggtgaatcccacgggcaaacagaatagtttcgccgcgcacaacccacccgacggaatgctggtcgaaatcagaaactcacctctcagctatgccaacgcttttgcccgaccagccatagcccagggcgaacgagacatcatatcccagagcgtcgcgcaactcggccagtacgttcacgatatcgacaccggatacggcaaaccaacgaggcggttctggttctcgcccaatcttcgctatcccttgaccgttacggagggggataaggaaaacgccttggccgaaaacaatatcaagtcgctcgaggaattgatcgaggcagtcatcaagggaatcggccatgattgggaggaggttcagaaagtggttgtgaactcggaggtggcctgatgagcgcaaataccctctttctccgcctcgaagccccccttcaggcatggggcgatcagcagtcgaagtttgtgattcggcggacggctgacgccccaaccaggtctggcgtcatggggatgctttgcgcggcgttgggcgtctcccgctcggcggcgccggaaggctggcttccaaggcttagccgcctgcgcatgggcgtccgcatcgatgtgccgggggtccgctggtgggattatcacacggtgggcgccgggatgccgatgcgcactgccgaaggtggaaccaagccaggggccgtgctgacccgccgcgaatacctttgcgacgcctcgtttctcgtcgcttttcagggagagtcggacctcattgccgaactggagtccgcaattaaagcgcccaaatggacgctctatctgggcagaaagtgctgccctccctcgcgccctttactggagcatccggggggtgaatttcctgacttgctttctgccctcaaatcggttccctggcgcaagaggttggagggagacgatcagcccgaagcgctggattgcctgcttgattggaagtcaaccgaagagcagccggaggctcccgatgatgcgctcgtctggtacgacgtgcccgtgaccttcgacccgccctcccaccagccccgatttgtcattcgcaagcaactgcgcgttggactcgacggcgaagtaacgcttgcaactcagccagcacagagctacacgccagcgcctccccgcccaagagcggattacactaataccgagtacagaatccgacgggaaaagcggctcgacgacgactatcacttgtgcgtcttttgcaagtcgcccgccaccaccgtccagcacatcacctatcgccgcgcgggtggcaatgaactcgcggatgacttgcgctctctctgtcgcctctgccacgatgccgtcaccatgatcgaatatggcctaggcatgggcatggaccgcatcaacccggaagagccgcgttggcgcgacttgattatccaaaagcggaacgaaatcatcacgttccgctccctggagactcgccgcaggcgcctggtcgccgaggaggtggagtagccatgtaccggtcctgccttttgattgacgtcgggagtaaccccgaccggcctcggcccggaaggctgtggcttcggaatctctatcacgtccaccagcgcctttggatggcgtttccctccgagaaccgaaaatcccatgatcgcgattttcttaagcctttcaaacccgcggactttggcgagaagccggttcaggtagaacgcggggcgggttccggctttctttttcgcattgagccgcagcccgccgggcgggtcgtgattctcgtccagtccaactccgccgtgaagccggattgggactacgccttccacaacgcccgttttcttttgaatcctctggctgctcccccgcaggtagaggaattcgaccctcgcttcgccaagggccaacagcttcggttccgcatccgcatcaatctaagcaagaagttaaaaacgagcgcaaagggcgtcgatcttaccaaggcgggcgagggaacagatcgccaaggccgcccgaaggcccaaagcaaacgcgtagcgctgacctgggataaggaccagaaccccgacgatgtgatacgaaaatggttcgccgccaagggcgaccaaggtggcttccaggtggaaactttccgcgtcttgcaaatcgggtggggcgcaggaaaccgatcggacccgaggccggcgggcgatcgcatgaaatttcgctcagccttattggaggggacgcttacggttaaagacgcggatagcttcagagaaaccatcgtgggcggcatcgggcacggcaaagccttcggcttcgggcttctttccgtagcccctcgcacaccactcccggcagaggcaacgtgagagttctgacgccaaagcgagccccgaagcagcgcgccgagatcgcccgccgcatgtttgtgcagcgctttcccggtgtggatgtgcaggcgtattccgtcaccgaattgcggggaatggagggcttgcgcgtgcccgccaaatacgcggaactcggcgagcagtacggagtcacctggaaggggcgcaactacgacaaatccaactggaatctggcggacaacatcaatcgcgccctctcgacggccaatgccagcctttacgccttgtgcgccgccgtactctgc

SEQ ID NO: 613 - DNA, 12184 bp, Artificial Sequence
  Synthetic Oligonucleotide
aggtggacaactggccgtcggaaaggccgtcaagagccgtgcgggcggatcggatagacctgttgacagaccgagcgctggtcggccgcccagcctggtttcttactgtctgaatcgcagtattcgaaatcgaacaccctggtcggtggtcaagccctctgttcggatggacgcctgcaagcggtaagggcccggcgtcacaaaagcgagctgggatgcggccgcgaagtcgagattctgcgtccccgcgaagctgatgcgaagcgagcacttccctgccccggcggtcgcgcagtcacgggcgacttcaacgccctgagcgtgtccgaagttccaatcgaacggtgatggcgtgggctcgaattggaagtttccattaaagaggtcgttcgacttccggtagtcgcccgcgcgcgcgcccaggtgctgcgcccatgcggacaccgccgcttcgggatggccttgctgcacgagaaaaccggcatactcccctgccgtactatcatcgttatacccatgtcgagcgatccaatcccaagtgcgttgcgcatcatccaggcgcccggcttgcatcaggtattggagccaggattgtaccgcccgccgatcttccggaaggccgtacagcaaaacatcatcagcgtgatctaccaggcgcgtgtactcgctgaagatgatcgaatcgtaatccggagtgagcgtcaggatacgcgccgtggcggggagggcttggtggttctcgccgacttggaaatagaagttcgccgcgcgcaggagaaggggcgcagaccgcggggcgagggccagcacctggccgaagcactcgcgcgcctctcccttctgtccggcatcgagaaacgcctccccgaggtcggcccatcgatagggattttgcgggtctcgctggagaacctcgcggaataggacaatggccttttggacgtcctcttcgctcatccccgtcaattgctaccgcgctcgcaactccaagggcgcgttggtgcaaacaaagatgcggcacagaacgcggtcaacctccgcgttgttctgccccaacgtctccgagagaatgcccgcctcgcagtaggcagccaaaaccaccccgaggatgaacgtcagcactttcaatccagcacactctcccgacgacggaccttttcgaaagcccgctgatgtaacggcgaatttacctagccatatggcggcgcaaagccgcctctacatcaatctgacccactgccgaacattacagccacatgccgggacggccctaatcgcaatgcggatgatccggtgggcaatgaaggctacgcgggggtggcggcggcggaggtggaggtgggaagggtggccgcggtggcgagggcggtcggggtgggtcgtgcggccgtggaggatttccgcctctggcaagtggggtggcgggctgagccgaagctggccccgcggcggagttccgcgccaccggatgaactagcgggaccaagctcactcgcgagccttccgccggcttcaagtcgaccgacccagacagaacgcgcagcgccactgaagagctgcccgcctccagcttgacccgcgaattcggatcgagcgtggcgcggctccggtcggccaaatagatcatggccgacgaacccgcggtggcgatctcgtcgcccgccaccaccggcaaggatgatacggcggttgccagcgcggccttgccgttgagcgtcagcgcccccgaactggtgaccctgcccaccggatcggcggccatcaggactacggtcgtcatcatgacgataagcagacgcaaatatttcacggctacctcctgtgattgctgattggcgatgggcgatgggaaaacgggtatggcgacgtcctctgtcgtcaatcgccagtcggaaataggccattcccgagccccgcggacattcccgcaacccacgccaggagcatggcattggccggaatatagaagttgaaatccgccaggctatgcaccagaatcgcggccagcgcacccgcgcacgccacggcaagataccgcgcccccgggtctcgcgatccgacggctttccgcaccgccgtcctcaccacggagaacgccagcgcggccacgatggcgaaacccaccagccccagttccgccagcaactgaaggtaatcgttatgcgcgaaatcgtccgtgacgagcggcgaggaaaccttgaatcttaagaacgctgtctcatatccgcccagcccgcacccgaagacggggtaagctctgatcaacggaatcgtctcggcccaaagctgcgcgcggccttctccggtgggatcggtcgaaacgagctggacgaatcgcgcgatcagcttgtccggcggcagaaacacgaagcccgccagcaccagtgcggcgaccaggccgaccgtggctgtttgccgtttccgggagcgcgcggcccagctcagttgccgggttccgagtgccagcgcccccatcacgaacagggaagcaagtgtcgcgaagaaccccatccgtgaaaaggaaaagacgattgcggcaaacatcaatcccgccagcgcccacacgccgcaagcccccagcgccggagtcaccgccgagtgccctcgcgagcgcgtgcgccgccaaagcgccacggggtacaccactgcgaacggcagcgccatctccaggaagcctgcgtagtggttatggttgacgtacgtcccccaccggagttggtccacgcctcggccgaagttctgcgagaggcccagaccggcttccagagcgccgatggcgacgatgggccacatcgccagccagcggttatccgcaaatcgccaagtcagctcgcgcaccagcaggaagatgatcacgtacccgcagacgagcaggaaaaattgaaaagtcgcgatgggtgaaacgctcaggggtacaaagttggctgggcgtccgatgagtgctgctggaggcatcgccgcggtgcgggcgggtgacagcacgcgcaccaggtacaccggcagcggcaccacctgcatcaggatgtagacgggcaagagagccagggtccagcgcaccacgcggccgggtagtggcgcccactggtggcgggggcgggcaaggctcagcaccaccgccagcaggcacagcaccaggaggtagtggtactggtcgattcggagcgctccgccccactcgaagacagcgtaggcgagcaccaatcccattgtggataaagcgccgatgtccgctattcttagagactctcgcgttggcttttcggggtgggactggaggcgcatggactggattgggagcatcaccgtaccgctaataggctagaaagtaaacctgggtcatgggtgacaggtgacaggtgacaggtgacaggaaaggaggctgcgccctggcgcagtaggtgtcagcagacaggttagaggtcacaggtgacagtgaaggagcctcaagcaagctcataggggacaggggacagggaacgagtgtgcgccttgcggcgccataggtggcacgcgacccgggagggaagctgagccctgtgacctataacctattccctgtcctcctgttccctgttttccctgctgtaccctgtaacctataacctattccctgcctacttgttccctgtcttcctgtaccctgtgccctgtaacctattccctatttccccctcattgcggaacgctatggccccctcggagggtatggttcgcgacgctcatgccgaggagggcggacagcagccaccgggtgagcagaattcccaagaagtagatgatgcgatgttcgaaattgaaaccccgcaggaggacggttccccaagccgcgcccaaggtgctgcacgccgctaccaagagccacgatccgatccggaacttgttggacttccaacccggcacgtaggcgttcaggtgaaaatcctcggacttattgtctccgtcatctgcgatcggcaggagttcgatcctttcccaaaaataaatgcaccattggcgatacgcgccaacgagcacggcgatgagcaggcacattgcgcagcccacccaggaattattaggtaaggcaagaatcatttcgatctcctgtccggcgagcaggttataggtgacagccagaggttacaggttacaggtcacaggtgtcaggtgtcaggtgacagaaaaagaggctgcgccctgtccccctgtctttccgttccctgccttcctccgtcccctgtaccttgtgacctgtcacctgtaccctgttctctcttctctaccctatgacctgttccctgtaacctgttccctgtctttctgttccctgtctttctgttccctgtcttcctgttccctgtccactgtccactgttccctgtaacctgtccgctgtcttctcatattcgtgcgctgctcgatagggaaactatgcagcaggacggtggccaaagccgcgccctgcgaggccaaaggtgacagggaaagaggagagaataggcaataggtgacaggttacaggtgacagggaaagaggctgcgccctgcggcgccaaaggtgagcctgttccctgacgcctgacacctgttttcccctgttccctgtccacggtcctctgccttcgggttccctgtcttcccctgtcccctgtgacctgtaacctgtcacctctcttcctgctgtaccctgtcccctgtaacctatcccctgtcctgaccgctcagagccctacgctacagccattttgtccagcccgctcatgacaccttaagtctgatgaccaagctactcacccgttggagagtcagcccttccctggcgcgctgtagtggcggtctctgactgtcggagggtgttgtggcatggccaacttggggtagcgccctaattctgtgttggtcccctccctcttgacaaactgcgatcgcacgtagcatctttccagcagcgaaaaacaaggtaaggaccccgctgctgtcgaacttggacggaggggcggcgaagcgatcgctaggtgcggccctgcttatctcaagtggcttcagtcttagcggttgacccgtaagggaggaagaccgaagtctaaatagtgaaaacgtgtttgaaaatggcacctgactcactcgggatgttgaccgcgattttgatatccgttggcctaatcgtaagcggagtgcatcttcgtcgtgtacctaaacttaaaatcgtgggagcgctgctggctgtacttggcatcttcggactcatggcagctctgggcttcatcagggtttattaacagcactcaccacaatcttcatctctgccagaacctcttggccgatcagcacgcgcgttgagtgcctatattggtaaaagccatgaccagcgacgtatgccccaaatgcgagagtatgaatctcgccgactcccatcggcgaggttggatcgagcggtggattcttagcttttttggtatcgtgcccattcgctgcatggactgtaatacccgtttttactccttccgccgtcccctctactgactccttttttcttcggcactcggttcagctcgccaagttgcacagatttcctttcggccgtcaatgtaacttctcagccaatacccctggactgacttgacaaaaccccattggatgggttaatataggtttccggtagtctagccaaaaggggaggggctgccgatgcaaacaaatgcctccgttaattcgcgccggtgtgagcgcaaaatagcaacaattccaatcaaacttgtggtgaaggccgacctcttcaatgcagacgattcagctctcgcggtcgacatttctccgcgcggcgcctgtgttcgaaccaagctggagttagatccaggagagtgggtgggtgtcgttcccaagggaggatacccgtatgccatccccactcgcacgatttgggtgcgggaggatgagttcagccattggaccttcgcggggcttgagttcttaaacaccccggaaggttagaaaatgcactccatggcacacccttccagtgtttgattggaattccaaaaccccaccaacacacgtttaggacgctacctgcctccccgaaggggaggaatatcattagccgtaggtgaaacctacggaccgagacggcgacgaaaggaacctaattttccgcgtttcctttccgtgggtttcacctaaggctatgggcgacaggcagagggcacaggttacaggtgacaggccaagaggcagcgccgtccggcgcccaaggtcagcctgctgcctgacacctgatacctgacacctgttttcccctgttccctaacccctgttttcccttctttcccctgtaacctgtaacctgtcccctgccttgcggtggcagagccgctggggctcttgcgtgaggcggaagaaccactcgaggccgttctcctgcatccatgcttgcttggcagtcccggcgatgaagtcgaaggccgctcccaccccggccatcgccggcacgcctagccgtgagcggtgctcgaacatcgagcgttcctgtttgggagtgctcaagcctacccagacgacatccggcgccgccgcctggattcgtagctccacttccaccttttcttcctgggtcagcggccgaaagggtggcgagcaggtggctcctggttcgcgtctgctaagcagaggcgataaccgttcttgtggtcttcgggccttgcctttctcgcgtgccgggtgtataccttcatcgcgttaatcatttggtagacagccacccgacaatcgggccgccaggagcgcaacgggccgcccaccagcctcttgccaaggcaaggaggaagttatgagctataacctgctcgaagaaaactggattccagttctatggaaagacgggaatagcaatcgcgtgggcattactgaagctcttaggcaagcaggccggattcgtcaagtcgccgccagcaatcccatggaccgtttggccatcctgcgtttcctcctcgcgcttctctattggtgcaaggggaatccgccggacgatgaagactcggtctcttcgtttccctcggattggttcaggaaacttgatgacaataaggactgtttcaaccttctgggagatggcaagcggttctatcagtgcaatgccaagtctggaacagagggaaagctttccgccaactacctgatgcaagaggtgcccactggcacaaactcttggcacttccggcattcgacagataaagaggacggattatgtccggcgtgctgcgccgcggggttattgcgtttaccgctatttgctacgtcaggggggcgcggcaagccgccaggggtcaaccagaaaccgccggtttatgtcgtaccggtcggcggttcacttgcggaaaccctgcgtctctcctggcgcaaggtatcggacacggacttcggaacgccggcttgggaagagcccgatcttagccttcctcgacatggcaatgttccgctgcttgtgggattgacgtcgctgccccggcgcgtgtggctggacaatccgcaggaacccgacgccaactgcatctcgtgcggacgtaaagcgcctctaatacgccaatgtgtgtttgctggtgtcggcagcgcaaaaacggatgaaaatggcctgggccgcgtatggagcgacccgcacaccatcactgacggcgaggatgtcattaaacccagcaatgcccttggtgcaaccgacgcggcggctgggcaatgggcaaggatagcggcgggaattcttcgggagaaaaagcccaatggcaaaagaggcttgtgggtcgtcagctttgcgacggtgcagaacgacaagtacctggaagcgatggaatatgagattcctctcccgagcacgctagatgatcggcaggtcgcggagagtgtcgaaacgattgacatgtggcaaaaggagggccggaagcttgccggcaaagccaaaccgagagggacttcccgaagacatcttgaaattcctcccatggtcgccgcagttcgcccgcacgtagaagcaaaggtctccgggaaggtcggcgagttgatttcgcgaggccgcgatgcgtgggagcaggcagcccgggaatataggccgatgatggccgccgtcgccaaatcgctttccccgggctataccaccgctgcgctccggcggcgacgccagattgtcaatgtaaggccgaacatgcagccaggcaccccaccggccgggagggccggacggaagaagggaggcgacaaatgactccaacggagcaatacgtcgacgtcctgacacatctgaagtccggtgatctcggactcctgcgcgagcatgccgggcaagggctcgaccaatcggtcgatgcctttgacctcttcgcggggctctggtggccgttgcgggagaggaatcagcgcgcgccccgccgtgcggtggcgtggcttatcgcaaaactctatgccttccggccgatcgagcattcacccgggcagacgcttgcgtggcagcttgggcggtaccggaacgacaatgaccccgagaaagaccctgtcgcggaaaggttcgacaggatgctgaccttgccggttgatatactcgagccggccttgcaatggtcgcttaacctcatcgcctccaaaaacccgaagctcgactgggtgacgctgacaaacgatctttccatttgggaacgcgaaaccacccggctcaagtgggccgaggaattcttgaagtcttcgaaggaggaccgtcatgttaattgaaattcatgccattcaaaatcacagcccggccaacctgaaccgggacgacttgggcgctcccaagacctgctacttcggcggagtactgcgctcccgtatttccagtcagtgcctcaagcggagcatccgcatgagtgacgaattcaagcagttgctcggcggcgttcgcacacggcgactggcgcaattgatcgctccaggcggcccggataccgccgagtttaaaaaggcgatcgcggttttagaaatctgcggcatcgcggcaaaagagaagaaagggaagaaaggcgacgacgaggaatctacgcccgacgaaaaaagcgccggagtggtttatgtgagcaaacaagcggtcaacgagatgtctgagcttctgaaaaccaagtcggccaagaccgataacgagctcgccaaggaatttgcccagataatcgctcgccatacgagcaccccggacatggcactctgtggcagaatgctggaaccaaagaaagcgaaaaagcaggcgtcggaggaaggcggcgcgaagcccaagggcggcgacgtctggaagggacttgacacaaccgttgaggcggcgctgcaagttgcccacgcaatttctactcacgcggctcgcccggagattgactactatgtggccgctgatgatgtgcccggtgaagacgcgggagcaggctttgtagatgaagcaatgttcggctccgcctgcttctacaagtatttttcgattgacttcgaaaccctcatcaacaatctgaagggcaacaaggaactggccgctcatactgtcggcgcgttcatccggggagcggcgttggtgaatcccacgggcaaacagaatagtttcgccgcgcacaacccacccgacggaatgctggtcgaaatcagaaactcacctctcagctatgccaacgcttttgcccgaccagccatagcccagggcgaacgagacatcatatcccagagcgtcgcgcaactcggccagtacgttcacgatatcgacaccggatacggcaaaccaacgaggcggttctggttctcgcccaatcttcgctatcccttgaccgttacggagggggataaggaaaacgccttggccgaaaacaatatcaagtcgctcgaggaattgatcgaggcagtcatcaagggaatcggccatgattgggaggaggttcagaaagtggttgtgaactcggaggtggcctgatgagcgcaaataccctctttctccgcctcgaagccccccttcaggcatggggcgatcagcagtcgaagtttgtgattcggcggacggctgacgccccaaccaggtctggcgtcatggggatgctttgcgcggcgttgggcgtctcccgctcggcggcgccggaaggctggcttccaaggcttagccgcctgcgcatgggcgtccgcatcgatgtgccgggggtccgctggtgggattatcacacggtgggcgccgggatgccgatgcgcactgccgaaggtggaaccaagccaggggccgtgctgacccgccgcgaatacctttgcgacgcctcgtttctcgtcgcttttcagggagagtcggacctcattgccgaactggagtccgcaattaaagcgcccaaatggacgctctatctgggcagaaagtgctgccctccctcgcgccctttactggagcatccggggggtgaatttcctgacttgctttctgccctcaaatcggttccctggcgcaagaggttggagggagacgatcagcccgaagcgctggattgcctgcttgattggaagtcaaccgaagagcagccggaggctcccgatgatgcgctcgtctggtacgacgtgcccgtgaccttcgacccgccctcccaccagccccgatttgtcattcgcaagcaactgcgcgttggactcgacggcgaagtaacgcttgcaactcagccagcacagagctacacgccagcgcctccccgcccaagagcggattacactaataccgagtacagaatccgacgggaaaagcggctcgacgacgactatcacttgtgcgtcttttgcaagtcgcccgccaccaccgtccagcacatcacctatcgccgcgcgggtggcaatgaactcgcggatgacttgcgctctctctgtcgcctctgccacgatgccgtcaccatgatcgaatatggcctaggcatgggcatggaccgcatcaacccggaagagccgcgttggcgcgacttgattatccaaaagcggaacgaaatcatcacgttccgctccctggagactcgccgcaggcgcctggtcgccgaggaggtggagtagccatgtaccggtcctgccttttgattgacgtcgggagtaaccccgaccggcctcggcccggaaggctgtggcttcggaatctctatcacgtccaccagcgcctttggatggcgtttccctccgagaaccgaaaatcccatgatcgcgattttcttaagcctttcaaacccgcggactttggcgagaagccggttcaggtagaacgcggggcgggttccggctttctttttcgcattgagccgcagcccgccgggcgggtcgtgattctcgtccagtccaactccgccgtgaagccggattgggactacgccttccacaacgcccgttttcttttgaatcctctggctgctcccccgcaggtagaggaattcgaccctcgcttcgccaagggccaacagcttcggttccgcatccgcatcaatctaagcaagaagttaaaaacgagcgcaaagggcgtcgatcttaccaaggcgggcgagggaacagatcgccaaggccgcccgaaggcccaaagcaaacgcgtagcgctgacctgggataaggaccagaaccccgacgatgtgatacgaaaatggttcgccgccaagggcgaccaaggtggcttccaggtggaaactttccgcgtcttgcaaatcgggtggggcgcaggaaaccgatcggacccgaggccggcgggcgatcgcatgaaatttcgctcagccttattggaggggacgcttacggttaaagacgcggatagcttcagagaaaccatcgtgggcggcatcgggcacggcaaagccttcggcttcgggcttctttccgtagcccctcgcacaccactcccggcagaggcaacgtgagagttctgacgccaaagcgagccccgaagcagcgcgccgagatcgcccgccgcatgtttgtgcagcgctttcccggtgtggatgtgcaggcgtattccgtcaccgaattgcggggaatggagggcttgcgcgtgcccgccaaatacgcggaactcggcgagcagtacggagtcacctggaaggggcgcaactacgacaaatccaactggaatctggcggacaacatcaatcgcgccctctcgaccgcgaatgccagcctctacgcgttgtgcgccgccgtactctgctcgctgggttacctgccg

SEQ ID NO: 614 - DNA, 12174 bp, Artificial Sequence
  Synthetic Oligonucleotide
gaagaagggcgccaagatcagccacagcgccagaaggggatagaccacatagaggatcttgcgcaggcgccggattgccagcagcggagccaggcagatcatcagggggacgatccagtccaaaaaacggatatgcaacaccggaagcacaaagtaaagcatgaaacccagcagcagaatggacagcactatggcaggcagggctttgatcctgaacttgggaaacttgatcacgacaggtttgggcgtttgttgttgaaacatggtaacctccctgaactaagctttgttttgatactgtgccagatggcggcggatttgtcaagccggaatcgtggctcgcctccactggcagaatggaaaaaagtggactcggctcggacggcaccctatccttgcggatacagaggcgcgaccgcccgctcaaacactccctgaaccttggaaatggccagcccgtaattggtgatcggcactccgcgccgctgggcttccacgatgcggcggctcatctccatctggttgagcatgcaggctccgcagtggatcaccagcgcgaattcctccagattgggcggaaagtcgtgtcccgcgtaaacttcatactccagttccttgcccgtgaactggctcagccagcgcggaatcttcacccgcccgatgtcatccgcctgcacgtggtgggaacaggcttcggcgatcaggatcttgtcgccgtcgcgcagcttgtcgatctgcctcaccccttccgccaggacgtccagatcgcctttgtagcgggcaaagaggatggaaaaggtggtcatcttcacctcggggggcaggtcattcaccaccttcagcaccacctgcgaatccgtgatcaccagatcaggcggctccttcagggtttgcaaggcataggccagttcccgctctttcaccaccgtcaccaccgcgtcgtgatccagcagttcgcgaatcacctgcacctgcggcaggatcaggcgtcccttgggcgcggcgaggtcgatgggagtcaccagcagcaccctgtccccggccttcaccaagtcacccgccagggggcgctcctccagcagatgggcgggcgccagcttgatcagcagttccttggcggcatcgatgttttcccccttgagggcggagacggagacccagggcagtccccgttcctcgcaccaggcgatattggcgggggcaggctcgcgcaaatccctgtggttaaagaccattaacagcggtatcttcatctcgcggatgcgtttcagggaggacagctcgctctccgcgaaggggcggccatcgttcacaaacacggctatgtccgtgcggtaaagtatcttataggtggcgagtacccgtttttcgcccagttcgccgctgtcgtccagtccagcggtgtcaaagaaggtcaccgggcccaggggcagaagttcatagcgtttgtccaccgggtctgtggtggtgcccggggtgctggaaacgatggctatctcctgtcctgccagggcgttgatcaaggacgattttccagcgttgcggttacccagcagggtgatgtttacgcgttctccgcggggtgtgctcatctatcttctcccaaaaagtcttgcggcttgcggccgctaatagcttttattatcagttctttcatgtttctttccttgtcggactggataccagcccatgtaaaaataatatatgtgaaaagcgcgaatctgtcaagcaaagagaattctggcagacaggggcctgtgtttttgatatatccacaaattacacaaattaacacggattaaaagaacagaataaggacaagtgtccagcctaaaaacaacaaccagaccctgaaacaaaccgccaccaagccctaaagccgtgtcatcccgggctgtcggggtcaccgccaaagcgcgaagcggtttggtggggtggcttgacccgggatccagtcttttaaaaacaaccagcaagccccgaaacaaagcacaacagactaaaaaccgtgtcatcccgggctgtcggggtccccgccaaagcgcgaagcggtttggtggggtggcttgacccgggatccagtcttttagaaacaaacgcgtaaggttttaaaaaagcaggcacctttccacctcaaaacacctttccacaaattctccccccatatatataggtgctacgaccccttcatgccaggcgggaagcggatcccagggcaagtatatatatacttgcccgtaattgcgcggccatgggctggctgccctccctttcccctcgcgcgcgggtggctctcatttgcatccagcgttttggcgtgagtcttccttaggtcatccttataatttataaggttgacctaaggatgatggcatcaaatccagtagcagcaaaggagggcggtatgaaggattatgcggaaggttgtggtatttttgtggaaaggtggaaaggtgcccccgaaacaagtccaccaagttatattttgtgtcatcacgggaagtcggggccccctctggggtggcttacccgtgatccagtctttttaaaagaaacatccacaaattacacaaattaacacgaattaaaagaacattaaagagtcaacacacccgactccggaacaaaaccctccagactaaaaaccgtgtcatcacagcctgcgagccgtgatccagtgcccaggtgtggcaaagtccgtttgccacagagaccggaggtctcttccaaacaggcaactccgttgcctctgccgaacggacttcggcaacccttatattacaccaatccgtgtcaatctgcgccctttatccgcgtttatctgcgtgaaccgtggaacccgggatccagtcttttggaatgtttgaacttcgctgaaaacatttttcgctaccaggaatgaaaactggacaacaaacgcagcttgggatatctgacactaagagtgtaattcacacgatcaataagaacatagcgtgctgtgcatacaaaacatattaccgacggacttctgttctgaaatatggacgttttgaacttggtaaacagtccgtatatggactaccagctgggacttgccattaggcatatgcccgaatgtaaagctatattcttatataacgcattgtagacagcacaggttgttctctgctctttccatattacactagtggtcatcatttcaccagtaggggtttttttacgcttttttcccgggagttttcatgtaaagcaccctactggacaaagagatgggagccggaaaacacagcctgaactgggacggcaccgactccaacggcgcccaactggcaagcggagtctatatctaccgcctcagcaccggaaagacgagcgccagccgcaaaatgatattgctgaagtgacggacagccgcccttccaagtccgataattaacttgaaccgccgcgcattacacacggcggttctttccaacaagccaagtatcagcagcgggaaaactgcgctgaaaaagccgctggtggggctccgtaaaatgggagtggaagccgccgcatggaacaccttgaaagtaacaagataccgccccaaattgatctttcctaacccaaaatccgcaaagcaaatttcttgacaatgatctttggcttaaatataaggttcctatcgaacaaaaggagcatgttatgtacaatcttctttgtgataattgggtaaacgtggtctatctttcgggcaaaccagatagaatatctttagttcaaactcttgaagacgcacactgtctgcaactggcatacagcaatcctatggaccggttcgctgttttcagattcctgcttgctcttggctactggtgtttcgccaacaccaacggggagcctgaacctgataagccgcttccgacctcctggatatcctggctggaagaaaacaaggggtatttcgagctttttggggatggacagagatttttccaagccgatcccagttccaggatcagagccattaccgaccttattcatgagataccaacagctcacaacctatgccatttcaatcatgtcaccgactatatcgatgggctctgcgaagcttgctgcatcaagggactgctgagattacctgtctttaccactgtcggtggcagagggataggcgcgggaatcaacaacactcctccattttacctgctctggcatgcaaatgacctcgctggcatgctggttcaaaattggcaaccctgggataatatggggattccggcatggttgggttcttttcaaaaagaaagcaggaaagtgggcttacttgccggaatgacctggctgccgcgcaaggtgcatctgcatgatcctgtctcaggtcaggcagcatgttgttcctgcggcttaccctccaaagctctcgtctattcctgcagcataaaacctgaaccagtgccggaaggccttaaatggaaagaccctcatggtgtttacaccgatcagggaaaaagtctccagtccaaaatcaaactgatgtccaatgatagatacactttcgcggaccgggattggtatagcccgttgttcagctatttgcacgcggaaggaaactccagacaaggaaaactatggttggttggatttgccagcgataaagcaaaaagcatagacatctgggacaagatcatcgagcttgagggaactgatacaaatgatgagctactggctcaattggcaaacagggctactgcccttaatgccatgcgcaagaagcctctcagaggtgatttcaaaaagtcagtgggcactccccagattgctgacattatcccccatgccgaaagcagaattgccctcaatgcgggtaaaatgactgagaacaggggctattcctggcaggatgccgatactgaatacggagaactgctcaccaaggttgcatgctctttggagccggctcaaacagtggacgccaggctcaagagaggtaaattcatttcccgcaagccctggccagttataccagaatccaaaacaaaacccgcagaggaggaccagaatgaatagaggaaccgttgacttcattgcaagcctggagaacctcaaagaaggcgatttgggcattcttagaaaactcaggggagcccggcttgatgaaaagcttcccggatttgacctgttttccgccctatggtggcctttgcggcaaaagaatcaacgcgctcccaagcgtgaagtggcttggttgatcgccaaactttttgctgaattccgctttgaacagcgcgagggagccacattgcccattcttatgggaggcatctgccggaagttggaacccaaaaaggaattaccccgggtattggcacgctttgatcaactcgcatcgcttgacattatgcagatggaagagccgctgtcggtcatcatgggtattttgcgcaagcaccagcaggtctgcctggactgggtagggcttactgatgttctgtcattttgggagcaggaacctgtcaaaagagaatggtcggattcatttattaaagcatacaagatcaacaaggaggattcagatgttgattgaaattcatatgattcagaatcacagcccggcaaatcttaaccgggacgacttgggcgcccccaagacctgttatttcggtggagtattacgttctcgcatctccagccagtgcatcaagcgcagcatccgttttgccccggaattcgcggaccttagaggaggtatccgaacaaggcgtctggcagagaaactcgaggaaatgctggaaaacaaagataagaagctggttgccaagtttcttgaagcctgcggaatcaaaaccaaatcttccaagaaagctgcaaaaaagtccgaaaagatacccgcggaagccgatgaagatcaggatgagcagcaggcggctgatacatctgacatgctggtttttaccacttatgatgccctgcgccaaatggcagagctgctttccgactccaaactaagtgaaagcgaaaaactgctgcagttcaaagatttgctcacaaactgcgtccattctccggatatagcactttgcggcaggatgttggagaccaaagagcttaaaaacactggcgttgaaggcgccctacaggttgcacatgcgatctccacccacattgccagacctgagatagactattttgtggcggccgatgatgttcccggtgaagacgccggagcgggtcatattggcgaatccatgtttgcctcagcctgtttctacaaatacttctccattgattgggaacagttggtcaagaacctgaaaggggacacgaatctggcagcccacaccgtgggtgcctttctcctcgccgcagccaaaaccaaccccagtggcaaacagaacagcttcgccgctcataactatcccgatggcatccttgttgagttcaagaattcccctattagctacgccaacgcattcgtcaggccagtttccgtggtcaaggaatcggacctggtggaacaaagcatcggccagctttccaactacgtgaacgacatcaggcttggctattatgatgagcaatccccagttatcagcttctggttttctccaaacaatcgctattcccttggcaatgagcattccaaactggcttccagaaacattggcaacctcaatgagcttgtaggcgctgtgttggattatattggcggcttcaagtgggaagaagttcagaaaagcaaggcttatgttggcggctgacatgagtgcgccacccaacaccttattcttgcgcttggagggggctttgcagtcttggggcagcaacgaggctaagtttgctttgcgcaggactaccgacgctcccacaaaatcaggtgtcctggggctgctttgcgcggccatgggaattgggcgcgcggaggctgctgattcatggctcccaaaactcgccaacctgcgcatgggcgtgcggatagaccgccccggcatacgctggtgggacttccatactgttggagcgggacaaagaatgcgcatggcagagctgaaggcacccaaaaaaccttccatggttggagctgccctggctgataccctgacaccaagcaaagtaaaaaccagggcagagaccttgctctcacgccgcgaatatcttgccgacgccagttttctggtcgccttgcagggtgagccggaacttgtggaaaagctctccgccgctctggccaagccggtctgggcaatttatctggggcgcaaatcctgtcccccttcacgtcccgtgggcgagcatgctccgggcttttataacactttggaggaggcgctgtccgcggttcccctgcaaaagcgctggcacaatgaacccctgccgcaaatactgccttgcgtcatggactggatccccagccaggacggagaacatgcgcctgatgacgcggagattcattacgatctgccggtttcttttcagccgccccgccatttgccgcgcttcgtgatcaggcgtgagctggttgtgggagaggatgtgcaagtgagcagggaaaccggaaccagcgtttggaggcccaaaggaacccgggcggattataacaattccgagtataagaaggtcagggcggagcggcttgtgatggaccatgccgcgtgcatggtatgcaaagctcccgccacgactgttcaacacgtgaattaccgcagggcgggaggcaaggaaataccggaagacctgcgggcgctgtgccgcctctgccacgacgcctgcaccatgctggaatacggttccggcatgaccaccgaccgcatcgacccctgcgaccccatctggcgggagcgaatactggcaaagcgcaaagatatagtcgagttccgttcgcgcgggcagcgtttccgcaaaatgaagccagaggaggaaaacggatgatctacttgtccaagctattgatcgatactggaggcaatccagaccgtccccgccccggcagaaagtggctggacaatatctataacgtccaccgccgcctttccatggcgttcccttcaggtttgcgccgggagcaggatccgcatttcctgaagcccttttcgccaaacgacttccaaaaaactcccttccttttccgggtcgataacaacatcgacggaaacgataaaagggcgattattatcgtccagtccgttcttgagccggattgggattattgcttccaaaacgcgcttgatttcctggcagcgccaccggaaacaaaggagtataatccagagtttcaagcgggacaactgctccggttcaggctgcgggtaaacgccagcgtacgccgtcatattcctgagaaggtgcaacaggacggtcaaaccatagaaactggcaacatcctgcacaaaagggtttctctcacctgggatccctcttccaccccggatcaggcccttgccgactggctggctgccaaaagcccaaagctgggcttcacccttcagcgctgtgagcttcttcaactgggttgggtttatggctccaagcctgaacctaaaaatgtcaaagcaaaggaacagggacagggctactggcgtgaacacacatacaatcctctgcgcttccgttcggctctactggagggaattctcaaagtggatgacccgaaactgttcctggaaacgcttagaagcggcattggaaaagcgaaaagcttcggctttggcctgctgtccgttctgccaatcaggaatgatgaataaagacctgcactctatcccccggatcagagatcggcttagctatctctatgtggagcatgccaaaattgatcagaacgggcaagccatcgccattcacgatgccctgggagaaaccccggttccttgtgccggcttggctatgctgatgctgggaccgggcataaccatcacccatgcggcaatactttcactggctgcctgtggctgtctggtagcctgggtgggggaacatggcgtcaggttctatgccgcaggcacaggtacaacccgtagcgccgtcaatcttatgaaacaggcaaagtactgggcagacccggttttgcatttacgggttgtgcgctccatgtatcagttgaggttccaggatgagctttctcctgatttaactttgaaccagatcaggggcaaggaaggtgcccgggtgcgcgatacatatttccaactctcccaaaagtatggtgtgcccatgcagggcagaaactatcaaagagacaactggaataaagcggatcccataaaccgggcattatctgtggcaaactcctgcctctacggcatatcgcacgctgccattgttgctgcaggattctctcccggattgggctttgtccacactggcaagcaactgtcatttgtctatgatatcgcggatctatacaaaatggaaatggctgctcccgccgcattccgggcgaccgctgaagggatcggcgaactcgaccgcagagtcaggcttgcctgccgtgatgaattccacaggcagaatctactcaaacgcattgtcgcggatattagttctctcttcggtgatattatgccagaggatagcccggatgactgttttgccgaagaaccagccttgcctggaggactctggtctccagatggagaagtttccccaggcggcatatcttacgggcaggatgatctgccaaaggaagattgatggtggttttagtattggaaaatgtgccaagctccctgaggggtaagatcacacgttggctgctggaagtaaaagccggggtgtttgtgggtaaagtctcagcaatggttagagataaactgtgggataaggttagaagcaattgcagcggtggaacttgcctgatgatctggagtagtcagaccgagcaagggtttgatatcgaattctggggtgccgcatcaagagtcgttacggaatgggagggtatcaaacttatgaccaagcatccttaaactaaggcttgaaggagttcaatgacctcttagacctctattgatcaagtgtattccccatgcatgtgggggtgaaccggatacacacgcatcggttgcataggctgtccggtattccccatgcatgtgggggtgaaccggatcacgtcaccaagatctggcttcggcacaggtattccccatgcatgtgggggtgaaccgcttatccgaatgctacaagctgcacgtgacctgtattccccatgcatgtgggggtgaaccgagacccttcaacctatcgcaaaagaattcaatgtattccccatgcatgtgggggtgaaccgactacaaaacgaggtgatcatatgagtgtcaagtattccccatgcatgtgggggtgaaccgcatctgttttgccttctgcattgccttgtatcgtattccccatgcatgtgggggtgaaccgaacgcccgccagccggcggcactgctggctatgtattccccatgcatgtgggggtgaaccgacgaatcccgtctatgccgcccaggccaacgcgtattccccatgcatgtgggggtgaaccgaaaccaggaattaacgtagtgccaggcaagacgtattccccatgcatgtgggggtgaaccgactttgacaaagccatccaggtaggtgatgccgtattccccatgcatgtgggggtgaaccgccgacgaaatagcgatgaagggactggtaacgtattccccatgcatgtgggggtgaaccggcggcggcggctttgtcggtatcctggtagaggtattccccatgcatgtgggggtgaaccgaggacgtagcgaggcggcttggtgacctgatggtattccccatgcatgtgggggtgaaccgcgcggagctttccttgttgtcaccggaaagaggtattccccatgcatgtgggggtgaaccgaattatcggaaataacaaagagtcttcaaggggtattccccatgcatgtgggggtgaaccgtcaacgaaaccagcaacctgctgatcgttggggtattccccatgcatgtgggggtgaaccgaggacgtagcgaggcggcttggtgacctgatggtattccccatgcatgtgggggtgaaccgcctgaatctatcaccctactgagacaggcaatgtattccccatgcatgtgggggtgaaccgatcgtccagattctcacgatcatcctggacatgtattccccatgcatgtgggggtgaaccgttataaagggcagtccagtgagcaatagcaaggtattccccatgcatgtgggggtgaaccgatggcaacaattagcaggaattaaacaagaaggtattccccatgcatgtgggggtgaaccgttccggatgcagtcatccgctgtcgatgtggagtattccccatgcatgtgggggtgaaccgttcatagcgccgcttttcagcctggctacggcgtattccccatgcatgtgggggtgaaccgacgcggcataaccgcatgggcagcgcgtattggtattccccacgcatgtgggggtgaaccgatcgacgccggcatcatcgaggatctgatcctgtattccccacgcatgtgggggtgttgcgatttcctcgcgcgcgggcgactctcatttgcatctggcgctcagaccttggtcttcctggggtcaaccttaacctttatatggatgacctaaggatgatggcaccaaagccagtagcagcaagggagagcggtatgaagcaatatgaggattatcacgggaattattttgaagggacaagcatccagtctgggtagtttgttggtattttgtcggttgtctaaagtggtggttttgtaattgacctgaaatcggtgtgacggggttttatggttttttgaagttcttttttgtatcggattgtaaaattttcaccctctttctatctgtgtaatttgtggttttattaaaagactggatcccgggtcaagcaagcttgcccaggatgacacagtatatagcttgggggtggtttgtttcaccattccacctttccacttctaacaattcgtgttagtttgtgtaatacagattccatattgtgacatcatatatacgagcaggtgcataactgcctcataacttcatgagtaagcgtatcaaagtaatcaacaactgccttttcaagttgtttcaaagtgtcatacagcctgttgtgcagggtatttttcttgattgttttccacagtctttcgaccgg

SEQ ID NO: 615 - DNA, 12146 bp, Artificial Sequence
  Synthetic Oligonucleotide
cgcttgaacagcccgcagcaacggcgcaaaccgacgccgaagcggacaagaagtttctgcgtgaaatctacgagccggtcgttgaaaaaactatcgcatccaccgccaaaggctcgcctttgcgccgccgcgcggcgaaagagcacgccaaagccctgctgaacaagaaaatcaaagaactggttgagaagccggatcatccgtcgaacgcagatgcaccagcagccgtgactgacaaaccgaaacgcggccacaagaagggaggcacagaatgagccagaccgctgaatacatcaagaggcttgcagacttgcaggaaggcgagcgctcgcggctgcgccgtctggccggacggccgctcgacgcaacgctccagggtttcgacctcttcacgggcctctggtggccgttgcggaaggtaagttcggcgaccccgcgccgggagccgtcatggctcgttgccaagctcttcggcgcgttccgcgtcccgcacatccgggccgattcaggcgcgggtccctctttgcctgaagtcctgggccgctgcgaaccgcacgacaaggatggccgcaagcgcttccgaactcgattcgacgcactgctttgctcgtccctgtcgtctcttgagccgcatttgcgctgggcgctaggggaagtcgccaaggcggtcgccgggcacgtgccgcatgcgcgggatgtgaaaggcatcgactgggtgcaactcctcgaccatctctccatttgggaccggggcgaggagcaccgcctcgatcgcgatattcgagatatatgggcggaacaatacctgaactcaaccaaaaaccaaaaatcaaaggaggactgaccatgttaattgaaatccacatgatccagaatcacagcccggcgaacctgaatcgggacgacctgggcgcgcccaagacctgcatcttcggcggcgtcacccgggcgcgcatttccagccagtgtctcaaacgcagcatccgccgcagcccggagttcgcggttgctttggagaaggatggaggtgtccgcacgcgcaggttggcgaatctgctggcgcggatcgcccatgctggagacttcgagttgacgcccgcaaagttggctgaacttctcaaagggaagtccatcgagaacgaagagacaaagaagctcgatgccattgctgcagaagccctggaactgggtggtgtgaagccaaaaagcaagaagaaagggaaaaagggcgaggaaggcgaggaaggcgaggacgccgaagcgctctccaagatgcttctcttcctctctacgacgacaatcgcgaagatggcgggagatctcaagaccgaatcagacgcaaaggcgcttaccgaaaagttcaagaaatacattgccgaaaatcccagcgtcccagacatcgctttgaatgggcgcatgactgaggttacaaagggtagcgttttcagcgacttgaacttcaccgtcgaagccgcgttgtccgcggcacacgccatctcgactcacgcggtcgtgaacgaggtagactacttcaccgctgccgacgacgtgcccggcgaggacgccggcgcgggtcaccttggcgaggccatgttcaactcggcctgtttctacaagcatttcgtcattgacttcgagcagttgaagaagaacctagcgaacgatgccgacctcgcctgcaagacagtacggtccttccttgaagcagccgccaatgccaacccctccggcaaacaacacgcacacgcggcattcaatctacccgacggagttctggtcgaagtcaaaactgagtcggccacacccgtcagctacgccaacgctttcgctgatccggtgccggaaaagtccgaacgcggcttgatcggcgaaagcatcgctagacttggccagtacgcccacgatctcgttgtaggttacggcatcgaggccgaacgtttctggttctcgccgaatctgcgccatcgcctgacctggatcgacaagagcatgaaggaacacgagcaagaacaatccgtggtcggttccgacgagttcggcgagttcgatcagttcgtccataaggtcatgggcaagatgggggcaaccgggacttctgcggaggcggcgaaatgaccgaagccaacacactcttcctccgcctcgagggccccctccaggcctggggcgacacgtcaaagttcgtcatccggcggaccatggatgcgccgaccaagtccggcgtgctgggcctggtgtgctgcgccatgggcctgtcgcgccaggcggtgcgggaacgcctgccggagctgaacgggcttgcgatgggtgtgcgcatcgaccggcaaggcacgcggtggtgggattaccacacggtaggagcgggaatcggcatgacaaccgctagtggcggtctgaagaccggcgccaagggcacgctcatcacgcggcgcgagtacctgtgcgacgcttcctttctcgtagccctacagggcgaaccggcgcttattgccgaactggccgccgcgatgcgaaacccaaaatggacgatctacctgggaagaaaatcctgtcctatgtcccgtccgccgttggagcatcaccccggcgattatcccgatctgctctccgctctcacggcggttgactggcgtccgcgtctcaaaggagacacacaaacggaggcggtagactgccttctcgactgggttgccacgccggaagaaccggaagcgccgttcgacgcggaaatctggtatgacgttcccttgaccttcgagccgccctcgcatcggccccgatttgtcattcggcggcagatccaagtcggcgaaaagggtgcattgaaggttgcggagaagcccgcgcagaactacacaccgcgcccgccacgcgcgagagccgactaccgcaatagtgaatatcggaaaatgcgagaggagcggcttgatcgcgatcatcatctgtgcgtcttatgcaagtcgcccgcgaccaccgttcatcacttcacctatcgccatgccggtggcgatgaacgcctggacgagttgcggtcgctgtgtcgcctgtgccacgacgccgtgacaatgatcgaatacggccagggcatggggatggaccgcatcaaccccgaagaggagcgctggagggaccagatcatcgaaaaacgcgcgaagattatcgcgttccggtcgctcgaaacccaaacccggcgccgcaaactcgccgcagaggaggtcgaataatgtacatgtcccatctcatgattgatatcggcgacaatcccgaccggccacggcccggccgtctttggttgcgcgatgtctaccacgttcatcagcggctgtgcatggcgtttccatcggaggcgcgggtaaagcgcgatgtcgagtttcttcagccgttccaagaggacgacttcccgttgctgcgcaacccggacgttaagccggaagacccgcgccacagtttcctgttccgtattgataccggcatccaggacggcgcgcgaacggttattcttgtccagtcggcgctgaagccggattgggactatgccttccagaatgcgcgctttcttgccgccgatccggaatggaaggaatacgcccccacgttcgaggttggacaggaactccgcttccgcatccgcatcaatctgagcaagaagagcaaggatctccgaaatacgcgggaggaaacagatgcgtatggccgcccaaaatcgcagagcaagcgcgtggcggtgacctgggacaaggaccagaaacccgatgaggcgatccgcgcgtggtttggagccaaggctgtccgtaatggtttcgcgttggataactttcaactcgtgcatctcggttgggtctcgggataccgtggcaagacgaaagtgccgtccggcgaggatcgtcccaaacacaagatgcggttccgatccgcgctcatcgagggaacgctggcggtcacggacgcgccgtgcttttcgcaggcggtcgcttcgggtatcggttccgcgaaggccttcgggttcggcctgctttcgcttgcgccggtacgtgcgggatgatcgcccatgaggactaaagacctgcatgaactgccgaaagtccgcgacaaactgacgtacctctacgtcgagcattgccgcgttgatcaagaggcgaaggccatcgcgattcatgacgtttcgggtgtgacgcccgtgccgtgcgctgcgctcacgctgcttatgctcggcccagggaccaacatcacccacgccgccgtgctgacgctcgccgattgcggctgccttaccgtgtggtgcggcgagcaaggcgtccgcttctatgcccaaggcatgggcgagacccggaacgccggaaacctcttgcatcaagcaagcctgtgcacgcaccgcgcttcgcgcttgaaagttgtccggcgcatgtacgaaatgcgctttgccgagaacctcgacccggcccttacgatccagcaaattcgcgggcgcgaaggagtccgcgtccgcgacacctacgcccgcgcctcgcgcgaatccggggtcgcgtggcagggccgatcctacacccgcaaccaatggaagtccgccgatcccgtcaaccgtgccctgtcctcggccaactcctgcctctacggcatctgccacgccgcgatcgtggccgcaggctactcccccgcgcttggtttcatacacaccggcaaacaactctccttcgtgtacgacattgccgacctgtacaagtgcgatatgaccgtgcccctggcattccgcgtggccgccgagtgttccaaagacatcgaacgcgaagtcaggctccggtgccgcgatgcgttcgccgaacagggcatcctccaacatattgtctccgacatcgcatgtgcgctcgcaattccgtccgaagaggcggacgacgaacccgacttcgacgctgatcccgcacgccccggagcgctctgggaccccgatcagggcgcttgtcccggcggcgtacaatacgcgcccggcgaaccgcccgcagagtagaaaaccatggtcatcatgatactcgaaaccgtacccgccagcctgcgcggccaactcactcgttggatgatcgaacccaaagcgggcgtctttgtcggcaacatttccgccatggtccgccaaaagctctgggagaaagcctgccaaggagtccgagaaggcggcgctatcctcatctacagcgcaaagaacgaacaaggtttcaaaatcgacttctggggaaagacctcaagatggataacaaactgggagggacttcaactggtaacaagacccaaagagccctaaaatacatgtgtcttccccacgcacgtgggggtgaaccgccacgagacccttttgtgggccagtccctcaagtcttccccacgcacgtgggggtgaaccgaaccgaacccggaaaccgggcgcggaacatgcgtcttccccacgcacgtgggggtgaaccgacaaaagaacaacaacacaacagcacaacagcagtcttccccacgcacgtgggggtgaaccgccgcgtctaccgcgcaagcccattgaccggaggtcttccccacgcacgtgggggtgaaccgtgtaacggcaccggcgaaagcgagcatgtgcggtcttccccacgcacgtgggggtgaaccgcaatcgccgaggagctcgacattactgttgcagtcttccccacgcacgtgggggtgaaccgccaggatatagaagcgctcttggtcgagaattgtcttccccacgcacgtgggggtgaaccgagggcttgcagttgcttgccgagaaccgcgcggtcttccccacgcacgtgggggtgaaccgttcacatcatcgtgtgtggccgcgccggctacgtcttccccacgcacgtgggggtgaaccgccccattccgagttgattgccacaccaccacggtcttccccacgcacgtgggggtgaaccgcgatacgttgttcaggaaggcgataagtggctgtcttccccacgcacgtgggggtgaaccgacttagaaaatgcacctgagtggctcaaaaacgtcttccccacgcacgtgggggtgaaccgtcccaggagtagaagtcggttgagttgtaattgtcttccccacgcacgtgggggtgaaccggggtgttttgtgttcgcagagttctacggggagtcttccccacgcacgtgggggtgaaccggtgaagtctttgcgcgcgtgctcgagatcgcggtcttccccacgcacgtgggggtgaaccggagcacatcggcacgatgaaagcacagcccctgtcttccccatgcacgtgggggtgaaccgtagttccctaatcatctctgctgcatccgttcgtcttccccacgcacgtgggggtgaaccggttgacggcacaaacttccgtggcatcgcgacgtcttccccacgcacgtgggggtgaaccgatcaagaaagccgagaaacagcaggagatggcgtcttccccacgcacgtgggggtgaaccggcggactatccggacggtcatgtgcatgccgagtcttccccacgcacgtgggggtgaacaggcgggtggcgttggtttcccgtttgcaagtgtgacgcgggaatgacgcgggcgtcgttggttttgagtatgtaggcggggaatgattccccgccttctttttctcacatagagacacggaggacgaagacgagcgaagtcagaagggcgaagttagaagtacgaagttagaagagcgaaggacgaaattggcttgtccttcgcctttcgcccttcgcacttcgctcttcttccttcgctcttccttcgctcttcctccggcctacagcctcccgcctcccgcctcaaaccctacggattgatggtgacggtcacggtgtcgctgaatgcgccgactcggttgtgtcggtcgacgtatgcggctcggtaggtgatcgtcaggggttcggggttcatggtgacgtgggtgtagggggaccggttgtcgtcatcaaggaagacccattctttttcttcggcgggcggaccgcttccgatgtagtaccagatgcgtacgccgcgtatgcctgcgggcagcgcgttttggcgcgcgttcaacgggtttggcccgaacttgattttagcccgtttgcgctcgccgacatcgatgtcgagcatcgggtggcctgcttcttcgatgctgacttcgctcagcggcgtaggctcgtcatcggcgacggtgatcccgagatcgcgccggatcccgtcggtcattgcgggatgatgctggatccgctggaccaggttgcgcaaccgcggctcgatggtatcggcgcgatcggcatcccgtatcgccacggcggcccgatacgcgttgtgggttgagacgacatcgtcttgctcgaccgagaaccgggtcgcgtcggcctggcaatcactgatctcgcccgaggtgacgtctaccgtcgtcccgtgaacaccgatttgtgtcccaaagttgttcatccaaaacgcgaaatcatcgacacttgttggcaaatatcctgccataccacacactcctttccctttgttgaccttcgtttcgttctacgacttcttcgttgcctgcctttcttctttcatctcctttccttttcgcctccggtctcccgcctacagcctcccgtctacggactaatcgtcacggtcacggtgtcgctgaacgcgccgacgcggttgtgtcggtcgacgtaggcggctctgtaggtaatcgtgaggggttgggcgttcatggtgacgtgggtgtagggggaccggttgtcgtcgtcgaggaagatccagtctttttcttcgggtgggggtccgcttccgatgtagtaccagaggcggacacggcgtatgccggcgggtaacgcgttgtggcgcgcgttcaacgggttcgggccgaacttgattttagcccgtttgcgctcgctgacatcgatgtcgagcatcgggtggccggcttcttcgatggatacggcggtttgcggcgtgggctcgctatcgggcaccgtaatgccgaggtcgcgccggatcccgtcggtcatggcggggtgatgctggatccgctggaccaggttgcgcaaccgcggttcgatggtatccgcgcggtcgttgtcgcggacggccaggccggcacggtacgcattgtgcgccgaggtaacgccatcgatgtcctcggcgaagcggtcgtccaagaaccgcagcatcagcacctcgagcgccgcgatgtcgagttcctcccaatacgctatgagtcgctgggcgaagtggcccagccaacgcgaaaactcatcgtctttcgccggaagataaccacccataatccgccacccctcctcgtttccatacccgttacgccatagcccatcaacacagcacgtcatcgaagaacacctacatggtaggccaccgcgcacggtatgtcaagcgctcttttgaggctgtaggctgtaggccggaggctggaggcttacctcgttcctgcccccgacctcgttcctgcccccgacctcgttcccaaatttcgcgccctcgttcctgcccccaacctcgttcccaaattgcatttgggaacgcacttgtgctaaagcttcgcttgcgccgccacccgtgactcgtccagcaggggcacgacggcgaatagcgccagagacggtgatcccaacctcgttgcgtgcgaggtcgtgcagtaattcagacggcggtgcagggtccaacccgcgttgccaacggacgccattcccggtggggcaaacaaagtttttggcgcaagtgcgttcccaaatccaatttgggaacgaggtgagatggctcctgcgcgttccacgtcaagcccttccttatcggccagccaatccgcccctttccgcattcgcttcgccatcctacgattactatcaggtcgtcggcattacacggggcgtgcccaagggcggcgcgaccacacgatgctgtccggtcaatgcgcggtagagctcctcaaagccttctgcctgatacatcttgaaatgagtaaacgtctttacaggcgttgggatacaggcactatggtcctcctcgaagagtaccgccctgaatttatcgcttaccgtttgtgcgtcgtacagatgctggtagattaaatgcccttcccaggttgcccccagccctgttcccggcttttcctcttttttgacgcggcacaggtatttcggcgaacataccataagcactgtggatgcctcgcggatgattttgtccatccatgccggccagccttccgctgggcccatttcgcccatatactggtctatccaggcgtccacaccccaggtgcgcagatcatcggccagttgccgcaccttggccgcaaaacccttgtcttcccacgcataactgatgaatactttaccctgtggaaccagcagcggcttctcttccatctttatctcccgttcttttggaatcgtatattcttcaatgccctccagcagttcgcgcacggtatactttctcttagcgccctgggggcgccacgagtacatgcggccctcgtctttctcgtattgttccaggtccttgtagtccaccgtcacgcccggatcgtcgggcaggctcaccatctccctgacttccagatgccgcatggcgccgtggatagccgcaagattatgccgcacgaccgtaagcgccctccggctggcaggttctctcttttcgacggacacgaatacctttttctcttcccggctgccccgaaccaatacgcgccgtccgtcaatccgcatcacgacgccattcttccagtaggtgttcttggagatcgcattgtgcatgcggacgataaatcgcggaatcaatcccgcgggcaggtagtcatagtgatattccagattcagcgagcttcccggctcaataccgtggtccggttcctgcgggggcagcaattcgggaatcaggcgcagccctgccttgttcggcggcgggtcgggaatggggaagcacagttcgaaaaggtccgcctccatcatggccaaaataaacatctggtgctttttcgggtagtccttctgtctatggaagatgcgcttcaggtcagcaagttcaagttggccgtgacgctcccggacaaccaggtcggtcaaaatcgcgtataccccttgcgtcacccatgtcggatcgagcacatacgtgtcgggcagcggaccgtacccgccgggactgtcataatgaagaagtgttccaagttgcttcaggtaggcaagcagcgcatttctgtcgccggccgtgagtttatgcttctcacagagcgtgtcatactcctcacggggaagattcttccgctttccggcctcgtgctccaaggcggtcttggccttcagatagctgccgggtaccttctggcggacattatcaagattccggacgcgctcgataatcgcctggcgaagcacctcaataccttccccgtggcggctcacatccttaccgtcgcaaactgtcttgcagaaggggtccggcaggttctccggataatccttgcgcagccgcgtgtcgtctggttcataactaccctcgtcgcgcttgttgagcaccacgatcaccggggaatccaccccaaacgtgcggatcttttccatccaataccggagtttgctctgttcttcattttcccgcgaatcaatcaccagaagatacaggctccgctccgtcaggaaaaactggtgcgttgcctgcatgatctcctgccccccgaaatcccagatattcacccggatcggctgcccgccctccgaggcgctcgccaccgtccaatccccaatctcaatgcccggggtccattccggatgttccaggcgtttcccctcggtaatccaatgaatcagcgcggtcttgcccacgcccggctcgcccacgaccagtattttcgcctcattcagcgggaacgtgtccggcccggacacaccgggttggctgtcttcctgtagacggaaataaaaatcgagaatcggttgcggcgcggcgggctgcgcgtctttgacgagaacctcctcccaggtgggcccgaggatttccggcggcaggcccaatgccggattggcgtgcagaaaaagtttctccagttttgttaaacgtcgaagcgactcgggcagcgtggaaagctgattgttgtcgaggtacagtcttgtcagcgcggtgagttggcctatctcccgcggcagcatggaaagctgattgttgttgagattcaattccgtcagcgcggtgagttggactatctccggcggcagcgtggaaagctgattgttgttgagccatagttccgtcagcgcggtgagttggcctatctccggcggcagcgtggaaagctgattgttgtcgaggtcgagtcttgtcagcgcggtgagttggcctatctccggcggcagcgtggaaagctgattgttgtcgagtcgcaattccgtcagcgcggtgagttggactatctccggcggcagcgtggaaagctgattgttgtggagtagcaattccctcagcgcggtgagttggcctatctccggcggcagtgtggaaagctgattgttgtagagtcgcaattccgtcagcgcggtgagttggcctatctccggcggcagcgtggtcaatcccattccgttgaggctcagccttgtcgcaccggtgcgttgcgcttccttaatcttctgcaaggcctcttgataggcgtcgtcgtgtttcatgatctattcctcccctgcgtttagcctctcgccgcacgacgcccgcgcgcgccacgcctgcttccggtcattcgtgcgggcctttcaatttcaaaccgttacgatagtataactcatgactcatttggtcaagtaatccgccggaaagggcgatagcatcgggttcggcgggtcgcgacccgccctacgcttggggcgaatgattattcgcccctacggattgatggtgacggtgacggtgtcgctgaatgcgcctactcggttttggcggtcgacgtaggcggctcggtaggtgatggtgaggggttcgggattcatggtgtggtgcgtgtagggcgagcggttgtcgtcgtttaggaacacccaatcgctctcattgggcggaggaccgttgccgatgtagtaccagatccgcacaccgcgcatccccgcgggc

SEQ ID NO: 616 - DNA, 12123 bp, Artificial Sequence
  Synthetic Oligonucleotide
ccacccagccgtggatgagcgagatctcggttcacccccacatgcgtggggaatacttctggttgagattcgcgatctcacccgccatcggttcacccccacatgcgtggggaatacacttgatcaatagagagctaacaggtcattgagctccttcaagccttagttcaaggatgtttggtcattagtttgataccctcccattccgtaacgactcttgatgcggcaccccagaattcgatatcaaaaccctgttcggcctggctactccagatcatcaggcaagtcccaccgctgcaattgcttctaaccttatcccacagtttgtccctaaccattgctgagactttacccacaaacacccccgcctttacttccagcagccaacgtgtgatctgaccccgcaaggagtttggcacgttttccaaaaccaaaaccaccatcaatcttcctttggcagatcatcctgcccgtaagatatgccgcctggggaaacttctccatctggagaccagagtcctccaggcaaggctggttcttcggcaaaacagtcatccgggctatcctctggcataatatcaccgaagagagaactaatgtcagcgacaatgcgtttgagtagattctgcctgtggaattcatcacggcaggcaagcctgactctgcggtcgagttcgccgatcccttcagcggtcgcccggaatgcggcgggagcagccatctccattttgtatagatccgcgatatcatagacaaatgacagttgcttgccagtgtggacaaagcccaatccgggagagaatcctgcagcaacgatggcagcgtgcgatatgccgtagaggcatgagtttgccacagataaagcccggtttatggggtctgctttattccagttgtctctttgatagtttctgccctgcatgggcacaccatacttttgggagagttggaaatatgtatcgcgcacccgggcaccttccttgcccctgatctggttcaaagttaaatctggagaaagctcatcctgaaaccttaactggtacatggcgcgtacaacccgtagatgcaaaaccgggtctgcccagtactttgcctgtttcataagattgacagcgctgcgggttgtacctgtgcctgcggcatagaacctgacgccatgttctcccacccaggctacgagacagccacaggcagccagtgaaagtattgccgcatgtgtgatggttatgcccggtcccagcatcagcatagccaagccggcacaaggaaccggggtttcacccagagcgtcgtgaatggcgatggcttgcccgttctggtcaattttggcatgctccacatagagatagctaagccggtctctgatccggggaatagagtgcaggtctttatccatcattcctgattggcagaactgacagcaggccaaagccgaaacttttcgcttttccaatgccgctgctaagcgtttccaggaacagtttcgggtcatccacctcgagaactccctccaggagagccgcacggaagcgcagaggattgtatgtgtgttcacgccagtagccctgcccctgttcctttactttgacattttttggttctggcttggagccataaacccaacccagttgaagaagctcacagcgctgaagggtgaagcccagctttgggcttttggcagccagccagtcggcaagggcctgatccggggtggaagaagcatcccaggtaagagaaacccttttgtgcaggattttgccagtttctatggtttgaccgtcctgttgcaccatttcaggaatatgacggcgtacgctggcgtttacccgcagcctgaaccgcagcagttgtcccgctttaaactctggattatactcctttgtttccggcggcgcggccaggaaatcaagcgcgttttggaagcaataatcccaatccggctcaagaacggactggacgataataatcgcccttttatcgtttccgtcgatgttgttatcgacccggaaaaggaagggagttttttggaagtcgtttggcgaaaagggcttcaggaaatgcggatcctgctcccggcgtaaacctgaaggaaacgccatggagaggcggcggtggacgttatagacattgtccagccactttctgccggggcgggggcggtctggattgcctccagtatcgatcaatagcctggacaagtagatcatccgtcttcctcctctggtttcattttgcggaaacgctgcccgcgcgaacggaactcgactatttctttgcgctttgacaaaatacgctcccgccagatggggtcgcaggggtcgatgcgatcggtggtcatgccggaaccgtattccagcatggtgcaggcgtcgtggcagaggcggcacagcgcccgcagatcttccggtacttccttgcctcccgccctgcggtaatccacgtgttgaactgtcgtggcaggagctttgcacaccatgcacgcggcatgatccatcacaagccgctccgccctgaccttcttatactcggaattgctataatccgcccgggttcctttgggcctccaaacgttggttccggtttccctgctcacttgcacatcctctcccacaaacagctcacgcctgatcacgaagcgcggcaaatgtctgggcggctgaaaagaaaccggcagatcgtaatgaatctctgcgtcatcaggtgcatgttctccgtcacggctgggaatccagtccatgacgcaaggcagtgtttgcggcaggggttcattgtgccagcgcttttgcaggggaaccgcggacagcgcctcctccaaagtgttgtaaaagcccggaggatgctcgcctacgggacgtgaagggggacaggatttgcgccccagataaatagcccagaccggcttggccagagcggtggagagcttttccacaagttccggctcaccttgcaaggcgaccagaaaactggcgtcggcaagatattcgcggcgtgagagcaaagtctctgccctggtttgtattttgtttggtgtcaaggtctcagccagggccgctccaaccatggaaggtttcttgggtgccttcagctctgccatgcgcattctttgtcccgcgcccacagtgtggaaatcccaccagcgtatgccggggcggtctatccgcacgcccatgcgcaggttggcaagttttgggagccatgaatcagcagcctccgcgcgcccaattcccattgccgcgcagagcagtcccaggacaccagattttgtcggagcgtcggcagtcctgcgcaaagcaaacttagcctcgttgctgccccaggactgcaaagccccctccaagcgcaagaataaggtattgggtggagcactcatgtcacccgccaacataagccttgcttttccgaacttcttcccactcgaagctgccaatataatccaacacggcgcttacaagctcattgaggttgccaatgctcctggaggccagtttgggatgctctttgccaagggaatagcgattgtttggagaaaaccagaagctgataactggggattgctcatcataatagccaagcctgatgtcgttcacgtagttggaaagctggccgatgctttgctccaccaggtccgaatccttgaccagggaaactggcctgacgaatgcgttggcgtagctaataggggaatttttgaactcgacaagtatgccatctggcaagttatgagcggcgaagctgttctgtttgccactggggttggttttggcagcggcgaggagaaaggcacccacggtgtgggctgccagatgagtgtctcctttcaggttcttgaccaattgctcccaatcaatggagaagtatttgtagaaacaggctgaggcaaacatggattcgccaatatgacccgctccggcgtcttcaccaggaacatcatcggccgctacaaagtagtcgatctccggcctggcaatgtgggtggaaagcgcatgtgcaacctgcaaagcgcattccacgccagtgtttttaagctctttggtctccaacatcctgccgcaaagtgctatatcaggagaatggacgcagtttgtaagtagttccttaaacccaagcagtttttcactttcaccgagattggagttggaaagcaggacggccatttggcgtagggcatcataggtggtaaaaatcagcatatccgacgtatcagccgcctgctgctcttcctgagcttcatcggtttccgcgggtatctgttcggacttttttccagctttcttggaagatttggttttaactccacaggcttccaggaactttgcaaccagcttcttatctttgttttccagcatttcctcaagtttctctgccagacgccttgttcggatacctcctctaaggtctgcgaactccggggcaaaacggatgctgcgcttgatgcactggctggagatgcgcgaacgtaatactccaccgaaataacaggtcttgggggcgcccaagtcgtcccggttaagatttgccgggctgtgattctgaatcatatgaatttcaatcaacatctgaatcctccttgttgatcttgtatgctttagtaaatgaatccgaccattctcttttgacagtctcctgctcccaaaatgacagaacatctgtcagatctacccagtcaaagtagacctgctggtgctttcgcaaaatacccatgatgaccaacagcggttcttccatatgcataatgtcaagcgatgcaagttgatcaaaacgtgccagtacacggggtaattccttttttggtccaagtttccggcaaatgcttcccataagtatgggcaaagtggcttcctcgcgctgttcaaagcggaattcagcaaaaagtttggcgatcaaccaagccacttcacgcttgggggcgcgttgattcttttgccgcaaaggccaccagagggctgtaaaaaggtcaaatccgggaagctcttcatcaagccgggctcccctgagttttctaagaatgcccaaatcgccttctttgaggttctccaggcttgtaatgaagtcaactgttcctctattcattttggtccccctctgcgggttttgttttggattctggtataattggccagggcttgcgggaaatgaatttacctctcttgagcctggcgtccactgtttgagccggctccaaagagcacgcaacctttgtgagcagttctctgtattcagcatcggcatcctgccaggaatagcccctgttctcagtcattttacccgcattgatggcaattctgctttcggcgtgggggataatgtcagcaatctggggtgtgcccactgactttttgaaatcacctctgagagatatcttgcgcatgatattaagggcagtagccctgtttgccaattgagccagcaactcatcatttgtatcagttccctcaaactcgatgatcttgtcccagatgtctatgctttttgctttatcactggcaaatccaaccaaccagagttttccttttctggagtttccttccgcgcgcaaatagctgaacagcggactataccaatcccggtccgcgaaagtgtatctatcattggacatcagtttgattttggactggaggctttttttcagatcggtgtaaacaccatgagggtctttccactcaaggccttccggtactggctccacttctatgctgcaggaatagacgagagcttcggagggtaagccgcaggaactacatgctgcctgacctgggacgggatcatgcagatgcaccttgcgcggcagccaggtcattccggcaagtaagcccacttccttgctttctttttgaaaagaacccaaccatgccggaatccccatattatcccagggttgccaattatgagccagcatgccagcgaggtcatttgcatgccagagcaggtaaaatggaggagtgttgttgattcccgcacctatccctctgccaccgacagtggtaaagacaggtaatctcagcagtcccttgatgcagcaagcttcgcagagcccatcgatatagtcggtgacatgattgaaatggcatagattatgagctgttggtatctcatgaataaggtcggtaatggctctgatcctggaacttggattgtcttggtaaaaccgggggccatccccaaagagctcgaaatactccttgttttcctccagccagggtatccaggagaccggaagcggcttatcaggttcaggggcctcgttggtgttagcgaaacaccagtagccaagagcaagcaggaatctgaagacagcaaacctgtccatggggttgctgtatgccagttgcagattgtgtgcatctttaagagtctgcactaaagatattctatctggtttgcccgaaagatagatcacatttacccaattatcacaaagaagattgtacataatatgctccatttgctcaatggaaaccttctattatgaataaagatcattgtcaagatatttgctttgagtgattattagggcgggaataatcaaattagggaggtctccctatataaacccgccaccgaaaacctcaaaccccgtcactctgtcgatttgcccggacattaacaatgaatcattcagcatggacggcattatgcctgacaaaatgacctggaagcattgttgtctcgacaagaccctgagtcaatcgtgacgggctcaacaattctcttgacgtaattaaacagcctgtctatgaaagccaaccaaaggagtttattatgaaaaacgctttagcagtattgtttttactttctttactgggccagatcatggccctgaccgtctattcttcagatgccggcggctattggagcgaccccgcggcctgggctggcggaagggtgcccaactccggggatgatgtagttatcaacagcaccgtttacgcggacaccacgggttctccccatcagtgcgccaacctgacggtcagtggtaccggatggttgttgaacccggggggtaactcccaaaccgaggtcatagtcaatggcagcctgacaaatcacggcacaaccaccagctatcgttggggctactatccgggaacccttacggtcacggtggcgaacgccattaccaattctggctccctgacaccctggcatctgaacctgagcgggacgaacgcacagcatctgagcaattcagggactttctgcccgaaattcttagaggatctttatcccggcagccccttggtattggatacggatctggtggtctcgtcaggcaccagcatcaggatgaacaacgcctcccttgtgctgaacggcagttccgtccaccatataatctgctatggatatggtggcatgacgtttctgcaggacgcccagatcgtgggcggcaacggagccagcatcacttgccacgacggtttcttcctgaagaattcagcggcggacgagatcgtattgcagggtatggtggaaatcgcaggcaacctgaatgtcggacacctgatcaacaacggcgaggtctataataaaatagaccaaataggatacctgagcgtcatggagcggctggacaaccatggcacgatccggaaccatacccatggagcacgtttagaacttaccctttacggcggcatctacaattacgggacgctcaacaaccacctgacccacctggcaggatcgcaaatccaccacctctggcagagcacggacgctccggcgatcacctgcaccaactttacttccagttccacagggcccgcccgattgatttccaacctcaggttcagcggcaccaccatcgatttcagcggcaaccagatcaatctctacaatgccgcggatgaatgtttcacgctcaaccagtccggcggaagcatccggaacgcggccatctcgggcggagcaagcggcgccctgaatctgaacagtgtctacctggaaaacgtcagtgccgaccatataatcacttacggcgagttcgcactgatagggaccgtcacggtgggaacactcatcaataacgccaccctgttcaattatatgaactattacccgaccttcagcgttacccagaagttggaaaactatggcacgatccggagccatacccacggaggatatcttgaaacccagatccgcggcgacctctataattacgggacgatcggcgttcgccggctactggtgaacggcacaaccgatcaatatgtgcgcaacgcgggaaccatcaacaccgaacagggctgccaactggtctccgaactgggcccggcgcaatggtatttcaatggcagcctcgccaacgccaatctggtgaccaaccaaactgtcaacccataccaaatcggcatctggcggccatatctggacggtgtctggggcaggcagatcatctttggcgagggttcggctttgacctcgccggtaatagtttccttcacaaagggagtttcagccctgaacctgacgtggacagaagtgcccaacgccgtattttaccgcgtttattcggctccggctcccaccgggccctttaccgtgctgacatccgccgtccacgaccccaccgccggcgacggcctggtcagttgtgaaatccaggcgggcaactcgttcaggttctatcgggtaagcgctctgaactgaggcggaaacgccttttgaacccatttgcgggaaagaaccgccgtgtgtaatgcgcggcggttctttagttatcggacttggaagggcggctgcccgttcatttatctatatcattgtaatccgttgtttctgaaagactggatcacgggtcaagtcaccccaccaaaccgctgcgcgctttggcggggaccccgacagcccgtgatgacacgctttttggtctgatagtggtttgttgcggggctgggtggttgcttctaaaaggctggatcacggctcataccaattcgctttcatcaagctgttttatgctatttgtgatctgacattctcttgtgaaatccgtgtaaaggtgaaatggtggaaaggagccccagatagactctcgtggtgccgtgttgattgtggacgcagcccaaaacaagccccaccaaaccccaaaaccgtgtcatcacgggcaagcgcatgcttgacccgtgatccagtcttttaaaataaccagccagtctggaaacaaccggcatcaattccttgacaaccgcataaataaacctgtaccttccgcaatatccttcatagcgccatccttcactgccacaggaggttaagccatcttccttaggtcatccttataaattataaggatgacctaaggaagactcacgccaaaacgacggatgcaaatgagagccacccgcgcgcgaggggaaatggaggacagccagctcatggccgcgcaattatgggcaagtatatttatatacttgccctgggttccgcttcccgcctggcattaaggggtcgtagcacctatatatatggggggattgttggtggaaaggtgttttgaggtggaaaggtggaaaggtgaaatggtggctgtttttttataaccttacgcggatgttccttaaaagactggatcacgggtcaagcccgtgatgacacggtttttgggtctgtcgtggtctgttttggggtttggtggttgttccgaaaagactggatcacgggtcaagcccgtgatgacacgcttgttggtctggtatgttttgtttcggggttgggtggttgttccgaaaagactggatcccgggtcgctgcccgggatgacacggtttttttgtctgcgatggtctgtttcggggttgggtggttgtttctaaaagactggatcacgggtaagccaccccagagggggccccgacttcccgtgatgacacggtgtatagcttggtgggacttgttacgggggaaccttttcaccattccacctttccacttctgataattcgtgttaatttgtgtaatttgtggatattttaaaagactggatcacggctcgcaggccgtgatgacacgttttttggtcagttgtgctttgtttctgggctgccgaagtctgttcggcagaggcaacggagttgcctgtttggaagagacctccggtctctgtggcaaacggactttgccacccctgggcactggctaccgtctgccagaattctctttgcttgacagatttacgcttttcacatatattattttacatgggctggtatccagcccgacaaggaaagaaacatgaaagaactgataataaaagctattagcggccgcgagccgcaagactttttgggagaagatagatgagcacaccccgcggtgaacgcgtcaacatcaccctgttgggtaaccgcaacgccggaaaatcgtccttgatcaacgccctggcaggacaggagatcgccatcgtttccagcaccccgggcaccaccacagacccggtggacaaacgctatgaactgctgcccctgggcccggtgaccttctttgacaccgccggactggacgacagcggcgaactgggcgaaaaacgggtgctcgccacctataagatactttaccgcacggacatagccgtgtttgtgaacgatggccgccccttcgcggagagcgagctgtcctccctgaagcgcatccgcgagatgaagataccgcttttaatggtctttaaccacagggatctgcgcgagcctgcccccgccaatatcgcctggtgcgaggaacggggcctgccctgggtctccgtctccgccctcaagggggaaaacatcgacgccgccaaggaactgctgatcaagctggcgcccgcccatctgctggaggaacgccccctggcgggtgacctggtgaaggccggggacagggtgctgctggtgactcccatcgacctcgccgcgcccaagggacgcctgatcctgccgcaggtgcaggtgattcgcgaactgctggatcacgacgcggtggtgacggtggtgaaagagcgggaactggcctatgccctgcaaaccctgaaggaaccgcctgatctggtgatcacggattcgcaggtggtgctgaaggtggtgaatgacctgccccccgaggtgaagatgaccaccttttccatcctctttgcccgctacaagggcgatctggacgtcctggcggaaggggtgaggcagatcgacaagctgcgcgacggcgacaagatcctgatcgccgaagcctgttcccaccacgtgcaggcggacgacatcgggcgggtgaagattccgcgctggctgagccagttcacgggcaaggaactggagtatgaagtgtacgcgggacacgacttcccgcccaatctggaggacttcgcgctggtgatccactgcggggcttgcatgctcaaccagatggagatgagccgccgcatcgtggaagcccagcggcgcggagtgccgatcaccaattacgggctggctatttccaaggttcagggagtgtttgagcgggcggtcgcgcctctgtatccgcaaggatagggtgccgttcgagccgagtccacttttttccattctgccagtggaggcggccacgattccggcttgacaaatccgccgccatctggcatagtatcaaaacaaagcttagttcagggaggttaccatgtttcaacaacaaacgcccaaacctgtcgtgattcagtttcccaagctcaggatcaaagccctgcctgccatagtgctggccattctgctgctgggttttatgctttactttgtgcttccggtgttgcatatccgttttttggactggatcgtccccctgatgatctgcctggctccgctgctggcaatccggcgcctgcgcaagatactctatgtggtctatccccttctggcgctgtggctgatcctggcgcccttcttctcttccggcatcttcaattccggcagctaccgccgcatgatcggcgaggtggaaaagaccgagttttccgaccttgtggcgccggtcaatctggatcaggtgccgatcctggattccgctttcgccaaggatttggccgccaagaagctgggcgaggactttgccctcggcagccgggtggtgctcggcaaccccaccatccagatggtggatggcaagctcttctgg

SEQ ID NO: 617 - DNA, 12070 bp, Artificial Sequence
  Synthetic Oligonucleotide
attgcccaggacggagccaaaggcgaagtcctggggccgacggcaagctacactcgtcccgagtcccgcagggacgacggaaaaccaatcccgccgatcctccgccatccctacggaactccggtgatctcatatctgcccctgctccggaaccccaggaatgaattcctgggctattgcccgcagtgccctcggcactgatgctggatctggaataattgtgcccagtccctacggggccaacgctcgtttcacgaccctgctccagccccggcgtttcatcacggctctctcgtctgtccccgcggcactgagcctggatcttaggccccccgctccgagtcgaggccatcccgtcccggctactgacggtcgtgtctttgggacggtgccaggagctacgagaccgggcaatgatcatgccggccccatgcgagagcgttcgtgcacccccacaccgggggaaacgagtgtaaacactggggtttacactctcccgcaccacccattgacaccacgggaaacggctatatactaacaggtagaagaagggagagaccccggagcgggaggggatctcgctagtgcggcagtgcggcgcgttggtcatggcgagagaccccggagcgggaggggatctccccagccgccgtcctccgccggcgagccgggcagagagaccccggagcgggaggggatctcccctcggagagagacggtgggaggactcccgccgtcttgtagaagtcgcatccgctgccgctacaagcgggtgccaaactcgcggcgtggcctgtgcccgcgcagacgagagtcgcgacgcagctttggactgtcctgtgagcatggcgagccgtggccagcggggcccgtgagctgtgccctgctcacccgatccgacggaccgttccgcctctggcggagaggagatggaggaacatggcagaatcgtttaatcttctcgagaagggttggatcccagttctgttcggcaacggggaggtatgccgggttggcataacagaggcgtttactaaggctggccagattcgacagatcgcgacaagcaatccgatggaccgtattgctgtgttgcgtttcttgcttgccctcctttactggtgcaaagggaatcctcccagtgatcgaagcgagttgcctcgagattcgttcccggcagattggttctccaagctgaaccaaaacaaagagtgtttcgaccttcttggtgatggcaagcgcttctaccaggatcgcagcggggttcgcgtggctcgcaccgagaagggaaaagaggcggttatgtatctgatccaggagattcccactggcaataacttctggcatttccgtcattcgaccgacaggcaggatgggctgtgtattgcgtgttgtgcaatgggacttttgcgtttgccactgttttttgctatgggtgggcgagggtatccgcctggcattaatggcgctccgccgctctatgtccttccctgtggtaagtcgttgttggacacgctgctcgcaaactggcatgtggttgacgacctcggcgatccggcgtggctcgatcccaccgtcagaccaccccaaggtcagcccgtgcctatgcttaccgggttgacgctgctttccagacgggtatggttgtcggatccgacaccgcccccgggcatgtgcatcgtatgtggagcgagggaacaagctcttatccgaacatgtgaattccagactgcaggcaggcaagagaacgaactgtggaacgatccccatgtcgtttatctcgacaaaacgccacgacgtggcctcagggcttctgacccgacagcaccacgcggatttaccatggatcgcccgtggctggacctgctcgcccgtgtggtcgaaacacgcaagttcggagccgaacacagcgatacgccacttctcgtcgtaggatttgcaaccaagaaggctctaagcatcgacgtttgggagcgcacgctcgtcctgccagcaagggcatcgttcaagaacgatcccgtagctctcctcaggcgttggggcaggtggccatcgcatttcaagagcacgctaagcaacatactgagaccgaagtcgcaaaaggtatcgaacctgggtgccgctaccgcttccgtggtttgtcctcaagttgaagggcgagtttcttccaatgtaagtgtactgcttgctggtgggaatgaagcctgggagcgagcggcagacgaatacccacggttggttcagagcgtcgcaagatcgctttctcccggtttcacaacggcagcggtccagcgtcgtatgcagattgccgctgtaaaacccaacgtgcaggcagataagcaatcccgtaagaaacagacgcgaaagaaaggaggtgctgagtgaccgagacggagaaatatgtcgccaaactgacaacgctgaaatccggcgacctcggactgttgcgcttgcatgccggtcgagacctcgaccacagcgttgccgcgttcgacctgttcacgggtctctggtggcctctcaggaaggaaagtccgagagtgcctcgtcgaaaagtcgcatggttggtagcgaaactctacgcatttcgcccgatcccgcacgaccggggcaagacgctcgcacgccagcttcgacgatgcgaacccaacaacgacggcggccgtttcaggcagaagttcgacttgatgctgacgctctcgcttgacgagatcgaaccagcgctgcaatgggcgctcgacctggtaggctcgcaacgcctaaacattgactgggtaaaactcaccgatgatctctccatctgggagagagaagaaactcggctccgatgggccgaggaactccttgcacacaacgaaaggagaaacgaatgttgatagagatccacgtaatccaaaatcactgtccggccaatctgaaccgggacgatctgggcgcaccaaaaacttgctacttcggtggcgtcctgcgctcccgcatttccagccagtgcatcaaacgaagcatacgcaccagcgatgagttcaagacacttctcggcggtgtacgtacacggcagttagccaagctcattgccgaagagctcgcgggcgacgataaggtcgagaaacgagcagagaagattttgcacctgtgcgggttcgaggcgaagaagggtaaggctcaagccgccggcgaagatgaagaggctcccgaagccggggaaaggagcaagatgctcatctacacgactcgccaagcgatcaaggagatggcaaatctgctcaaaaacgaaggagcaaatgacaaggacttggcaagaagctttgctgagctgatcgccacccgaactgccgttccggatatggcactttcggggcgtatgttggagccgggcaaggtggatgaagaagtatggaaagagtataagaggaacgtcgaggcagcgctccaagtcgcgcatgcgatctctacgcatgaagccagaccggaggtggactactatgtcgcagccgatgacatcccgggcgaagacgcaggagcgggctacgtggacgaggcacttttcgcgtccgcctgtttctacaagtacttctcgattcactgggaaacgctcgtcgacaatctcgctgcatttccaggcaacaaagagcacttggccgcccacaccgtaggtgcttttatcagggctgctctcctgaccaatccctccggcaagcagaacagcttcgcatcgcattgccgccccgatggcgtgttgatcgaaataaggaataaccctatcaactacgccaacgcctttgccaagcccgttgccataggggaccggggggacattctcagccagtcgatcgctcagcttgcacagtacgtcctcgacctggacacgggctacggcagaccggagaaacgcttctggttctcacccaatctccgttgtcccttcagtgtggcgattgacaagaaggaagtcaagcttgccgatgagaacttcacctcccttgacgtactgatccctgccgtgatcagcgccattggatatgactggcagcaggtccagaaggttgccctaaggccagaggtgctcggatgaacgctaatacgctattcctccgtctcgaaggaccgctccaggcgtggggcaataacgaatcgaagttcctcgttcgccgcactgccgaagctccaaccaagtccggcgtcattgggctactctgcgccgccttaggcgcttcgcgcacatccgcgcgggatcaatggttaccgaaactcaatagcttgcttatgggagttcgcattgactccccgggtgtacgttgctgggatttccacacggtcggagccggcatgcaaatgcgcatcgccgaagctgaaggtaagacaaaaccgggagccatgctcacccgtcgagagtacctatgcgatgcatcattcctcgttgcccttcaaggcgagcatccgctgatagaagaactcgaaagccacttgcgcaggccgcgctgggctctctacctgggcagaaaatgctgtcccccatcgcggccactcttggagcatccccccggatcgttccccgatcccctttcggccctccggtccgttccctggagacgccgtcttcaggatgacccccttctggagactctggattgcctgctcgactggaggccgtcaaaggaccagtccgaagcacccccagacgcacttgtctgctatgacgtgccactcagcttcgacccgcccgcgcatgccccgcgcttcgtcgtccgcaaacagctcagtcttggcaccgacgacggtgtgacagtggcagatcgccctgctcaaacaaccgtgcgtaagcccgaccgcccccgggcagactaccgcaactccgaatacagaaaacgccgacaagaaaggctcaaagaggaccatcagctctgcgtcttctgcaagagtccagccactactgtacaacacatcacctaccgtcgcgcaggcggcgatgaggtccttgacgatctcagatcactctgtcgcctatgccatgatgccatcaccatgatagaatatggcctgggcatggacctcgaccgcataaaccccgaagacccacgcttgcgagaccagatcatcgaaaaacgtaacgagatcatccggtttcgctcgctccaaactcgaatacgccggctcgaacccgaggaggtcgaatagccatgtatctttcctatctcctgataaacgtcggcgacaacccggaccgcccgcgaccgggcaggctttggctccgaaacatgtatcacgtccaccagcgcctttgcatggccttcccgtccagggaccacaaggaaaacgatacgcgcttcctcgaaccctactcgcccgacgatttcccaataactcacgtccatcttccccgctcgtcaggcgtagggttcctctttcgcgttgacccaataccaggaggtagccccattatcaccgtccagtctgccgtggagccggactgggagtatgcattccagaatgctggctacctcttggctcaccccccgatcgtcaatgacttcgatcctcgcttcccgccaaatcagcgccttgcctttcgcctcagggcgaatccggtcagaagagcgtccagcaactcccgcgacagcgaaggaaacacgctcgatgcaaaatggcacggcaaacgcatccccgtcccattccaccagctcgatctttggctctctcgtcacgccgagcgtcctagcagcggcttcaagatcttgacaatcgcgaggaaaaccacaggctacgtgtatctcaaaaagaaggaaaccaatgaaaagtcccagcgcctcttctccgtactcttcgagggatacctcgaagtcaccgatactcacaatctcgccacgacgctcgcaagaggcatcggcccggccaaggccttcggcttcggtctcctttccgtcaagcctctgaaggacacgaaccaatgatcccagccagcctcagcaatccagaagcccacccgaggcgaccagggggcaccttcctgcctcgaagcgtctccccgagtccctcggaactgacaggccatgcgtaacctacatgccttgccgaagttcggcgaccggtggagttacctctacctcgaacatggccggctcgaccaggaggccgccgcactcaccttctacgacaaggacggcgacctccgcatccccattgaccaactcgcagtgctgatgctcggccccggtacgacgctcacccacgccgccatgaaagcccttgccgaaaacaactgcctcgtctgctgggttggcgaacaatgtgtccgcgtctatgcccattccaccggcgggactcacacctccactcgcctccttcgccaggccgcgctctacaccgatccggaggaacgccgccaggtcgtgatccgcatgtaccagaagcgcttccccacaccgctccccccaacgatctcgatcgagcagatccgcggtctcgaaggctcccgtgtccgacaagcctacgagaggatcgctcgcgaactcggcgtccactggcactgtcgctcctacgaccaagacgattggcgggccgcggaccccctcaaccgcgccctttcggtcgcaaattcctgtctctacggcgtctgccatgcggcgatccttgccgccggctactctccggccatcggcttcatccataccggcacgatgctcagcttcgtctacgacatcgccgacctctacaagacagacctcaccgtcccgctcgcgttccgcgtcgcagccgagtatgaacagcgcggagctgacgcgcaagagccgcgtgggatgatcccgcggcaaaccacgccccccgcccgctcgccgcggaccgacagcgccgaagctgccgaggagacgtgcggtcacatgcaacatggcacctcacccgcacgaccactcgccaacccttctccgcaaagcatctcccccggagctcgaatgccgctcgaacgtcgcgtacggcttgcctgccgagacatcttctacgaggagaaactcctcgaccgaatcctaccagacatagcggaggtgctacatgctcctgatgatcttggagaggtgcccaacgagtttgaggggcgcattgtcacgctatctgatcgaaccgaaagcgggagtcttcctcggaaatcccagcgcaagaatccgtgacgaactctggaaaatcgccctcggaaagatcggcgaggggtgggtcctccaggtgtggagtgatcgctgcccccagggctacagatggcgcaccttcggccagaacgatcgggaaatcgtcgacatggaaggtatcagcctcgtccggttccgacaccgaaccgcctccgctgacgaaaaacacgagaaaactcacgaccagtagaccgcaaaagctctttgacaatctgccttgccctactcccctctggagagcacacagattctcccttgtctcctcaggggatcgccctaccactaccccttgtggtactccgccccacctgatacaatatactggtatcttccccacgcatgtgggggtgaaccgccaagggcttgagattttgaggggcttagaccatcttccccacgcatgtgggggtgaaccagtaggaatccaacattaggtatgctgtttctaatcttccccacgcatgtgggggtgaaccgcgcatcgagcgtgtaagaacgatcagccaggtatcttccccacgcatgtgggggtgaaccggatgagttgaaagagtggtttagaaagattatatcttccccacgcatgtgggggtgaaccgccaaacgggaatgagcgtgagcgaatccacggatcttccccacgcatgtgggggtgaacctgcttccgcaatccgatcgaatactgtcatgtcatcttccccacgcatgtgggggtgaaccggcaccacactgaccgccagagttggctatgctatcttccccacgcatgtgggggtgaaccaccaatccccaccgcctccgccatgagcgaaagatcttccccacgcatgtgggggtgaaccttcgagggatgcataatggcgctgtgcgcaggaatcttccccacgcatgtgggggtgaaccagcttgctactcgcattcatcacgccgtcaacgatcttccccacgcatgtgggggtgaaccggtcgccccagtcctcgacaagccgcgcgtctaatcttccccacgcatgtgggggtgaaccgaagccagactgactcgatcatcgtggggatcaatcttccccacgcatgtgggggtgaaccgcaaaatgacacatccccgcctgccggtcccagatcttccccacgcatgtgggggtgaaccggttgggtacgttgtccggggcgggagaccaatatcttccccacgcatgtgggggtgaaccgcaagcgctcgaaaaagtcgcaggcgagccgcgatcttccccacgcatgtgggggtgaaccgtagtttccgcgcctaactgcgtgctgcggagcatcttccccacgcatgtgggggtgaacccgcttggagcatgtgtgcccgatattctcgcaaatcttccccacgcatgtgggggtgaaccttcctgcgccgatgccgcataatgctccctgccatcttccccacgcatgtgggggtgaaccgccacttccccagttgccaacctgcccatgcggatcttccccacgcatgtgggggtgaaccgcccttagacgaaaagcaattcgagggatgcatatcttccccacgcatgtgggggtgaaccgcttccagccgtagcactggaagccgtcaatcaatcttccccacgcatgtgggggtgaaccttggggagatggcttgcggaagccagcggctttatcttccccacgcatgtgggggtgaaccgttcgcactgcccgctttacagtatggctggcaatcttccccacgcatgtgggggtgaaccgttatccacaaaaaaagggcacttaggaaccgcatcttccccacgcatgtgggggtgaaccggggattgacatagtgcttgaggcaatggcgcgatcttccccacgcatgtgggggtgaaccgtattgcacttctgtcttggcggcggctgattaatcttccccacgcatgtgggggtgaaccggggccgaattgtaaagaattgtaattggggttatcttccccacgcatgtgggggtgaaccgtgcaatccccgcccccaatggcgtcttgccgcatcttccccacgcatgtgggggtgaaccagctcacaaagcatcgcccccgcgcctgccgcaatcttccccacgcatgtgggggtgaaccgtcggtctccggagcgggccacgaacagcgagtatcttccccacgcatgtgggggtgaaccgtttgtcccgacggggatcaaaccgcaagaagcatcttccccacgcatgtgggggtgaacctgcagccattgcggatcaggccgcgggggtgaaatcttccccacgcatgtgggggtgaacctgtatggggcagagccgggctgcgactggacggatcttccccacgcatgtgggggtgaaccgacccgcctcacacctgtcattccaagagatacatcttccccacgcatgtgggggtgaaccaacatggccgcatccggggggagggttccggggatcttccccacgcatgtgggggtgaaccgatggacagctcgtattcaaggtgtggcatggaatcttccccacgcatgtgggggtgaaccttttttcaggcctatctgaaaaaatccgaaagaatcttccccacgcatgtgggggtgaaccctctacagtcgccccactcagctcgttgcgtgcatcttccccacgcatgtgggggtgaacctatgattgcgaggatatcgggcacgcatgctccatcttccccacgcatgtgggggtgaacctcctgcgaccgagcaggtgctggctgcggatcgatcttccccacgcatgtgggggtgaaccagtggaggagctgagcggtgttgaaataatggcatcttccccacgcatgtgggggtgaaccaagcagaatcgccaagcccccaccagcgaagagatcttccccacgcatgtgggggtgaaccgccagaggggcatttccacgcgaaagaagcctaatcttccccacgcatgtgggggtgaaccgcaaggccttgacaaagcctctatccacgtcgtatcttccccacgcatgtgggggtgaaccctcatggccgtgtatgcatgcgtgcgggtattgatcttccccacgcatgtgggggtgaaccgggcgcgagcattagagatcgcatttcaacgacatcttccccacgcatgtgggggtgaaccgatgtacatacgaaagatttattacttctctgaatcttccccacgcatgtgggggtgaaccgccagaagggcatttcctcgcgaaagaagggcaatcttccccacgcatgtgggggtgaacctgcatcggcagctcttgaagccccgtgcatcgaatcttccccacgcatgtgggggtgaaccgcccggcttgtgttccgcagggcggatagcatgatcttccccacgcatgtgggggtgaaccgttagacgcttttggcgtgaatcggttgcccggatcttccccacgcatgtgggggtgaaccgaagccgggcccccggcggctcttgtggagccgatcttccccacgcatgtgggggtgaaccgtcccttctatctccgtcgccgctttgccgttgatcttccccacgcatgtgggggtgaacctggatgctgctgaccatgtcaagtcggtgcagtatcttccccacgcatgtgggggtgaacccgcagggagcggcgaggctggttttgggcccgtatcttccccacgcatgtgggggtgaaccgtcgctcccagccagaaagcttgatgatctcatatcttccccacgcatgtgggggtgaaccgtggcgcggcaacggacgggcgccgagtggattatcttccccacgcatgtgggggtgaaccgtagcccgatcgcaagcacttccaattagttcgatcttccccacgcatgtgggggtgaaccagccaagtggacagcgccacggctatcgagaagatcttccccacgcatgtgggggtgaacctagcgcggcacaacttgacattgtggtaaatggatcttccccacgcatgtgggggtgaaccgtgaatggaatggaatcgccaccccacatcgatatcttccccacgcatgtgggggtgaacctagggtaagagggggtacaggggggggaacggggatcttccccacgcatgtgggggtgaacccttttggagggcggtacagtcggagccggatgcatcttccccacgcatgtgggggtgaaccgcggactgagtatcgtagttggaatacgaatatatcttccccacgcatgtgggggtgaacctccacgagtcggcagtccgcggccgaggtgtgaatcttccccacgcatgtgggggtgaaccgccaggatcgcttttggcgggacttctccaggcatcttccccacgcatgtgggggtgaaccgggacgcggcgcagcggcgggccggcctcgcttatcttccccacgcatgtcggggtgaaccgttcaaacgtcccccggatactttagacgtctgatcttccccacgcatgtgggggtgaaccgagaaagcgcataggtcgcctcatccgcctttgatcttccccacgcatgtgggggtgaaccgtccgtaggccgcaaaacgttgacgtctttctaatcttccccacgcatgtgggggtgaaccgttatcggacacagcggcaatgcaaggtttggcatcttccccacgcatgtgggggtgaaccgtggaggcgtcctggcgagtacgtggccggtcgatcttccccacgcatgtgggggtgaaccgttatcggacacagcggcaatgcaaggtttggcatcttccccacgcatgtgggggtgaaccgagccgccgggggattcgggggacacaatacataactcctgggaattcggggaattcgggggacacaatacataactcctgacctgc

SEQ ID NO: 618 - DNA, 11814 bp, Artificial Sequence
  Synthetic Oligonucleotide
aggaggtccagataaattagagtgtgcatattcattgtatttttcaagtttcagacacacacaaccgactttttcaaccacaaaacaccaccaaccctattgttatccatttaccacccggcattctttttctttcttcgtgctcttcgtgctcttcgtggtgaatcttcacagcacaaatcgaattccatgatgtcatctccttgtttcagttgattggtatcctcaccacgaagaaaacgaaaaacacgaagaaggacagaaaaacaatctatcggcaggcggtaggaggtccagataaattagagtgtgcatattcattgtatttttcaagtttcagacacacacaaccgactttttcaaccacaaaacaccaccaaccctattgttatccatttaccacccggcattctctttctttcttcgtgcccttcgtgctcttcgtggtgaatcttcacattacaaatcggcggataccgtctttcaatcggaccgtgttgaaattcatgagcagtccgatgcgcttctttgcgagcttgagataggtcagcaattgggcctcgtgaatcggaatcactttgtccacggacttgacttcgatgatgatctggtcatcaaccagcacgtctatgcgatagccgcaatcgaggaggacccccttgtagcgtacgggcaattcgacctgcgtggccacggtcatgccatgcgtggacagttcatatgcgagacatttttcataggtggattcgagcaggccgggaccgagttcgcggtgtgcctcgatggcgcagccgatgacccgattgctcagggcatcgaattccatggtgtcatctccttgtttcggttgattggtatcttcaccacgaagaacacgaaaagcacgaagacgaaccggaagagaaggaacaagaaaccaatcaagacgacggctcggcccacgaaattgctttcatttccatgtcttccgcgcatccggcaattcgtgcatgcgcggtcctcttgcagcaaaaaaatcctaccgcacaatgttcaactttgtctatcaactccgacttcttcttcgtgtccttcgtgtccttcgtggtgaatcacctaaatcaccggcaaggcgagttccttgccttcgccggtaaagattttcgccagcgacgcggcggtgcgggaaagaatatcgaacagggtgcgagactcaccatcgagccgatagcgcccggtcaccgcgccgattagtgcggccttggtttccttgtccatgggcgcttccttgccgcgcgaatagacgatatggacgacggcgcggtccacgacgggccggaagggttccataaggtcgtcggcgagacaaaacgcgtcgtagcggttgtgatgatggacgccaagggatgggtggaggccggtggcgcaaatcgcgcgggcaaccatcgcgcgcaggaccgtgtagccatagttgagaaagcggttctggtccggcgcttcccgttcgcgcttgaatgccggatcgtcgaacaacagcggccagtagcgccgcgcggcgtgggcttcgatattgtccgtgtcgcccgacttgacgcgtttggccatctcgaaaaatccgaaatcgctcttgcggaagtcgaggagcgtgcgcccctgcgcggcgattttcgcctggacaatctgacgccagatctgtttcttgacgggaagcgccgcttcggcttgcttgacgaaccgttcggcctggagatgatgctgttcgatgggcagcatcatgccgaccggcatcatcttgccgtcgcacacgacgaccgccccgccatgcgcggcaatccccgctagcgcaggctgcgtgaagacgacctgccggtgcgacgccacgacggccgccacctcgtctagcggaaccgtaaccggctcggcggacatcgtgatcgaatcggaattgtgccgctcgatcagcagccgctccatgttcacggacagccggacggcatccgtgctcaagtctatgatccgctcaatcattcgcccgacgaagctccccaaggggggttgcgcaaaacttgatagattcagacttacggagcgtgtccggcgaacgggtacgtccttcacgaggaacatcaaccgcacgacgcgcatcgctaagctcgcggacatcaattactatttggccggttgagaactgtgacacacctgctaccctgtattgccgtacaacgccttccgtgtccttcatctgcacgacttcattcaacgccagcgaaaagaggaactttcttccgttgccgtgatcacgcttgatgacaggttcgcggttttggagtcgtcgcatggcttcgtaccggcttacaacggatccctcccacttcacatttccgcgcttgtccgtcgtttcgatgatttcgacatgatgattggaatcggtggtgacatggcgcacccgatgctctttgccgatcttgaatgtggcggcattcttgcggatgcggaccttgtgaatgggcaggcggcgtccatcgccggtttcgatgaagggatgtttttcggctgtggcgaatgccttcttgggatcgtcgctgtccagttcgtcgagccgttgtttgacctgtcgccgcacgatgggatcaacgatggcctcgatttctcccttggacagtgcctcgacgcgtttacggacatggacgcacggtttggccggatcggaagagggttgcgggctgtagaatgtatcctcgtgcatgcggccgttgactttgcgtgcgacgcggtgcgaaacgacgatttgaccggcggcttcctgaatgtcctgaaggaaacggtcccacggaggcgggacctttccgaactggcggcggcgttcctcggtggcgtgcttggcggcgtcgctgagcatcttgacggttttcgggctggtcagcgcgatggcgacggcgtccacggcgtggtggcggtgatcttcgcggttcttctcgccgccgtcgccgaggaccttgttgagcccccagcagtcgcgcaggtacttggtgatgacgccggtgctgacttggatgtgttttcggtactcggcgccgtagagcagtccgagatatttcgcggccagcgtcgaggcgtagcgggtgtcgttgagcatgcgggtggaaaaatcctcgaaatcctcgaggtccgccatctggaagcggcggagtttggcatcgcggccttcacccttgaatttagcgacacgatcgaggatctcctgatagcgtgcgggatcgccgccataggcctcgtgcggtgtgcgattgcgtttgacgctccggttctcctcgtggtagcagagcgtcttgttgttgaaggaattgtccaagcaccggctgaacgggatgatgtgttcaacatcgaattgcggcgcatcgcccaacagggtgcgcatgctgattgtcttgccggtataggggcatcgccattcgcattcctcggccagcagaaccttttcgatatcgtcgcgggagggattctgcacgcctatttcctcaaaaatgcgcttggccgccttttgccgggatttttcgttgtcccgcatttttcggctgattttcatgcgctcctgccgtggttttttcatgtcgcgcgcgatttcgatccgaatcttgtccggcttgccgtacttgttgatgatcgcattgaccactttgcgcagttcggtcagaacacgattgacgacgggattgcgcaggacgggcatgagttgctggcggacggcctcggccacactcggaagcatttcgacagcgatggccggtcccggatcgccatagacttctttttcggccgtcttataggcgatccccttctccatgagcggcaagagcttttcgatagcttgccgggagagcgaacaatacccgtcttcgagttcgatttccccgaaacgttttgccgtctcttcatcgagtccgtagtgctcgcgcccgcgcttagcaagggcggcgtctttttcgaaacaacggatgtcttgaatgacggcctcgcgttgggcgggcgtgaaccggaaccagcgttcgccgaaaatgccgtacatcttggcggatgtgcgattgccaatgagcttttcttcgccgccgttttcgagattgaagacgtacgctttgaggttcagcagtttgcggagcttgccgaaggtcatttcctcttggcggtcgagggcgtcgagcagtagggtgcgttcttcgggattgagcgggcgttcggaatagtcgggcgcgatgacgcggaggtcattgaccttttgaagtacacgaaatcgctgggcggcgggcagggccatgggcgcccgtttgcgatccggttcaagcggacatgccccgatcagatcgtgctggagtttgagtggtcgctgccggaagagggcgttatgaaggattttccgccattccggtgtaagcacttcgggatgatgtttcgattgggcgtcccaaatggcgttgaattcgtcttcgtacatttggcgggcggtccagcgttcgcggatgcggcgctgttcgggatccgaagggtctatacggctgaggtattcgccgagggtgcgcgcgccggtttcatgtattgccgcggccaattcggcgatgccctgtttcacgacgctcttttcctcatccttctttccggaggccttgcggttgcttaaaaatccgcgccgttgtccgagatggtagaaggcccgtccgagttcgtcccgttcgagtggattgtccagtgcgcgggctctcagccaatacggaaagacatgcggcagtgcttccaaattaaccttcttgtggcgggcacgcaatgtccggtcgagtgtcacgaaatattcgtgacgggcttgtgaatgatcgatatccccttcgggcaggagtcccatggcttgcagcacacggcccaccttggattgccgccttgcacgccgttcgccctgccggcggatttgcctcgccattcggcgtgccacgccgcgtgattcgtcttttcccgcctcgatatcgccctcggttccggcctcgaaaatgcgcgatcccatgccgacaaggcggacgggattatcgccgtcaaatccgaacagcgcccagccgatcgagttggttccaaggtccagtcccagcaccagcgattcatttgcctttttcatgacaggcctccccatctgaacaacacccgaaaaccaaaaacttgacattcccggaaggaatgtttataatatagtttagtatacctgagcggcgattgaccttcaaatcatagtaaggatctttcgatccgcgggcgccatcctacgggatgccctgggcgcctcccagtgaggcgtcctttattttttccgggaggcgcgcccattcattgctccgcttttcctgccacacccgattgcgcataccctgtgggcccaatcggaattcgacgccacatgacgaaatcgcacgccctccaacaaacggaaaagcggcaacaggccgcttctacggtaaacacagcatccttgccgcttccgaacccacaccctgtccgtggacggacaggctggacagcctgtcccacacacttgccccgatttcggctcccggtgaaactccgccttcaatgcctcaaaacgattctgtaacccattcaaccggaaaaaacaacttttttcagtaatggctgcctgtaacaacgttcgaaaattcaggactatcatgaaaaagggaataacaccaaaaaatttgcgcctttgcggctcgcggctccaacaggtaaaagccccgcatgcgcgcggggattgacggttcacccccacgtgcgtggggaataccgattggaccgcattattctgcgcgccaattccggttcacccccacgtgcgtggggaatacgtgcggatcctgttatatgcgcgtgaggttgacggttcacccccacgtgcgtggggaatacatcatctgtgtgtgtcatttccctgattcgatcggttcacccccacgtgcgtggggaatacgtttcgccgctttgcggcgaaacctcaatgctcggttcacccccacgtgcgtggggaatacaaaagatcccgattatgaaaagatcatggaaacggttcacccccacgtgcgtggggaatacgtcaccgttccacacacttcaacagcaagaaccggttcacccccacgtgcgtggggaatacgtatttgctttctctttacgctttatttgttacggttcacccccacgtgcgtggggaatacttctgtggcatgttcttcaatgtactcgcggtcggttcacccccacgtgcgtggggaatacgctatggccgttttctgttcttccgagacatacggttcacccccacgtgcgtggggaatacgccgtggtagtcgccgccatctcttttgcatctggttcacccccacgtgcgtggggaatacgtacctcggcccgcgggcgagttataatacgtcggttcacccccacgtgcgtggggaatactactactttggcaccaacagcatcccaaaaatcggttcacccccacgtgcgtggggaatacgcgcccgcgcctcggcgatcagtcgggcggcttggttcacccccacgtgcgtggggaataccggattcgcgcttggcgcggccaccggcggatcggttcacccccacgtgcgtggggaatacttgtgcgcggcctgttcatacgcggcattgctcggttcacccccacgtgcgtggggaatacttgtgcgcggcctgttcatacgcggcattgctcggttcacccccacgtgcgtggggaatacccctcttttattttctcccttaccatctccgccggttcacccccacgtgcgtggggaatacattcggtgctgcgccgcctcattcttgcgatccggttcacccccacgtgcgtggggaatacccattgaatttattggcattttggtttggtaactagttgaagtccttcccaatttgtaatccatcgggttgtttttccccagaagtctattctgaaaccttgttcgttcttggcggaaaagatgaggatggcgccgccatctcgtgcttccttgcaaaccttttcccaaagtttttggcggaccatggccgaaatggatccgacaaagacgcctgattttggttcgagcagccaccgcgtgagttgtccacgaagggatggcgagacggattcaagaatcatgatcaccatgtccaatatctccggagtcatcagcaccgtattgtatgccgcccggacatgatccttgccggggatcccagagtgcgccgggcagggccggatcctcatccaaacgcgtatcttcgtcaggtgggatatcgaggatctgggcgatatcgtcaacgatccgttgaagaaggcgttgttccgcgaacacgtcgcggcattgtattcggacttcccgctccaagttgatgggatggccggccgcgacatgaaaagcgagtggaacggtcatgtcgcatttgtaaagatcggcaatgtcgtaaacaaaggaaagttgctttcccgtgtggataaaaccgagcgccgtggagtaaccggcggcaatgatggcggcctggcagataccgtagagacaggcattggcggcggaaagcgctcgattgacgggatcggcggcgttccagttgccgcgatcgtagtttcgcccttgccattgaatccccgtttcccgcgcggcatgggcataggcgtcgcgaacgcgaacgccttcacgcccacggagttgctgaagcgtcagggaggggtcgattttccctttgaaccgggcctcgtaaagtcttcggacgactttcagccgggcggcatcatcggaacaaagggcggcttgccggagcagggcatacgcgtcgcgggtcgccccggagccggaggcatagtatcggatgccttgctcgccgcaccatgcggtaagacaggcactgtcggccagcgtgagtatggccgcatgggtaatgctggtgccgggtccgagcatgagcagggaaagggccgcacatggaacggaggtaacgccggtttcatcatgcaaagcgatcgccttgtcttcctgatcgatgcgacaatgctcgacgtacagataaccgagtttgtctctcactttcggcaattcgtgcagatcgtgtgtgcgcatgtcacgggttcacattgcatggcgcgacgctcaagagtccgaatccgaaggctttcgccgcgccaatccccgacgccagcgtttgggaaaagagcacgggattggccacggcaagcgtgccttcgagcagggcggaccggaatttcatccccttttctttttccgccgtaaatcccgacgaccagccaagttgaagaagggccgcacctttcacttcaaagcctcgtttggcgcctttctcggcaaaccacggcacgattacgtcttccggcttctgatcgtcgttccatgtgagagccactcgcttgctttgatctttttgacgtcctttggcgtctatccccactcgcggttttcgaagatcgataccttctctattggactgaatcttcttgcttaggttgattcggatgcgaaaacggagcgtgtcgccggtggtaaaggcggggttgtattcgcgggtttccgggtcggccgcgagaaagacgcgcgcgttgtggaaggcgtagtcccaattgggtttcagttcggactggacgaggatgatggcgcgcggggcatcgctctcgatgccgttgtctatgcggaacaggaaactgtgccggggattgcgcggatccgcgttcgcgttcccgcgcaacgggaaatcttctcccttgaagggcttgaggaactccggatcgtcctgcacacgcatgtttgaaggaaaggccatgcacaggcgctgatggacgtgatagacgttgcggagccatttcctgccgggtcttgggcggtcgggattgcctccggtatcgatcaagagatgggacaggaacattattcgacctcctctgggctgagacgccgccgccttgtctccagcgaacggaatttgacgatttcgtcgcgtttctcgatgatcttgtttcgccagcgttgttcttcggggttgatacggtcgaggcccatgccaaggccgtactcgatcatggtgacggcgtcgtggcacaggcggcagagggaacgcagatcgtctatctgctcgtctccaccggcacggcgataggtgacgtgctgaacagtggttgcgggcgacttgcagaagacgcagagatggtggtcttgttcgaggcgggctttacgtcgatccttgtattccttgttgccataatcggctcgaggacgcggcggcggcggtgtaaaccgttgtgcgggggtctcggcaatgcttaggacgccatcaatgccaacggacaattgctcgcgaatgacgaatcgtgggcgatgtgccggtggttcgaatgtcaacggcacgtcgtaccagacgagggcatcgtcgggcgcttcaggttgttcctccgtggattcccagtcaacgagacactcgacacacttaggcggtgtatctcctttgagtcgggcttgccatggcacggacgcgagcgcggaacggagatcttcaaaggaaccggatggatgttgcatcacgggacgcgagggcggacagcatttccgtccaagatagagcgtccacttgggtgctttcagggccgcttccagttcggcaacgagagcgggatcgccttgcagggcgacgagaaaagacgcgtcgcagaggtattcgcgccgcgtgagcatcgcgccgggtttggtctttccctctgcttcggcaatgcgcatttccatgcccgcgccgaccgtgtgatagtcccaccatcgaatgcccggcacatcgatgcgaactcccatgcgcagcgcgccgagcttcggcagccactcggcgggggcatcggcgcgcgatacgcccaatgcggcgcagagcataccgatgacgccggacttggtcggcgcttcggcggtccggcggatgacgaatttcgactgctgatcgccccatgcctgcaagggaccttcgaggcgaagaaagagggtgttagcgctcatggggccacctcatggtttgcgacaaccttctggacttcctcccagtcatggccgattgcggcaatcacggcaggaatcaattcgtcgagcgctcgaaggttgttttcagaaagtgcgatctccttcttatcctgcacggcgctcaaggtatagcggagattgggagagaaccagaatcgctgtcgcggctggccatatccgacatcgaggtcgtgaacgtactgcgccaattgagcaatgctctgcgcgatgatgtcgcgttcgccttgcgcggccggtttggcgaaggcgttggcatagctaaccggggtatctttgatctcgatgaggagcgcgtcgggcggattgtgggcggcgaaactgttctgcttgcctgtcggattcgccaatgccgccgcgcgaatgaatgcgccgaccgtgtgggccgccaactcctcgttgcccttcagattttcgaccagcgtctcccagtggatcgagaaatacttgtagaaacaggcggacgcaaacattgcttcgtccacataacccgctcccgcgtcatcgccggggatgtcgtcggcggcgacatagtagtccacttccgggcgcgcctcgtgcgtagaaatggcgtggcctacctgcaacgcagcctctacggtcgtgtctttcaggacaccggtttcgagcattctgccgctgagtgccatatcaggcacggcggtccgatcagcgattaggttgccgaaggcctgcgccagttgttcatcggtctttccgtcgccatcttgcagaagcgccgccatctcctggatcgcctcttgcgtcgtgtaaacgagcatgtcgctcttgtcttcgtcttttggagcgatgccgcattccttgaggatctttgccgcgcgcttcttcacatcggccttgccggttaccttttcagcaatcaattttgccaactgccgggtacggattccgccgcacaaggccttgaactgctcgcttgttcggatactgcgcttgatgcactggctggagatgcgcgaccgcagcacgccgccgaagtagcaggtcttgggtgcgccgaggtcgtcccggttcaggttggccgggctgtggttttggatggcgtggatttcgatcaacatgtctatttctcctccctgttttcgagtaattgttccgcccacctgaggcgggttgtttcacgttcccaaatggataaatcgtccgttagttgcacccagtcgagccgcaatttatttgaagcaagggttccgattgcccattgaagagctggttccaaccggtcgttcggcaacaggagcagcctgtcacacttcttaaagaactgttcgctgggtcggcaacggcgtaattgcgcggcgagcgcgcatccccgctcctggtggatgggacagaacgcgtagagcttcgcgatcagccatgccactgaacggcgcggtgcagcttgattcttctcgcgcaagggccaccagattccggtgaagaggtcgaatccttccagcgactcatcgagaccttgtcctgcgtgcgtgcgcaggaggctgaggtcgccggttttgaggttcgtcagggttttgatgaacatctcggtaggcgtcattcgctcgcgccccctttcttccgggtatctttcttgaccggttcaggtttgggtttcatattggggacaatgaattgtatggtccggcgacggcgtagggcctcggtcgtgaagccgggcgcaagcgatcgggctaccatcctcatcattggcctgtac

SEQ ID NO: 619 - DNA, 11749 bp, Artificial Sequence
  Synthetic Oligonucleotide
cagtatttcacgttttcgagtctcatagcgtcgttccatgacaattcctttccaggggacaaatcccctgaaaagttaatcgtaataaagacttacataactttaatgaaattggacagtacaaatataaaaaagagattttaagcgaaggcggctgggtacagaacaacctcctgctgcatgaatttggcgtatacaaagtataagaaccttctttctgccaatccaactatcagattccccttttcaaactatctactccgtatttccccctgatttgatcaaaagcagaatcgatcttcttttgtttttcttcctccgcatcggaaaataataatttctgcccagtcccctccggcgaaagcccggatacgccaaatcccaagagccgcagggcgccggcggatttcttataccactggtcaaatacggtctctgcctccagcaagagcatttgggtgatattggtgggtttgtccatcgtaaagctgcgtgtgattgtcctgaaatccccataccgtaatttgagcgttatggttcgaccctgcaatttctctgcccgaagacgctggccgacctcctcgacctgatggattaaaactccaaacagcgtattccggtcgaggatatcgacggagaaggtctcctccgcagaaatgctttttgcctctgtagatgtctctaccttcctgttgtcgattccctgagccagctggaggatgtcctcgatctgattcccgaaaacccttgacagtatgtagcggggagctgtcctgatctgttcgatggttttaatgccccatttttcaagctctttggtggtgactcttccaatcccccagattttagaaacaggcagagggtcaagaatctgctgtttattgtcttccgtaatgaggacaaacccatcgggcttgctcaggtccgaagccagctttgccaggaatttattgggggcaatgcctacggaagccgttaacccagtctgtttttttatgtctgtttttatcttctttccgatttcttctgcattgccgaataggtgaatgcaacccgtcacatccagaaatgcctcatcgatagagaccggttctacatccggggtataggcattaaagataaggtgaatctgcttggacacttcgacatatcgactcattcgaactggcaggacaatcgcttgggggcaaagccgaatcgcctgattcatcggcatggcggaatggatgccaaattttcgagcctcataggagcaggcggcaaccacgcctctttcctcaggagaagcccctaccagtatcggtttgccctggagggtgggattgtcccggacctctacagaggcatagaacgcatccatatcaatgtgcaggatggacctggcagtccccatatcgcgtattttcgctcagatacactgcggatctttattttccttagaatatcaaatctatagtgaaaagcaaatatctgaggaatgtttaaacagaaattttctttggcaggcagagaggaaaaaatataattacggggtgattccatacttcttcaagaaagcggcggtttcgtcagcaatctccgtttcaagaaggccatattgagcggaggtccggtccagaccgactataataatcccaaccgagtcaatgccttttaaactttcaaagggctggtcgggcctgctccttaacagtaaaaaacaaggcaaagaaagacaaagcataagaagatatttatacataaatgactcccttaaaagttatcctctatcgttccttattcctatccaattaatcagccgtttactcccttgaaaatcgcaaccgctattcctaagccgatgatgatgccgcctatgattataaaacctacattgccaagattataaatcgaaggatctttctttgatgaaggtatcttgcccgttggggcaatgggagttatcggagattggctggtcgtttgatttacgggttcccgcggatttaccgctggtctgacgttcagtttagtttgctccgctctctggtccaaccatttttgctgctgttcagcaatctgcttttggcgttccgccgcttccagccgtctttgctgggcgtgccattgcacaagagtatgagattggaaattctcccagttcggctcaatccatgagataagaagaagggcctctctgtcctcggcaataccctttctgaatctcaagaggccgctgcgcggccgcctgataatccgatctccttcccggacaggagcctcctgatagcaccatacacaggccgaatcggcgcttttgctctccaggggctgacctaaaagatcaaggacctgagaatcggtcattcgtacctgtaattgaactcagaagtctctgacggtccactgggggatagtgtcctcctgagcataaccaattgctgaaatgccaagtagataaataagcccggatattaccctcagattgtccataacggggattgtaagctttagagaagtattgtcaagaataagcgtaaaattctcttgatataatgggaaggatcattgtaaaggcccgatagaatcatatcaaagtcaaagttgtttttctctgatatggtaatccattcctgcctgtcttttattaatgactcaagacgctccatacgacatcactctttctaatctttcttaatcccaacaatattgatatcctcagattcaacgctctctatgacgattgtatcatcgccacttaaggcactcaaaaacagggtgtttactattttttcaaaaagccgtctttgcggcgatttgaaaatatttccattttctggatggtcaggttttgagaatagccgtcttcaatatcggggtgatgaatcagaacaagatgacccggacaatcctcaggactgaattggctatccattactaaccagtcgttatttttatattttggggataagaaatggcgtaccatgacttcggcgaattcggttcaccccccacatgcgtggggaaaatggcgagagagtctatatccccggcttcaatcacggttcacccccacatgcgtggggaaaatgcgatggaatcgtccgtcggaatgggctgattcggttcacccccacatgcgtggggaaaattttatggaagccattaagggtctcggatttgacggttcacccccacatgcgtggggaaaatcatggcacgccctaaaggactcggaaactatgcggttcacccccacatgcgtggggaaaattcatttgtcgatccgaaaacgccgtggaataccggttcacccccacatgcgtggggaaaattcaacctgattgtcggaaaacgtagtattgaccggttcacccccacatgcgtggggaaaatggcctcgcgcggctttgtatcgggaagcgggtcggttcacccccacatgcgtggggaaaatgacggctcgaaggttgacgcgaaagccggcgccggttcacccccacatgcgtggggaaaatgagggcagcttcggccgctacgcgccgtttgccggttcacccccacatgcgtggggaaaatacaacgtatgcagcacggtcggcgactgctggcggttcacccccacatgcgtggggaaaatcgatcagacgcagcatatagtttcgccgcgtcggttcacccccacatgcgtggggaaaatcttggtttgcgccttccagactttctcgaaatcggttcacccccacatgcgtggggaaaatcaatcaatctgcttttaacgatacgtttcatcggttcacccccacatgcgtggggaaaatgccgaacatcgtacaatcgacaaagcacgtctcggttcacccccacatgcgtggggaaaatcggaaggagaccactgtgctggatgaatataccggttcacccccacatgcgtggggaaaatgggggtaatgccaatacatgtttttatagagtcggttcacccccacatgcgtggggaaaatttctcaacgacaaaatgccgtctgaatatgtcggttcacccccacatgcgtggggaaaattggggaggattgatccaggatgaaaacaaagacggttcacccccacatgcgtggggaaaataaatcccgttattgatttatcgcgatggatatcggttcacccccacatgcgtggggaaaatacgcccttgatcggccaagcccagccgggaaacggttcacccccacatgcgtggggaaaatactgaaaattatcttgtaagtggggattttggaagcaaaagtccctcgaagtcaacaatcaaacggcgagtgtcaccagtagtacgaatagaaaatccctgctcgttgttactgtcgtaaatcagtatagccgcgccgcctttaacactacggtcaacgcgctgccaaagcaattcgcgaacccgtgcagaagtatgcccgacaaacactccggttttaggctgaatcagccacctagttagctcaccccgcagtgacggacttacccgctccaaaatcatcactaccatttttgttctcttcctgtaagtcgcccagtacagtctgcaattttaatatctgccctatcggcatatcggctttaagcgttaccggctgccaccagtctactggcctgctttcatctccggcaaattcctctatcaactgttcttcctgggccacggggacagacaagacctttgcaatatcgggcagaattttttccatcagtcttgtcgcgttgaaacatcgccgacactccatccgcacctcacgctcaagctgcggcggatttgcctttgccaagttgaatgccaatggaataatatgctcaactttatacaggtcggcgatgtcatagacgaacgacagatgtttgcctgtgtgtacaaatccaagcgccggcgagtatcctccagaaatgacagccgcgtgtacaagtccatacaggcaggcatttgctgccgaaagagcacgattaacggggtccgccgcattccattcctgcctattatatgagcgaccttgccacttgatgcccgcggccttggctgcttcggcatacgcctgtcgtacacgaatcccttccattccacgaagctgttgaagcgtcaggccggagtccgggacgttgggaaaacggatgcagtacatccgaacgaccacctggagccgtgttatctcattggtcaccagacgcgcctgcattaagagatttctcgcagagcgcgttccgccgcaaccggcagcataaaagcgaacggcatcttctccgcaccatgctatcagacaattgttgtccgccaatgtcttgacggcctcgtgtgtgatttttgtaccagggccgagcagaaggacggctaaactggccgcggggacactcgttacaccgtcttgctgccagagtgcaatggatttagcttcctgctcgatgactgctttatctacatagagatatgagagcttatccgagaacctcggcaactcctgaagatttattctcctattcacttgtcaaagaacctccttccggttttacttaaccggcgcaatagacaataatccgaagccgaacgccttgcccgagcctatgccggctacaatagttttgcggaattggtcggggtctgtaactgtcagcatcccatcgaatcggacagaaagcagacgtttgctttcaggtttatcgtcctgcttataaatgtagatatagccggattgaaccactgtatcatgaatagcaaatccaccctttttaccacgaacgataagccattctttaagcatatcaaaaggaacaggaatacgcttccctatatattgagggttaacaggatttccgttgctatctttggaattctttgtgcaccttcttgttggatttgctgtaagtcggaatttaaagaattgtccctttttgaaagaaggattgtactctttgatttgcggaggcgcagcaaggaaatgaccggcgttatgaaaagcatagtcccagttgggccttatagacgacgaaacaaggattaccacagtaccacccagttgagcatctatacgaaaaaggaaaccattccccgtccgtcggtcaatatgtacctgtccgccgccaaagtcttcgggcttgaacggatccaaaaagtcttcatctttgccttcgcgttccttagatggaaacgccatgcacaaacgctgatgcacacgatacaaatttcgcaaccaggatcgtgccggtcgtggccggtcaggatttgtccccgtgtcaatgagtaatgtcgagatgaacatcattccacctcctctgccgcaaaccggcgtcggcgcgtttcaagcgatcggaattcaattattttattacgcttttggatgatcctgttgcgccaatagcggtcttccggatttatacggtctaatcccatcccaagaccatattctatcattgtcaccgcatcgtgacacaggcgacataacgagcggaggtcatcgactgtctcatcgccgccggcatggcgataggtgatgtgctgaactgttgttgctggagatttgcagaaaacacaaagcctgtggtctaactgcaaccgttcttcccgccgttccctgtactgactatttgtataatcggccctcggacgaagtgggttcggggtatttttctgcaaaggggttccaacacatatatccccatcttttccaacagacaatgacttacgtatgacgaacctcggatggtgtgacggcggctcgaaggaatccggcacatcgtaccatattaacgcatcaggaggggcttcgggctgatcagccgaaggctgccaatccagtaagcaatctatggaatcttgacattcggccatatccaaccgcggctgccaagcgatagatcgcagagcggtatccagattgtcgaaatatccaattgtgtgccccaattctgctataggtcgcgatggcggacaacatttacggccaaggtacaaaacccatttaggattccgtaccgcacactccagctctcctatcaaacccgcgtctccctgtaatgcaacgaggaaggacgcatcacagagatattcgcggcgtgtgagcatcgcgccttccttagatttgccctcagcggtgcgcattttcattttcgccccgacagtgtgatagtcccaccaacgaattccagggcggtcaatacgaacgcccattttaagcttagtgaacggaagccattgtttgacatcgaaacgggaaatacccattgccgcactgagcatgccgataacacctgattttgtcggggcttccgccgtccgcctcaccacgaacttcgattcctgaaccccccatgactgcatcggcccttcaagtcgcaggaacaaagtattgccatccattacgcgaccccctgatttataaccacctttttaacttcgttccagtcgtatccaagagcgttgataacagccggaaccaattcgtccagcgatttgaaatttttgtcagcaataccgctttctttcttgatttctgctatgattataggatgccgtaaattcggcgaaaaccagaaccgctctttcggttttccgtatcctgtgtcgatatcgtgaatatattgcgctaattgggcgatgctctgcgaaaccatgtcacgtgatcccttgcttggcaccggactggcgaatgcattggcatagcttatgggggagccctttatttccaccagtattccatccggcaaattgtgagcagcaaaagcgttctgcttgccggagggattggccatcgctgcagctcgaatgaatgccccgactgtgtgcgccgccaaattcttattcccattgaggtttttgaccaactgttcccaatcgatagagaagtacttataaaagcacgctgacgcgaacatcgcttcatccacaaagcctgctccagcgtcttgaccttttacatcatcagcagcgatataataatcgacctccgggcgcgcctcgtgtgttgagattgcatgagcaacttgcaaagccgcctcaacggtagtgtctttcagaacgccggtttccagcatcctaccgcttagagccatatccggcacagttgtccgctcagagataagtgtgccgaattcctgcgctaattgttcatcagttttcttgtcaccactctgcaaaagcctggccatctcttcaacagcgtctttcgtggtatagatgagcatcttgcttttatacgggttattaggctcactttcttcatcgcttttcttgtttgtcttcttgggcttgaggccacagagcgtcataattttttcagcccgctttctaacatctgttttcccagtgaccttatcggctatcagcgtcgcaagctgtctcgtacgaataccgccaagcaatttctcaaattccttgctcatgcgaatgctccgcttgatgcactgacttgagatgcgagatcgcagtactcctccgaaataacaggtcttcggcgctccgaggtcatcacggttcagatttgatggactatgattttgaattgcatgaatctctattaacatagtagtttcctttcgctccctaaaaattcctccgcccaccgaaggcggatcgtttcattttcccatcgcgacaaatcgtctgtcagctttacccagtccacttttttattattcgaagcaagttctcgcaaggcccattgcagggcaggctcaattttatcgagcggcaatgatagtaccttgtcaaaccgctctccatagcttttctggcattcgggtttgtccggcagacaaaaccctaactgacgggcaaatgtctgtccgggtgaatgctccaccggacagaatgcatagagtttcgcgataagccatgctacttctcgtcttggcgcccattgattcttctgcctcaatggccaccagaggcctgcaaacagatcgaagccattgactgattcgtcaagtccctgaccagcatgagtccgcaacaatcctaaatcaccgtttttgagcgagccgagcgcctttatgtatgcttctgtcgagctcatgcttcttctcctttcttggtttgcaaatccggtattaaactggcgatatgtctccgtcgttggacagcatcagtcataaagcccggcgaaagcgacttagcaataacagtcatcattgggttatactctttcgctatcttctgccatgctgcatcatccgcagtaaataattctgctgcccgcgtggataccgcatactcgacatgcggccgaacggaaacaatcatagcagtagaaagcgacttcgatctgctcacacgagattcgagccgcttattctctttccgccactgttctacgaacggcgttctgtcctcacccaaaggcatggttacaacacgctcccacacatcgacattctttgcattatcagtagcgaacccgacaattagaaatgatgcaatttttttcccattctgcctggcaatacgtgctaataagtcaggccatggacgatccatacgaaatttgccggcttcggtcaaatcggctgctttgtaggacttacgagtcggcgtagaaaaataaagcacatggggatcattccatcgtgcgttttccagtcgtcctgccgtttgaaattcacatgttcgaactaattgtgtttttaaaccgcatccaatacaggtgtcaataggtccatctatttcatggagccacacccgtcgtgataatacagttaaccccgtcagtaatggaacatcactgtcttcggaaggacgaagagtaggctgagtccacgatggtacgccaactgatgcaacgcgtatccagtttgcagcaagagtttctgttagtgtcaagccgacaggaacaacatatataggcggaacaccatttattcccgacttgaggtcgggcaacccgctaactgaaaacagaggcaagcgtagcaagcccaagacacaacaaggtaagcaaagtccatccttttcatccgtagaatgtctaaagtgccaaaagttattaccggttggaatttcctgtaacaaatctgtaattgtacgcgaacgctttgcatttggatcttgatagaatcttgcggtttcccccagcagattaaagcaatttctgtttttttcgagtttcaagaaccagtcggcgggaagcgaatcgactggttgcatactgtttccttccggtgggtttcccttacaccaatataagattgccaatagaaatcgaatgattgcaacacgatccatcggattgctggcggcgatacagcgaatcttatttgcttgcgcaagtgcttccttgatgcctacgtggtcgaattttccgctggaataaagaaccggaatccacttttcatcgagcagattataattcacagatttctccttatgtctctatccctataaatcgaaaagcaggatacctctgtgtgcttgattgttttcttttctgaataaggaaataataccgaaatagtgtagacttggcaacaatcaatttctcttattttccgccaaacaaacctggtctgactgcagagataaaagatgcaacccctttcaattctctttgaaaaaaggccaatgacctccactgcctgcaaccagccgtttaccgtctaaaaacctgtctttcgagcatcctttctcagatcctggacatcctgtcttaattgctgatcttccatatcctgtttagccaataggacgctggtcttgctgagccggatctggcgtccacgcttgccattgccaaccaatttcctctcctttacccaccggcagatggtggccttactgaccaccagaatgtcggccgcctggcggtaagtgagccattccgccgtgttatcagagttgacagcgcgacatttccgcatagacagatccggttcctctctttcgcaggccaaagatctgtgaatcagattcagcagttcggccaattcacaccctgcgcctaccgccttgcatcgcagaaaatccagttccatgcgatccttcaggctaaagcagcccgcccgacagagcagatcgatggtcctgcacttggcggtcagggagtcccagcaatgcagcatctgcctgcgcagctttggcttatcctccgattccagatggcgggccatcgtttctatcgcccggccaaaacgccgctccaagcggagttgatttgtatccgtgttgatctgataccaatcgtttgtttgaacccattctaacacttgtgtggaaactgcatcgcctgttgtgtctgtcattggtttctcctatcgatgggctgcgatctcaacccaaggttgtcctgcgggcgcaccgtcctccggggaaatactgtctcggagttttccggtccttaacaagccctgcttatcgaatcccaagcctgaagaatccctgtccggctgggccttgattggttattgaatttctttgaccgaatcccctcttttgctggatcgcccgccgcggtttccggacaccccttcgtttgtgtcgcgatgggccacggaaggatattgtaggagccgccgcgatttgggcaagagatttttggagcctgttttatcaaattttgcggtctgtttgataactttccaatcgccaagaggttaggtcgatacggccaatcgaaagaagatgaaaccagtcgtttcatcgtttcacaatcgtttcactcaaaaaaattatttttctttttatcctcattatcaggtcaaaaacgctgtttttgacttcgtttcaatcgtttcatcgtttcattttcgt

SEQ ID NO: 620 - DNA, 11749 bp, Artificial Sequence; identical to SEQ ID NO: 619
  Synthetic Oligonucleotide

SEQ ID NO: 621 - DNA, 11640 bp, Artificial Sequence
  Synthetic Oligonucleotide
cacgaaaccggcggcttcgaagtcatcagcggtggcggttcgggcgtcaagagtcttgggcggcgggggagggaacagggattcgagcagctcccggcaggcggttgcaagggaaagccacgtttccacgtcatcgggccgccatccgccgatttctggccggcgcaggctggccgcatccttctggagtcgcagggccgtggttcggtcattgcccttgagagcttgcgcatccagggcggagactttttcgatgttgggaaacggggcgatgcatccaaggggttccaaaaggttcatttcggcagcttggtaagcataagacgcggcggtttcgtttttatcactctccgcgggcaacaggagtaggttccacttaaccagagacaccctagcgcaggcatcttccgagggaaggtttttccacttggggagcatttcggcgtaacgccgcatttctccggcgcgggcaccagcggaacggcgccccgtttcgtagatgtctttgtagttcggcccgttgatttcggcttcggcttcgggtggtaggcttggctttagctctccagttgcgtaggctacaaacccatcactccctgaattttccatttttctttctccttttgctgagcatttcacgcctccatcgggcatcctcgctgcccgaggcgatcttccgctttttggaattacacgtcaagggattttcggcaacatatgcctcaggaaagcccagtttcatccaacccccccccggaaattttgtgcagcccgatgtgtaggtttgagcggtgacgagcggtagaaagcgttaaaaccgcctaaagcgttgattttaaggggggtctatcagcttcgggagcagggggtccccggttcaaatccgggcaccccgaccagataaaaccttcaaaaaaaagagattttgagacgccccccctgcgtcgggtggtcttgtttttggccacggcaaaaaaggaaaggacctttgggctggttgctgccgttgacttccccgcgcgttgcccagccgggacggcccccttgtcgaggatcgagggctggataaaaaggttgatactttgtgataagtaccgtatcttttatccgtggccgaagaccgctacaagcacgccaaaaggctttttcgcaaacatggcggaaccctgcgcacgggggaggccctggctctgggcatacatccgcgcaccctctacggaatgcgggatgaccagctgctcgaacagctcagccgcggattcttccgcctcgcctcgctgcccgcgctatcccacccggacctcgtggcggcggctctgcgggtgccgcggggcgtggtctgcctcgtctccgccctcgccttccatgatgtcaccagcgaaatcccgcacgaggtccagatcgctctgccggccaagaccaaggcgcccaaggtcgactatccaccgctgagggtgttctggttctcggaggctgccctgtcgatgggcgtggagacggccgtgctcgacggcgtcgaggttcgaattttcaacctccccaagaccgtggtcgattgcttccgtttccgcaacaagctcggcctcgatgttgccgtcgaagcgctcggacaggcgatcacgcgcaagggagtgcggccggccgaggtgctgcgctatggccgggcttgtcgggccgagcgggtcatgctgccgtttcttcaggcgattcactgaaggagaaaccgatccctaacctggtggcctcggtgcggggccggacggatgccagcgtctcggagttggtcggactccaaagggcatgcctccatggatgttcaacaccaggagagaaccgtttctcccctggccccctgtttggccctggtaccccctttcagttcctcctccccccgaacccgcccgccccctaaagtaaacccagaaaaacccccatctccttgtggtaaaattctttagccacttcggaccggccccccggggcgggtggggtggcggggaaggcgttggtactccagggggacggggccttggacgttttcgatctcagggaatccctgatcggggattatcgcttttacgtcgagtcgttcatcaacatccgggacgagcggatcaagcggcatgtggatgcccggctgaaccagggcgacctgtggcccgatccgctgatccagttgaatccgcggttcgaaccggggcggccgatcgacgagttgatcggggaggaactgctccacccgggatgtgacccgatcttccggatcaaggacccggagcggccgggcgatccggggcggccgctgcggctgcacaggcaccaggaagacgcgatccgggcggcgcggcggggggagaactacgtcctgaccaccggtaccgggtcggggaagagcctctcctatatcgtgccgatcgtcgatctggtgctgcgggagggctcggggcgggggatccgggggatcgtggtctacccgatgaacgccctggccaacagccagcgcggggagttggaaaagtttctctgtctggggttcccgcaaggctcaccaccggtgaccttcgcccgctacaccgggcaggagaccgaagccgagcggaaggcgatcctcgaagcgccgccggacatcctgctgaccaactacgtgatgctggagctgatcctgacccgcccggccgaagcgccgctggtccgccacgcccaggggctgcgctttttggtgctggatgaactccacacctaccgcggccgccagggggccgacgtggcgctgctgatccggcgggtgcgggagctgatggcccgcggctcatcgatccagtgcgtcggcacctcggccaccctggccggaggcgggacccccgaggagcagcgccgggaagtggccgacgtggccaccctgctcttcggctgcccggtgaagccggagtgcgtcattggcgaaacgctgcgccgggcgacccgcgaggtcgaccccgacgacccgggggaggtcgaacgcctgcggggcgcgatcggttccagcgggccgatccccaccgactaccccgccttgaccgggcacccgctggtccgctggatcgaaggcgatgacggcagggcggccgagctttcgagactgaccggggaaactggaggggaaggcaggcggcataaggttgggaatccgtttttgagtgctcccccaacgccaaagccggaaacctgacggccatgccattcagagacgacgagcccaagatcgccgccgagcgtgtctacccctatccgttccggacagcccgggtgagaggatacatcacgcaaatcaccgctgtgaacatcgcactccaggaaatatcattcctccaacgtggtgatttcaggcaggacacgtttgaagcggtccttccaccaactgatcgtggttggatgctccgtggacaaattccggcaggtgtggtccccaatacgtcgggcggggtctggtggcgcaggaaatccacagcaacacgtcaaggaggaataccatatgggccttccgatggcacagcgggcttacaacctgcttgaagagaagtggatccctgttctttatggtagcgggaagacggatcgcgtggggatctgccaggcactgacagatgcacgtaaaattcggcagatagccgccagcaatcccatggatcgggtggcgctcctgcgctttctgttggccgtgctcctgtggtgcaaggaggacgcgaagtcttccctcgcagggttggacgaaaagggcaccggaataccggagaattggctggccaagctgaaggaaaacaaggctgcgttcaatctgctgggggaaggaaagaggttctatcaggatctcaatgcggaagagccagatatcggcgcctccaacttgattcacgagttcccttctggttcaaagatagctcactttcgtcacatacgcgacgacagcgacgggctgtgcctgggatgctgcgctctcgcactcgtgcggtggtcggtccttgcgagcgctggaaccgctgggcccggactgagcatgaccgcgagcttgaatggaaacacgcctgcttacacgtttcatgctggacctgacctattcagcactctcagacacgagttgcagcggctgaggcctgtcgagaaagacagccccgtctgggatggcgctgacgaggaaaccccactcggcccattgaaagtctttacctggcgctctagacgcgtccttttggcgccaaaatttgaaagcggagggcgcagtattcgtgaaggccactgctcatattgtggaaaaccgtcagatcgaatcgtatacaccatccgcttccgaccaggttggaagcgtgattcaagcgagccgtggaccgacgatccacatctactcagacttgagctagagaaaaaacagtttgttccctcttggccgaaccccaacgatgccttggaacaccacgcggaaatgtggagtttagtcatgcaggggattctgaaaaagaaaaccgatcagaatggggggaagtacgagacggtcctcgttgcagcggcacaagcgctttataaacatatcgaatcccattttgttttttttgctgccgttgaccaggcccgcgtaagtgccatcctctctgaactcgactgggcacgtcgagcgatatggtccacagcaagtgcgcgcacaggaaaaggaaaggagaaaagaaaagtttggggggaacatccgaaagggcatgtgattgttgagagcgtgcatgggccaaacattttggggcacgagattcgttcgagtttgtgtgcgctcagtgcccaaacccatggcgagatggagaattgcttcagggaattgctgcggcaatacgacatcaagacgtggagacaaacggcaaaggcggtaatcacccgggccattgaacaagccgtttgttccactactgccggctcgccactgcgacggcgggaggctttggcacgcgcaaactcggctctggaggacgcgctaattctgacagataaaggttacgcgtttcaagagccagccgcgcctgacaaaccaaaacagggccgaaagaagggggctcggaatgaacgagaccgctgactttatcaggaggctttccaacttgcaggaaggcgagcgctcgcggctgcgccggctggccggacagcctctcgatgcaacgctccagggttttgacctcttcacgggcctctggtggccactgcggaagaaaagtgcgagggccccgcgccgggagccgtcatggctcgttgccaaacttttcggtgcattccgcgtcccgcacatccggcccgattcagactcgcggaacgctttgcccgaggtcctaggcatctgcgaaccgtacgacaaggatggtcgcaagcgcttccgaactcgattcgacgcactgctttgctcgtccctgtcgtctctggaaccccatctgcgttgggctttgggcgaaatagcccgggtcgtcgcggggcaagtggcgcaggggggagatctgaagggcattaactgggtgcaactcctcgacgatctctccatctgggaccggggcgaggagcaccggcatcgacgcgatgttcgcgacgtctgggccgagaaatatctcaacgctgccaattcaaaagagaggagagaaaagaaatgttgattgaaatccacatgattcaaaatcacagcccggccaacctgaaccgagacgatcttggcgcgcccaagacctgcatcttcggcggtgtcacccgggcgcgcatctccagccagtgtctcaaacgtagcatccggcgcagcaaggagttttctgctgcgatggagaacgatggcggggtgcgtactcggcggctgatcgagctgatcgcagagaaggcggcgggcaatgacaataagctgaaacaagaacatgaagagaccatccggaaggtcttttcagatgggggaatcagcttgaaggatgacaaaactttcgacatcctcttcttcctgcctcaatccgccatcaacgaaatgggtgctgccgtgcgcgacggatgcgacggcctgggcaagaaattcgccacaatcatcggcaattttgtcaagactccagacatcgcactttttggccgtatgacagagttcgatgccaagggcgcttttcaaggcctgaagggaaagttttcggttgacgctgcgttatccgcggcacacgccatctcgactcatgctgttgtgaacgaggtagattacttcaccgctaccgatgacgtgtccggccaggacgtcggcgcggcccacatcaacgaggccatgttcaactcggcctgcttctacaaacacttcgttcttgacctcgagcagttgaagaagaacctgggcgatgaaaaactcgcctacaagacagtcgaatgcttccttcaagcagccgccatggccaatccatccggcaaacagcacgcattcgctgctttcaatccgcccgacggagtcctggtcgaggtcaaaaccaagtcggccacgccagtcagctatgccaacgctttcgctgatccagtgccggaaaagtccgaacgcggtttgatcggcgaaagcatcgctagactcggccagtacgcccacgaacttgctttaggttacggcatcgaggccgaacgtttttggttctcgccgaaaacgagccatcaatttgtcgggggcgacggggaaaggaagggatccgaacagggaaattccggtttcggttacaccaagtacgaaaagttcaatgatctcatcaaaaaggtcatgaataaggtaaccccatccaaagcgggagcggaggcggccgaatgaccgaaaccaacacacttttcctccgccttgaaggccccctccaagcttggggtgacacctcaaagttcgtcattcggcggaccatggatgcgccgaccaagtccggcgtggtgggcctggtctgctgcgccatgggcctttcgcggcagacggcgcgggaccgcctgcgggaattgaacgggctcgtgatgggcgtccgcatcgaccggtacggcacgcggtggtgggattaccacacggttggcgcgggaatcggcatgacaaccgctggtggcgaactgaagactggcgccccgggcacgctcatcacgcgccgggagtaccttgccgacgctagctttcttgtggcgctccagggtgatgagaaaatgattcgggaaatcgaggaggcggttacttcaccgaagtggcccgtttttctgggccgcaaatcctgcccgccatccgtcccggtgtttgcaaggccccgcgatggtgagttgtgggcgaatccagccgtccatgacgatctggaggccgcgctatgttccataccgtggtgtccgcggtacaaagacgacgcgacaccgcccaacgggacagtggaagtgctcgtggaatggcggcccgcctcggaaggtgacgtcgcgcccgaagacgccgaagtgtggtatgacgtgccggtttgcttcgatccaccggttcacgagccgcgatttgtccttcggggcgccgtttcggcgtcgttcggcggggcgctccaaaggtgtttcccccccatgaggcgtccgcgcgccgactatcagaacgcgaaatttcgggagcgccgcaaaaagcgaatcaaagccgacgccaggttgtgcgtcttctgcaaattgcccggccggcgcatgactgtccaccacgtcacctaccgaggggccgggggcgatgaaatccgggaggacctgcgttcgctttgcgggctgtgccacgacgccgtcaccatgctcgaatatggcctgggcatggggctggaccgcattaacccagaggagccccgctggcgcgtcccgatcattcaaaagcgggccgagattcttagattccgttcgctggagacccgacgccggcgtcttgccgcggaggaggtggaatagccatgtactggtcctgccttttgatcgacgtaggcgacaaccccgaccggcctcggcctgggcggttttggctaaggaaccgctatcatgttcatcagcggctttgcatggcctttccgtccgatccgcggagaaagcgcgatccagaattcctggcacctttcgattcgatggattttcctgagcaacgacatttagccgacaaaaaggagcacgaagttggcctagataccttgaaacaagtccactctccgcgccaaaaagaaactgggtttctatttcgcatcgaccctctccccaacgggcgggcgatggttcttgtgcagtctggggtgaagccgaactgggaatacgccttccacaacgcaattttcctgctggcagcgcctcctcaaaaacctgcccatttaagggtaaccgtcaagcctggcgagcgatttggctttttgctggtggccaacccgactaagaaaattctgacgattccgaaaaagcagtgggacgccaagtccaaagaggaacagaacgaaaacaaaacgcggcacggaaagcgagtccccgtcccggaagaccagcttattgactggctgaattgccgcgcccaatcggccggattttcccttgacaaggatgcaaccgttgttcaaccgggttacgcatatttcaacaaggacggtgaaggcccatggaagcgccttcgctcagcgcgttacaaggggattctcacagtggaagacgcggtacgcttcaaggaagctctgatccgcggcatcggctcagccaaagccttcggattcggcctgctttcgatctccccggccaatactgccggcccgggcgaggcgaaatgagagtccaggacctgcaccttctgcccaagttcagcgacggctggagctacctttacgtcgagcattgccgtatcgatcaggaagcccgggccattgccattcacgatgaatccggcaaggtgcctgtcccctgcgccaatctggcgctgctgatgcttggccccggcgtttccatcacccatgccgctatttctgtgctggcggaccatggttgcctggtggcttggtccggcgaagagggagttcggttctacgcggtgggcatgggcgagacgcggagcgcagcgaacttcctgcatcaggcgcgggcttgggcggatgcggaccttcgcttgaaggtcgtgcaccgattgtaccagttgcggtttgccgagacgttcgatcctgctctgaccctgcagcagatccgcgggatggaaggggttcgtgtccgggaggcttatgcccgggccgcccgggaaaccggggtgccgtggtcgggccgcagctaccggcgtgacaagtggaccgatgcggacccggtgaacagagccttgtcggcggcaaattcgtgtctttacggcatctgccacgcggctattacctcggcgggattctcgccagcgctcggtttcatccacaccggaaagatgctgtccttcgtttttgacgtcgccgatctctacaaggcggaaatcaccattccagcggcctttcgggcagcggcggaagagaaagacgggcttgaaagacgtgtaaggatctcgtgccgcgacctgtttatgtcaaccaggcttctggagagaattattccggacattcagaaagcgctgatgttgccaaagaacggggcgaccagtgatggtgcattcgaccaggatgccgccgccccgggctctttgtgggaccccgtcacgggaaaagtagagggcgggtgtgcctatccgttggaagctgacgtaacggaggctgacgatggtggttctgatccttgagcgtgtgccgccggggttacggggtgaattgacacggtggtttctggaaccgaaagcaggagtgtttgctgggagggtttcagccatggtgcgcgataaactctgggaaaaagcctgcgcgcaagccaggggaggtggttgtgtgatgatgtattcgagcgacaacgagcaaggttttcggattcggagctggggagaaacggggcgctcggtcgaagacttcgagggcctttttctcgttagggtaccgtaaatgccggttttttcagtattgtccccacgcgcgtgggggtgaaccgcccaccccgcctagcctcgcgctcgtcaagggattgtccccacgcgcgtgggggtgaaccgccgcggaacgggccggaatccaggtgcccgacattgtccccacgcgcgtgggggtgaaccgaagggcaaggcgaagggtagaccgatgagcgaattgtccccacgcgcgtgggggtgaaccgagacgattcccgagccagagacggggccggtcattgtccccacgcgcgtgggggtgaaccgtccccagtcggggatccgaccttcttgaggtaattgtccccacgcgcgtgggggtgaaccggcgtaccaaaaaaacccctggctagacattcaattgtccccacgcgcgtgggggtgaaccggtccagtattcggataacggctcatcttggacattgtccccacgcgcgtgggggtgaaccgacgttgttaaatctttccagacattatgttcgattgtccccacgcgcgtgggggtgaaccgggtatgaaggtagatgatatagagggaggtgaattgtccccacgcgcgtgggggtgaaccgtctttgccactatgcaagccggtctgagttcgattgtccccacgcgcgtgggggtgaaccgatctcccgagagttggatggagacatgtgcctattgtccccacgcgcgtgggggtgaaccgatcgaattgaccttcgcctcccattggaacccattgtccccacgcgcgtgggggtgaaccgtccctggcaacaccgtacacaccacagccacaattgtccccacgcgcgtgggggtgaaccggcgtcaggatgtgtttgctgatccactgggccattgtccccacgcgcgtgggggtgaaccgacttgaaggcaagaggcttggactctccggacattgtccccacgcgcgtgggggtgaaccggccttcacgctgcttgctcaaggggaagttctattgtccccacgcgcgtgggggtgaaccgtcaacgaagccagggacgtgttcacagatctgattgtccccacgcgcgtgggggtgaaccgctgagcgttccgtcctcgttctggtcgctggcattgtccccacgcgcgtgggggtgaaccgaagtagaagggcacgattcgccggaagtggggattgtccccacgcgcgtgggggtgaaccggactcggagaactcgccgcgcgcgctcttcttattgtccccacgcgcgtgggggtgaaccggtcgctgttgccagcggtcacggaatcgggaaattgtccccacgcgcgtgggggtgaaccgtaagccggtttggttcttgccgctaccatcctattgtccccacgcgcgtgggggtgaaccgtgacttcgggtgaggaggtgggaatgaactgcattgtccccacgcgcgtgggggtgaaccgcaatggggcgcccaaagaaggacagcgggaaaattgtccccacgcgcgtgggggtgaaccgacaccagtgttatgtggctcttctctcgcctcattgtccccacgcgcgtgggggtgaaccggattgcgcatccacgaggccgttatcctttccattgtccccacgcgcgtggggacaatggaa

SEQ ID NO: 622 - DNA, 11576 bp, Artificial Sequence
  Synthetic Oligonucleotide
tgccgccggagatagtccaactcaccgcgctgacggaattgcgactcgacaacaatcagctttccacgctgccgccggagataggccaactcaccgcgctgacaagactcgacctcgacaacaatcagctttccacgctgccgccggagataggccaactcaccgcgctgacggaactatggctcaacaacaatcagctttccacgctgccgccggagatagtccaactcaccgcgctgacggaattgaatctcaacaacaatcagctttccatgctgccgcgggagataggccaactcaccgcgctgacaagactgtacctcgacaacaatcagctttccacgctgcccgagtcgcttcgacgtttaacaaaactggagaaactttttctgcacgccaatccggcattgggcctgccgccggaaatcctcgggcccacctgggaggaggttctcgtcaaagacgcgcagcccgccgcgccgcaaccgattctcgatttttatttccgtctacaggaagacagccaacccggtgtgtccgggccggacacgttcccgctgaatgaggcgaaaatactggtcgtgggcgagccgggcgtgggcaagaccgcgctgattcattggattaccgaggggaaacgcctggaacatccggaatggaccccgggcattgagattggggattggacggtggcgagcgcctcggagggcgggcagccgatccgggtgaatatctgggatttcggggggcaggagatcatgcaggcaacgcaccagtttttcctgacggagcggagcctgtatcttctggtgattgattcgcgggaaaatgaagaacagagcaaactccggtattggatggaaaagatccgcacgtttggggtggattccccggtgatcgtggtgctcaacaagcgcgacgagggtagttatgaaccagacgacacgcggctgcgcaaggattatccggagaacctgccggaccccttctgcaagacagtttgcgacggtaaggatgtgagccgccacggggaaggtattgaggtgcttcgccaggcgattatcgagcgcgtccggaatcttgataatgtccgccagaaggtacccggcagctatctgaaggccaagaccgccttggagcacgaggccggaaagcggaagaatcttccccgtgaggagtatgacacgctctgtgagaagcataaactcacggccggcgacagaaatgcgctgcttgcctacctgaagcaacttggaacacttcttcattatgacagtcccggcgggtacggtccgctgcccgacacgtatgtgctcgatccgacatgggtgacgcaaggggtatacgcgattttgaccgacctggttgtccgggagcgtcacggccaacttgaacttgctgacctgaagcgcatcttccatagacagaaggactacccgaaaaagcaccagatgtttattttggccatgatggaggcggaccttttcgaactgtgcttccccattcccgacccgccgccgaacaaggcagggctgcgcctgattcccgaattgctgcccccgcaggaaccggaccacggtattgagccgggaagctcgctgaatctggaatatcactatgactacctgcccgcgggattgattccgcgatttatcgtccgcatgcacaatgcgatctccaagaacacctactggaagaatggcgtcgtgatgcggattgacggacggcgcgtattggttcggggcagccgggaagagaaaaaggtattcgtgtccgtcgaaaagagagaacctgccagccggagggcgcttacggtcgtgcggcataatcttgcggctatccacggcgccatgcggcatctggaagtcagggagatggtgagcctgcccgacgatccgggcgtgacggtggactacaaggacctggaacaatacgagaaagacgagggccgcatgtactcgtggcgcccccagggcgctaagagaaagtataccgtgcgcgaactgctggagggcattgaagaatatacgattccaaaagaacgggagataaagatggaagagaagccgctgctggttccacagggtaaagtattcatcagttatgcgtgggaagacaagggttttgcggccaaggtgcggcaactggccgatgatctgcgcacctggggtgtggacgcctggatagaccagtatatgggcgaaatgggcccagcggaaggctggccggcatggatggacaaaatcatccgcgaggcatccacagtgcttatggtatgttcgccgaaatacctgtgccgcgtcaaaaaagaggaaaagccgggaacagggctgggggcaacctgggaagggcatttaatctaccagcatctgtacgacgcacaaacggtaagcgataaattcagggcggtactcttcgaggaggaccatagtgcctgtatcccaacgcctgtaaagacgtttactcatttcaagatgtatcaggcagaaggctttgaggagctctaccgcgcattgaccggacagcatcgtgtggtcgcgccgcccttgggcacgccccgtgtaatgccgacgacctgatagtaatcgtaggatggcgaagcgaatgcggaaaggggcggattggctggccgataaggaagggcttgacgtggaacgcgcaggagccatctcacctcgttcccaaattggatttgggaacgcacttgcgccaaaaactttgtttgccccaccgggaatggcgtccgttggcaacgcgggttggaccctgcaccgccgtctgaattactgcacgacctcgcacgcaacgaggttgggatcaccgtctctggcgctattcgccgtcgtgcccctgctggacgagtcacgggtggcggcgcaagcgaagctttagcacaagtgcgttcccaaatgcaatttgggaacgaggttgggggcaggaacgagggcgcgaaatttgggaacgaggtcgggggcaggaacgaggtcgggggcaggaacgaggtaagcctccagcctccggcctacagcctacagcctcaaaagagcgcttgacataccgtgcgcggtggcctaccatgtaggtgttcttcgatgacgtgctgtgttgatgggctatggcgtaacgggtatggaaacgaggaggggtggcggatcatgggtggttatcttccggcgaaagacgatgagttttcgcgttggctgggccacttcgcccagcgactcatagcgtattgggaggaactcgacatcgcggcgctcgaggtgctgatgctgcggttcttggacgaccgcttcgccgaggacatcgatggcgttacctcggcgcacaatgcgtaccgtgccggcctggccgtccgcgacaacgaccgcgcggataccatcgaaccgcggttgcgcaacctggtccagcggatccagcatcaccccgccatgaccgacgggatccggcgcgacctcggcattacggtgcccgatagcgagcccacgccgcaaaccgccgtatccatcgaagaagccggccacccgatgctcgacatcgatgtcagcgagcgcaaacgggctaaaatcaagttcggcccgaacccgttgaacgcgcgccacaacgcgttacccgccggcatacgccgtgtccgcctctggtactacatcggaagcggacccccacccgaagaaaaagactggatcttcctcgacgacgacaaccggtccccctacacccacgtcaccatgaacgcccaacccctcacgattacctacagagccgcctacgtcgaccgacacaaccgcgtcggcgcgttcagcgacaccgtgaccgtgacgattagtccgtagacgggaggctgtaggcgggagaccggaggcgaaaaggaaaggagatgaaagaagaaaggcaggcaacgaagaagtcgtagaacgaaacgaaggtcaacaaagggaaaggagtgtgtggtatggcaggatatttgccaacaagtgtcgatgatttcgcgttttggatgaacaactttgggacacaaatcggtgttcacgggacgacggtagacgtcacctcgggcgagatcagtgattgccaggccgacgcgacccggttctcggtcgagcaagacgatgtcgtctcaacccacaacgcgtatcgggccgccgtggcgatacgggatgccgatcgcgccgataccatcgagccgcggttgcgcaacctggtccagcggatccagcatcatcccgcaatgaccgacgggatccggcgcgatctcgggatcaccgtcgccgatgacgagcctacgccgctgagcgaagtcagcatcgaagaagcaggccacccgatgctcgacatcgatgtcggcgagcgcaaacgggctaaaatcaagttcgggccaaacccgttgaacgcgcgccaaaacgcgctgcccgcaggcatacgcggcgtacgcatctggtactacatcggaagcggtccgcccgccgaagaaaaagaatgggtcttccttgatgacgacaaccggtccccctacacccacgtcaccatgaaccccgaacccctgacgatcacctaccgagccgcatacgtcgaccgacacaaccgagtcggcgcattcagcgacaccgtgaccgtcaccatcaatccgtagggtttgaggcgggaggcgggaggctgtaggccggaggaagagcgaaggaagagcgaaggaagaagagcgaagtgcgaagggcgaaaggcgaaggacaagccaatttcgtccttcgctcttctaacttcgtacttctaacttcgcccttctgacttcgctcgtcttcgtcctccgtgtctctatgtgagaaaaagaaggcggggaatcattccccgcctacatactcaaaaccaacgacgcccgcgtcattcccgcgtcacacttgcaaacgggaaaccaacgccacccgcctgttcacccccacgtgcgtggggaagactcggcatgcacatgaccgtccggatagtccgccggttcacccccacgtgcgtggggaagacgccatctcctgctgtttctcggctttcttgatcggttcacccccacgtgcgtggggaagacgtcgcgatgccacggaagtttgtgccgtcaaccggttcacccccacgtgcgtggggaagacgaacggatgcagcagagatgattagggaactacggttcacccccacgtgcgtggggaagacaggggctgtgctttcatcgtgccgatgtgctccggttcacccccacgtgcgtggggaagaccgcgatctcgagcacgcgcgcaaagacttcaccggttcacccccacgtgcgtggggaagactccccgtagaactctgcgaacacaaaacaccccggttcacccccacgtgcgtggggaagacaattacaactcaaccgacttctactcctgggacggttcacccccacgtgcgtggggaagacgtttttgagccactcaggtgcattttctaagtcggttcacccccacgtgcgtggggaagacagccacttatcgccttcctgaacaacgtatcgcggttcacccccacgtgcgtggggaagaccgtggtggtgtggcaatcaactcggaatggggcggttcacccccacgtgcgtggggaagacgtagccggcgcggccacacacgatgatgtgaacggttcacccccacgtgcgtggggaagaccgcgcggttctcggcaagcaactgcaagccctcggttcacccccacgtgcgtggggaagacaattctcgaccaagagcgcttctatatcctggcggttcacccccacgtgcgtggggaagactgcaacagtaatgtcgagctcctcggcgattgcggttcacccccacgtgcgtggggaagaccgcacatgctcgctttcgccggtgccgttacacggttcacccccacgtgcgtggggaagacctccggtcaatgggcttgcgcggtagacgcggcggttcacccccacgtgcgtggggaagactgctgttgtgctgttgtgttgttgttcttttgtcggttcacccccacgtgcgtggggaagacgcatgttccgcgcccggtttccgggttcggttcggttcacccccacgtgcgtggggaagacttgagggactggcccacaaaagggtctcgtggcggttcacccccacgtgcgtggggaagacacatgtattttagggctctttgggtcttgttaccagttgaagtccctcccagtttgttatccatcttgaggtctttccccagaagtcgattttgaaaccttgttcgttctttgcgctgtagatgaggatagcgccgccttctcggactccttggcaggctttctcccagagcttttggcggaccatggcggaaatgttgccgacaaagacgcccgctttgggttcgatcatccaacgagtgagttggccgcgcaggctggcgggtacggtttcgagtatcatgatgaccatggttttctactctgcgggcggttcgccgggcgcgtattgtacgccgccgggacaagcgccctgatcggggtcccagagcgctccggggcgtgcgggatcagcgtcgaagtcgggttcgtcgtccgcctcttcggacggaattgcgagcgcacatgcgatgtcggagacaatatgttggaggatgccctgttcggcgaacgcatcgcggcaccggagcctgacttcgcgttcgatgtctttggaacactcggcggccacgcggaatgccaggggcacggtcatatcgcacttgtacaggtcggcaatgtcgtacacgaaggagagttgtttgccggtgtgtatgaaaccaagcgcgggggagtagcctgcggccacgatcgcggcgtggcagatgccgtagaggcaggagttggccgaggacagggcacggttgacgggatcggcggacttccattggttgcgggtgtaggatcggccctgccacgcgaccccggattcgcgcgaggcgcgggcgtaggtgtcgcggacgcggactccttcgcgcccgcgaatttgctggatcgtaagggccgggtcgaggttctcggcaaagcgcatttcgtacatgcgccggacaactttcaagcgcgaagcgcggtgcgtgcacaggcttgcttgatgcaagaggtttccggcgttccgggtctcgcccatgccttgggcatagaagcggacgccttgctcgccgcaccacacggtaaggcagccgcaatcggcgagcgtcagcacggcggcgtgggtgatgttggtccctgggccgagcataagcagcgtgagcgcagcgcacggcacgggcgtcacacccgaaacgtcatgaatcgcgatggccttcgcctcttgatcaacgcggcaatgctcgacgtagaggtacgtcagtttgtcgcggactttcggcagttcatgcaggtctttagtcctcatgggcgatcatcccgcacgtaccggcgcaagcgaaagcaggccgaacccgaaggccttcgcggaaccgatacccgaagcgaccgcctgcgaaaagcacggcgcgtccgtgaccgccagcgttccctcgatgagcgcggatcggaaccgcatcttgtgtttgggacgatcctcgccggacggcactttcgtcttgccacggtatcccgagacccaaccgagatgcacgagttgaaagttatccaacgcgaaaccattacggacagccttggctccaaaccacgcgcggatcgcctcatcgggtttctggtccttgtcccaggtcaccgccacgcgcttgctctgcgattttgggcggccatacgcatctgtttcctcccgcgtatttcggagatccttgctcttcttgctcagattgatgcggatgcggaagcggagttcctgtccaacctcgaacgtgggggcgtattccttccattccggatcggcggcaagaaagcgcgcattctggaaggcatagtcccaatccggcttcagcgccgactggacaagaataaccgttcgcgcgccgtcctggatgccggtatcaatacggaacaggaaactgtggcgcgggtcttccggcttaacgtccgggttgcgcagcaacgggaagtcgtcctcttggaacggctgaagaaactcgacatcgcgctttacccgcgcctccgatggaaacgccatgcacagccgctgatgaacgtggtagacatcgcgcaaccaaagacggccgggccgtggccggtcgggattgtcgccgatatcaatcatgagatgggacatgtacattattcgacctcctctgcggcgagtttgcggcgccgggtttgggtttcgagcgaccggaacgcgataatcttcgcgcgtttttcgatgatctggtccctccagcgctcctcttcggggttgatgcggtccatccccatgccctggccgtattcgatcattgtcacggcgtcgtggcacaggcgacacagcgaccgcaactcgtccaggcgttcatcgccaccggcatggcgataggtgaagtgatgaacggtggtcgcgggcgacttgcataagacgcacagatgatgatcgcgatcaagccgctcctctcgcattttccgatattcactattgcggtagtcggctctcgcgcgtggcgggcgcggtgtgtagttctgcgcgggcttctccgcaaccttcaatgcacccttttcgccgacttggatctgccgccgaatgacaaatcggggccgatgcgagggcggctcgaaggtcaagggaacgtcataccagatttccgcgtcgaacggcgcttccggttcttccggcgtggcaacccagtcgagaaggcagtctaccgcctccgtttgtgtgtctcctttgagacgcggacgccagtcaaccgccgtgagagcggagagcagatcgggataatcgccggggtgatgctccaacggcggacgggacataggacaggattttcttcccaggtagatcgtccattttgggtttcgcatcgcggcggccagttcggcaataagcgccggttcgccctgtagggctacgagaaaggaagcgtcgcacaggtactcgcgccgcgtgatgagcgtgcccttggcgccggtcttcagaccgccactagcggttgtcatgccgattcccgctcctaccgtgtggtaatcccaccaccgcgtgccttgccggtcgatgcgcacacccatcgcaagcccgttcagctccggcaggcgttcccgcaccgcctggcgcgacaggcccatggcgcagcacaccaggcccagcacgccggacttggtcggcgcatccatggtccgccggatgacgaactttgacgtgtcgccccaggcctggagggggccctcgaggcggaggaagagtgtgttggcttcggtcatttcgccgcctccgcagaagtcccggttgcccccatcttgcccatgaccttatggacgaactgatcgaactcgccgaactcgtcggaaccgaccacggattgttcttgctcgtgttccttcatgctcttgtcgatccaggtcaggcgatggcgcagattcggcgagaaccagaaacgttcggcctcgatgccgtaacctacaacgagatcgtgggcgtactggccaagtctagcgatgctttcgccgatcaagccgcgttcggacttttccggcaccggatcagcgaaagcgttggcgtagctgacgggtgtggccgactcagttttgacttcgaccagaactccgtcgggtagattgaatgccgcgtgtgcgtgttgtttgccggaggggttggcattggcggctgcttcaaggaaggaccgtactgtcttgcaggcgaggtcggcatcgttcgctaggttcttcttcaactgctcgaagtcaatgacgaaatgcttgtagaaacaggccgagttgaacatggcctcgccaaggtgacccgcgccggcgtcctcgccgggcacgtcgtcggcagcggtgaagtagtctacctcgttcacgaccgcgtgagtcgagatggcgtgtgccgcggacaacgcggcttcgacggtgaagttcaagtcgctgaaaacgctaccctttgtaacctcagtcatgcgcccattcaaagcgatgtctgggacgctgggattttcggcaatgtatttcttgaacttttcggtaagcgcctttgcgtctgattcggtcttgagatctcccgccatcttcgcgattgtcgtcgtagagaggaagagaagcatcttggagagcgcttcggcgtcctcgccttcctcgccttcctcgccctttttccctttcttcttgctttttggcttcacaccacccagttccagggcttctgcagcaatggcatcgagcttctttgtctcttcgttctcgatggacttccctttgagaagttcagccaactttgcgggcgtcaactcgaagtctccagcatgggcgatccgcgccagcagattcgccaacctgcgcgtgcggacacctccatccttctccaaagcaaccgcgaactccgggctgcggcggatgctgcgtttgagacactggctggaaatgcgcgcccgggtgacgccgccgaagatgcaggtcttgggcgcgcccaggtcgtcccgattcaggttcgccgggctgtgattctggatcatgtggatttcaattaacatggtcagtcctcctttgatttttggtttttggttgagttcaggtattgttccgcccatatatctcgaatatcgcgatcgaggcggtgctcctcgccccggtcccaaatggagagatggtcgaggagttgcacccagtcgatgcctttcacatcccgcgcatgcggcacgtgcccggcgaccgccttggcgacttcccctagcgcccagcgcaaatgcggctcaagagacgacagggacgagcaaagcagtgcgtcgaatcgagttcggaagcgcttgcggccatccttgtcgtgcggttcgcagcggcccaggacttcaggcaaagagggacccgcgcctgaatcggcccggatgtgcgggacgcggaacgcgccgaagagcttggcaacgagccatgacggctcccggcgcggggtcgccgaacttaccttccgcaacggccaccagaggcccgtgaagaggtcgaaaccctggagcgttgcgtcgagcggccgtccggccagacggcgcagccgcgagcgctcgccttcctgcaagtctgcaagcctcttgatgtattcagcggtctggctcattctgtgcctcccttcttgtggccgcgtttcggtttgtcagtcacggctgctggtgcatctgcgttcgacggatgatccggcttctcaaccagttctttgattttcttgttcagcagggctttggcgtgctctttcgccgcgcggcggcgcaaaggcgagcctttggcggtggatgcgatagttttttcaacgaccggctcgtagatttcacgcagaaacttcttgtccgcttcggcgtcggtttgcgccgttgctgcgggctgttcaagcgctgtccgaacacgggcctcagcgtcggccgtcaacagcacaactgcggcgtcgacttcgtggtgatcgtccttgcccgtcttttggttgggcgtggtgtacttgacg

SEQ ID NO: 623 - DNA, 11323 bp, Artificial Sequence
  Synthetic Oligonucleotide
tcgtgaaaacgaatttcagccgggcatttcaatggagcgcggcggattttggcaaggttcttacggccctgacaatcttctatgcaatcgggcaatttgtgaacggccagttgggcgaccgttttggagctcgacgaatttcggccttcggggcgctcgggtcggtggcgatgaacctctgcgtttttgcgctggttttatttgccattcccgttggagacacaacggctgccggttccgccgcatccgccgccgcgccggatcacagcctgattctgaccttgctcatcgtattttggggcgcgaacggattcttccaatccatgggctgggggccgatggttcgcctgatggcacaatggtttcccgttaagggccgcggcaaagtcatgggactgctcggcacctgctatcaacttggcgctgccgtcgcgagcctgctggccatctttctcacgggcgattttgtgcgaaggttgggcggcgactggcgcctggcgttcctcgttccgtcagtgattctcggcgcaatcagcctgtgcttttatatggttgtccgcgacagccccgccgatgtgaatctgccgcccatctcggacgaatccgacgcctccccttccctggataaatccgcggcgcaggctcagacagcggcagcgacggtccgctctctttcgggtggcgaacggcgcaccctccggcaaaacctccttgcgacacttgccaatccatatctgtggcttgtggccggcgtgtttttcatgctcgacctcaaccggtatggatttgtgaactggatgcccgcattcctcgacgcgcaaacgagcaaaggcgccgcggcaacatcgtcagccggcctgggcaagatgataaaaatctgcatccatccgctggccggatcgctcggcgccctcgcggcaggatgggccacggaccgtttctttggcggacgccgcgcaccggtgattgcgatgcttctcgccgcgctcgggttgctatcgctctggttcccgcacattcacgcagaaaacacggcgctcgtggtagccatagtagcgcttgtgggcttttgcacctacggaccgcatatcctgatggtcgggcacgcggcccaggatttcggcaagaggagcggcgcttcaggcgcggcgggattcattgacagcatcggttatatcggcgcttcgcttgccgggtggggcgcgggaaagatgatagacgccagcgggtattccgtcacattttccgtgtttggcattgcggccctcgccggcgcggcaatggcctgcctgatctggaaggctggccctcaagccgccaagcactagcccaattgcatagcgaaggagaaacgatacgatgaactcgcgcgaacgcgtgcaactcgctcttgcgcatcaagaaccggaccgcgtccccattgactactgggcctcgggcgagatcaccgcgaaactgctcaagacgcttcgtttttcgtccgaagaggaattgctccagcactttgatgtggattttcgatatattccaggcccgcaatatatcggtcccgaactcactacgcggccggatggctcggtcgaggatttgtggggtgttccgcgcatccgggtcgaggttggcgcgggcgaacacaaagccagctaccgcgaggcgtgcgagccgccgttgaaagacatgacgctggaggaagttcaggcctatcccaaatggcccaatccggattggtttgactactcatgcgttcgcgaacaggcggccaaggttcgcgctgcgggcaagtgcgcgatcttcatgggcgatcgcatgaatcgctgcgcgcaactcaagccagcgatgtatttgcgcggcgtggccgacatcctgatggacatggtggtgaatcccgagatcgcgcagtatcttttcgaccggattgcggcgttttacctcgaatatgcacggcgcacgctcgaagccgccgggggcgaaatcgacatcttcatgatgggcgacgatttcggcgcgcaaagcagcctgctcgttgcgcccgatgtgtggcgcgaaatgctgcggcccaatttcaaggcgctgatcgaactcgggcaccgatacggctgcaaggtagcgcatcactcgtgcggatcgatcatgcccatcattcccgacatgatcgagtgcggcctggacatcttgaaccccgtccaacccgaggtgcaaaacatggaccggcgcgaactcaaacgccgctttggcgaccgtctgacgttccacggctcgatttcgattcagaagacaatgccgctcggaacgccggaagatgtgcgtgctgaggtgcgtgaacggtttgcgactctggggccgggcggcggatttattttctgcactgcccacaacatccaggtggacacgccaatcgaaaacgtcctcgcccttttcgccgcctaccaggaattcggccgctaccaatgatcgcccaattatgacgatggaattttccccacgaaatacgggaacaaaacgcaatcccgggtaagattttcaaaatcggggacataaaaatcgggaaaatcggggacaggttattcttttcgccctttccggcctgtttttcggttcgctcctttatttctcgaaggttttcggccgcgtttaagcggaagcaggattcggcccaatcgcgattccaatcgctcgataaacgacttcgatcccgtcgggcggcccgtatacgtgttttggcgtatccgttgcgccgtctcctcgtcaagcccctcggccagccactcggaccaattgcttacaggcccaggaaatggacgctcgggcgacaacagcgaatcgatttcgcccgaggcgtgcgcccgcgcgctcgaccaagcgttgtcctccggtgcatcggcgatccgagcacgaaccgggttcaactcgacatactttaccgccgcccacagatgcgattcatcaagcggcgtcgagtaaaaacaattcgaccatagatgcccggaccgctcccggcagcggttgatgaaacgcgaatagcgcatgtgcgcccgcccgattgcgcccgacagcgagtcgccccggcgcgccgccgttcacggacgggttgcgccattcgctcgcgatccggccccaggcgatgatggaaatgtaatggccaccttccttcgcctgaagtccctgaccataaatatccctgccctcagcgaaatcgggaatcccatccatgtccgcgccgccatcgttgacggggatgaggcagcctatgcgtgccttcaggcgccgccgatttctcgaaaaggcagtcgttctgctttggacattatggggctattaaaagtaaataaaccaattttgcttgcttcgggaaaaggcactacttatgaaaaagatagttagtgcctgataagccctccattccaagacaattgcgggcagattcagacaaaacgagaagcgggaggcggcaatggattttccagaacaggacaagaatttcaatttgctggatgcggaatggatacccgtcctctaccgcgatggcacgtataaacgcgtgggaattctcgacgcgctgaaggacgctgggaaaatccgccaaatcgccgcctccaaccccatggaccgcgtggcgatactgcggtttctgctggcgctgctctattggtgccaaggcaatccgcctgaagacaaaaacactcttccgcgcgatggctttcccgagacttggttctccaaactcaatgaacccgcccaccgcgaatgcttcaatctcctgggtgaggggaagcggttctatcagaacgcagaaattcgcaatcttcctgaaaagaaaatgaagcctatcggcgagctgttgccggagtttcctcgtgcggactcagtgaatcacatccgtcatatcgtccatgatggttcttatggtctttgccccgcatgttgtgctttaggaattctgcgtttttcggtatgggcaccagcaaatggcggttatccatcgtctgtcaatcccccctcaagtgtgtatttaatgacggaacttcgctctcttttgcatacccttgggcgctgtcttgccgacgcatcttcggaaaatacacctcccccttggattgagccagcggagcctgagcaacctttcggggccgtatcattattggcatggagacctcgcaaaatgtggttgggtatgattgaaggcgaaggtaattgcgcaaattgcggatgcagcaaaaggcttattcgtcagcttcgctttgcgccgggttggcccacgccgctcaacgatgaccaagcattcgcaaaacaggtgcaaaaagcgttcaagaaccgaggatttatcgcaaagcatgctaaagtaaagcctgtgctcgatgcgataccattgattctgtcgcgcatggatgatcttcggaacgcatgcagatcagcgcaatgcaatgtgcccgcaagtatggaccaagccgaggagattgcccagtcatttgtttcgctatgggaaagcagaaatcccgtggcggaagaaatcctgctgaacgaagctaagtatttcgctcacctaacaaagcgatgcttaacaaccttgggctgtaaagaggatgaccctgcagcgaaaaaggcagcaaatgccgcctggctgatctacaatacccgattgaacgagttgtgcaatatgtgtccggatccccttgccgcagaaattcaaatgctgagcctagatggggtgcccaccaaccatgcatgtgcgctggcgaaaatgatttgcttcattatgcaaaacaatgaggaggcattcaagaaaatcacacgcaagccaagcatgaaagaaaaagaagcactcatggcggaaaaaccacaaaaaaagaaattttggccgggagacccccatcttttaaaggagaaggagccaatcgcgtttccggtagcaggcaagaatgtggcagagcaagctaaagcatggaagcgcgcatttatagctgcctcaccgaacgatccccaaggcacaaatatcacaatagggccagtcgtcgcggacttgcagtcgggtatttacgcctgccacgacgttgttgccatttcgctcccggatcgttcatccgaaaagagagcagatcaatcagagcagatcagcaaattgctattcagcatgctgaaactcgcggtggatgctcaagagtggaagaaacctgatcggaagcgagaacatccagagattgactccgcgcttaccctccttactccggatcgggaatggcaaattcgatccgctctttcccgccccggcagaacaagcgacgacaaaggatttctgcttgcggtctttgccccgatggccagacatgcaatcttttcagcagtgcgcggttcaccacttcgccggaaggctgcggctcggcacgcgatgacaggattggaaaagagaatcgacgaggtaatcgccaaggcgaatcaatcggctgaaccggcggctgctgcaaacacgcagtctagtgtgcccgaggaacacaacagcggtggcaggaagagcaaggaggccggggaatgagcctgacagcggaattcattcggcgtctggaggacttgcaggaaggcgagcgttcgcgtctgcgccggcttgcgggccagccgcttgacaagacgctccagggcttcgacctgttcactggcctatggtggcctttgcgcgagaatagcccccgcgcaccacgccgccaagtcgcatggttgatcgccctgttgtatggcgcgattccggttccgcacgttcggcccgattcaggagcgggaccatcgcttgcggctcttcttggaatgtgtgaaccgagaaacgctaaagatcgccctcgttttcgtctgcgattcgatgccataatctgctcgtcgctttccgacatcgaaccgggattgaactgggggctgcgcgaaatcgccaaggcgatagcggggcgcgtgccgcacgcaaggaacattattgggatcgactgggcgctgctgctcgacgacctttcgctctgggacaaagaattcaacttggacgacacgtggcacaagggccgcctgaggacgcatgagcaactcgtccattgcgacgagacacaccgcacgccacaagacctatgggcgtgcgaatatctacacacgtcgaacagataatcgaaaggagaaagccatgttgattgaaattcacatgatccagaaccacagtccggcaaacctgaaccgggacgacctcggcgcgcccaagacgtgcatgttcggcggcgtcacccgggctcgcatttccagccagtgcctcaaacggagcatccgccgcagtccagaattcgcggcggcattggaaaacgatggcggggtgcgcacgcggcggctggcttcagtgctggctcacgttgcccaattgggtgactttgatttgacccctgcaaggctcgcgagcatgatcaaatcatctgaacccctttcccctgaagaagcgaaaatggaggtcattgcccgcgaggcgctcgaactcggaggtgtggcccccaagccaaagaaaaaggacaaaaaaagtgcccaagcgaaaaacgaagaggaaggcaatgacgagggtgataatgcagaaaccatctcgaaaatgttgctctttctttccacatcgacgatctcgaagatggccagggacttgaaggaggcatcgaacgcaaggaaccttgtggagaaattcaagggctatattgccgaaaatccctgtgttcccgacatcgctctgaatggccgcatgacagaagtcaaaaagagcaacgtgtttagcgacctaaacttttctatcgaagccgctctctcagcagcgcacgctatctcgactcacgcggttattaatgaagtggattatttcactgctgcggacgacatccccggccaggatgccggcgcgggccacgtgaatgaagggatgttcaactccgcctgcttctacaagcacttcgtgattgactggaaccagctcgttgaaaacctcacgcccgaagcgaaccgtaacgctcccgatgcagaaacaatcgaactcgcccgcaaaacggtccgatgtttcctcgaagccgccgccatggcaaatccctccggtaagcaacacgccttcgccgcatttaactgccccgacggaattctggtggagatcaagaccgaatcctccacgcccatcagctacgccaacgccttcgctgaccctgtcccggaaaaatcaccgcgtggtttgatcggcgagagcattgctcgtcttgggcaatatgcgcacgagatcatcgaaggctattccattccggccgagcgattttggttttctcccagcctctcttctcccagccagtcttctgcaagacagccttatcgcctgacgtggattgacaaaagccaaaaggagcacgaacaggagcaatcggttgtgggtgatggcaaagaattcggtaatttccccaaatatgtgcatgccatcatggaaaaggttcccaagggaggcgcggcacaggcgggaggaaaaccatgaccgactcttcaacgctcttcctccgtttggaaggtccgctccagtcgtggggtgacacgtcgaagttcgtcattcgccggagcatggaagcgccgacaaaatccggcgtgatcgggttgatcagttgcgcaatgggatggtcgcgccccaagggcgtcgaagacccaatccccgacagcaacttgcgcgacagggcgcaacgcctgatcaagcgccacgagaaagacgaggttgaaccacgacgagcgttgctggaccttctaaacatgctgacgatgggagtccgcatcgaccgtcctggaatgcgctggtgggactatcacacggtcggtgccaagatcggcatgacgacagcagcgggcggactcaagaccgatgcacagggcacagtcatcaagcgcttggagtatctggccgacgcgagctttctcgtcgcgttgcagggcgatgcggatttggtcgggaaggtcgcggaagccttgcattcgcccaaatggcccctgtatctcggccgcaagtcctgcccccctagcgtgccggtgcttatcaccaagaggcgcgacgataactccagggagccgctgctggaaagccatgcaacgcttgagtcggcattgagttccccttctgttccttggcggcctcgatatgaagacgaccttcgcgacgatgagcggatcctgcgggacggacaaccacgcgacaaatggaagattgtgttggacatccttatcgaatggcgaaaaagcgatgccgaaccagacgctccagacgacgccgatgtctggtatgacgtgcccttttccttcgatccgcctgcccatcgtccgcgtttggtcaaacgcgacggcaaagtcacggtgaatatcggcccggcgcttcagcatcccacgccgccgccgccacggccccgcgcaaactataaagacgccgagtggacaagcgaaaggctcgtcgaggttgttgacccgaaaaccggaaaggtcacgctggaaccttatagcgcgcgtccccggcgtttgcgccgggatcaaggactgtgcgtgttctgcaagtcgcccgcaactacggttcagcacgtgacctatcgccgcgccggtggcaatgaagaccaggacgatcttcggtccctgtgccgcctgtgccacgacgccgtcaccatgatcgaatacggcctgggcatgggtctcgaccgcatcaatcccgaagacccccgctggcgcgacgacatccttcgcacccgctgcgaaattctgcgctggcgcagcgaggagacccgacgtcgcgccctacgcagcgcgcccgagaaggtgcgcaaggagatgctggaggaggaagactgagtatgtatcattctcacttgctcatcaatgttggcgacaaccctgaccggccagattggaacatcacacgcaagtggctgcgaaacctttaccgcgtccatcagcggctttgcatggctttcccgtcgaatgctccagtttcgcaagccgaacgcgttgttgcctattgcgcgccgtttggcagcgcgggattgaatgatctgcgcgaattgcccagcgaaccgaatgcctccgatgttcattgtgctcgcagtgataaggctggttttctctttcgcatcgattatccagcctatgatatcgtcgatggcaaggcaacatcacggtccggacatccgcgacgccgcccaatcatcctcgtgcaatcctcacatgaagcagcgcccgattggaatctcgctttcggattggatgaaaacgcgattgacgatctcggacgccccattgggaacgcttcgtatctgttggccgcgccgccgcaaaccaaggaaatctgcatcgaaataaaggacgaaacgcttctattggcatgtccgacgcggccggaacaggatttttcgatacgttcaggcgaccttgtgcgctttcgtcttcgagccaatccgacgcggacaatccaggaaggatcaccaaacggcaaacgcaagcgcatcagtccgaccttggataagcatgcggattggttggcgggcaaacttggaaacgcatgcatctcgccaatctgcatcgagacattcgtgcctggatgggcttacggctggcgcaccaaacacgaaccgcagcccggccagagaatgcaatggtggtctgtgttgtttgaaggcatattccgggttggcgatgtaaacactttgaaaaaattgctggaatccggcatcggctccgccaaggccttcggattcggcctgctctctcttgcgccggtctgatcctgttttctttcgtttgctcctgctatctccccgcgctcgttcgcggcgccgctctccggttctttgacataaccaatttccacagcccacgccagcaacatggggagggaggatagcattttgggaggcggggaaaaggaggaaactccccatgaaagacctgcacgaactcccgcgattcagcgagggtctcagttatctctatctcgatcattgccgcatcgaacaagacgccaaatccatcgcagcgtgggcgcaagacggcatcacgcgcattccggccgccgccctcggcctgctcctgctcggtcccggcacgacggtcacccactcggctatgcgcgtgctcgcggaaaacggcgtctcggtcgtctggtgcggcgaactcggcgtgcgcacctacgccgcctcgacgggcgaaacgcgccatagccgcaatctgctgcgccaggcatggctcgccacgcgcgagccgctccgcctcgccgtcgtcacgcgcatgtatcggatgcggtttcccgatccgttgccgcccggcctgacgctccagcagattcgcggcaaggaaggcgcccgcgtgcgtgacgcctacgccgccgccgccgcacaatacggcatcgaatggaccggccgaaccttcgaccactcggactggaatcaatccacccctgtcaatcgcgccctttccgccgccaattcctgcctctacggcctgtgccacgccgccatcctctcgctcggatactcgcccgccctcggattcatccacaccggcaagcaactctcctttgtttatgacatcgccgatctctacaaggtcgagttgagcgttcccgcggcattccaggccgccgccgaaagtcctgaagccgtcgagcggcgtgtgcgactcgccatgcgccagatcatgacgcgcgccaaactcctcgaacgcatcccgcgcgacatcgcccattgcctcgacgtcccaaatcccgaaaccgaacccgatcccttcgccgacaacccctccaatccagccagcctctgggaacccagcggcggcgcgggcgcctgcatcctcccgcgcgatcccgcctacgcctataccagcgcttccggggcgggggaatctcccggcgcaagcaacagcggcggcggcgcacttccggttccgcccatgggagcgctggaaccatgatcctattaaaccgcaaataggcccgcgaaacgcttgaagcagcggagccgaaacccagcaaagatgaacgaaccacagatgaacacgaatggacacagacgaaaatcgtcgcaagaagcaatgattgaggaggatggcaataccaaaagacgcgaaatagaaggattttcattcagaacctgttttgcccgccagataactcaggctctgaattaaattcctggagtgtagcgttttttcctcaagcggcgagaaggggcgcataggtcttgataattgtccggatgttcacgccgcgccgggcggcgcgggccgatgcgcgaagcagtcgctcggcgcgaagcgcccgaagactgttgcg

SEQ ID NO: 624 - DNA, 11323 bp, Artificial Sequence
  Synthetic Oligonucleotide
ctcaatccattcgtagctggggcagtccggataggcggtgtccgagacgtcgtagatgaaatagccgtattcgtcgggacccaggggcgtgttttgcgccactgtgccgatgggcagtgaaaaatgggcgatctgctcgaatccgtcggcattgtagagcctgagcctgaatgggatcatcatcccgggtatcagcaggggctgggcgaaaaggccatagccttcgatggaagaggcattcatgcctgccgggatgctgccgaaataggagaggttgtccgttacctccaccaggtcgttgagggcggtgagttcaccgtaaatatcgctggcgccaaagacggaggagtttttcaccgcgagggtgaggatgccgttttcggaggggtccagcacgttgtcgccgccggcgctcacgctgtggttgatcacgctgaggtcggcattgaagccgcccaggtaaaacaacacctgatagctgttggcggcgctgtcggtgagttccagggtgaagcggcaattgtggaaagcggggatgttccggtcaaagctgatgaggaaggggacgctgttctgggcagtctgttccgccgtgatggcgggccaggcgctgttggcctgggtgacggtcaccaactgatcggccgtgctgagcacaccggtgatgccgtcgatggcggcggtggtggtgttgtggagctccacgctcagggcgatggtctccccggcgttgatgaagctgtcgccattgccggaggagccggaactgccgtcatccgcgatggttttggagagatagaccaaagagcctgccgcgtcgatcagcagggtctgctgggaaggcttgtgatcgtgtttggaggcggtgatcagcaggtcgccggtcacgaaattgggcaccaggagggtaaccattccgctttcgtccgtgaaacccttggccaccacatcgccataaccgtcgttatagatggtaacgctcaccccttccacgggggtcaaagatggatcggaaacctggatgtccacaaaaggagtcccgcgggggatggagtccggggctgatatgaccaggctttggggtatgccaatgaaggtttccacggtgggatcgcccatcaggttgcaccagtgggcagaactgttggcatggctggtattggtctggccgtacatgttgtgcagatagaggcggccgttgagcagggcctcgcccatgctacgcatcccgtagaggaaaatgccgtcgaagatgccggtcgcgagggcgttgttcaacatcgttttggtggcgatggtggccatgccgatggcggtgagggcgcctctgggaacggcttcggtgcccaggcggatgaaggcttcagaggtggtttcctgggaggcataactgccggttccgcaggtcagcataacggcgtgcggcagccggggaccgttattcagggaattgctggggctccagccgctcatgttgatatagccgcggtagttgaaaaagctcacgccctggttgatgccgttgttgatggtggaggggaaaccgccggtgtagttttcgatgtaagtgtaatcgggattgacttcatggctcatctcgtggatgtactggctattgtaaaccgtggatatgccggagtaggagcggtcgccgatgagcagcatgcggttcagccaggcggcagcatcgggagcgttgtttatgttcttttcgtaggtgtaaaccttgttcaggatggtgatgagctgggtaaggtcctgcacggaaatgcggccgatgaacgcgtcgcccaggaggtcgctgccagccaggtgggtataaggataatcgccttcaccgttgcggccgctgtaggactcaaaccaggccgggatcgggtagttgccgctggtatcgcccagcaggataatgaaatccgggcgggtttccggattgttgtactggctttggatatagttcttgatgctggtggtgctggccccgccggtctgggaggtgctcaccacgttcacggcatagcccttttggcgtttccaggtggcaaattcattcagtttggtcaggaacacagggtcgctgttgttgccgtggatcagcaggatgcgggcgtgggaaggcgcggtctcaagattgcggtaatcggcgaaattggcgatttgggcctcgtatatcttcctgaaagcctggctgtagcccgtataatcgggcagttcgttgaggccgggttcggcagtgaaatccaaggttacctcgatatccctgaaagtggccaggcgcctggtgacgggatcgtattggcagggataaacgttgatctgaaccacgcggaaatcacgcaggatggcgggttctgaggccgttgccaggctggaggggaaaagcccgccggaagggaccgccacgccgtcccagccttccctgcatattttgggctcgtcaagctggctgtattccaccccgccgtagctataggaaagggtgaagctgccccggggcgggatggccaccatggtgctgaacacgggaagttccggctggccgggttcgcaggtgccaagcgcgccttccatgcggatttcccggacgctttggcctccgtcttcgccggcggaaaagctgagggcgggcacggaaaccgcgagtttaagctggctgccggtagaccgcgcgaccgagaacgggcttgctgtttcggcgttcagagcggcaaggcagagcagcgccaacatggtgagtgacaggatccttttcattgtatcatccttgtatcgtcaaatcaaaaacctggagttgaggctccaggttatggttgcgttttttgcataaaggttttcttttgctttgttcatttgatggcatagatcaggacaccctggtcccgggaagccacgaccagttttcccttgttgaatttggcgttgttggtgtagccggcggatcggaggttctgcttcaggatgggactgctgggattgctgatgtcaaagaggtagatgccgccactgcctgagctaacggcggccagactgcccataatgtcgatgctggtggcgtagccggtggtgtcgaaggtatgcaccagcaagggttcggcgggcgcaccgatgttcaccacgttcaggccgccctggcggctggcgacgtaggcataattccccgcgaccttcacctgcagggcctggccggggagcgcgatttcgctcaccttctctttggtggcgcggtcgtaaatgaccaatccgcgctgttcggcggccacatagatgtagttgtccgtggcgtccattcccgaagcggtggcgggagtggtgatcacgtaatctgtgcccaggtagagcccgccgttgtagcgaacgtacatcaggttgcgtccggctccgaaaaagccctggacgatattgtcatccacaggggcctcaatggcgctgaaagaaatcgattgcaggccgtccgtgccgccggtgatggaatctatcagcctgagcgaatcgggatcggagtaatcgacaatacggattttgtccgcgctcacatactcgcccagaaagagcagtttgtgctcgccgactgccgagatattgcggatgttcaccagggtggcgtccgcgctggggggatagatatccgtccaccaacgctgagagtaatccgtggcatcgatcacggaaatgccgccctggtcctgggccacaaaaatgctctcgttgtcaaaagacaggtccacgggattgccgaccacctgcacctgcttgagcaggctgaggacgtcctggtcctcccaggcgggattgcgccgcgagcatccgcaaaggatgagcagcaccgccgcgaacagtatgatctgctttttcaccatgttcaaatcctcccaggggaataaaatttatgattatgcatatagtagatgcaagaatcgttccgaatctgccacaataactgcggattcctttcccaaagcctttttcgcccacggacaggccgtttgccccttcccactaacatcccgtaaacctccccttaaattcccgcccggccaatgggaactcagcgggaagtattttagatgtgtatgggatggggcaaatggggcttctattgatagtgggtatcaaaatgggaggaagtccacaaattgcgcgaattcatacgaattgcttttccagttacgctaccaactgtggtagataacctaaaataaaggacttacttcccaatcgggcaagtaatccatatgtttggagcccgaaggtcccagaacgattggccgacggggacatcgaccttcctgacgctggcgtcgagcgaggcacgagcatggacgccagcaacatctcctgtagtccatactcgcaagctcgctgcactccaggctcaccaacgttggaaggcaaattcacaaattcacaaccggtaaatatggcttgtgaatttgcaacctgctgatagacgggtaattatgaggctaattcacaaaaaaggggtctcttatacatccgcggaagccgattgtaaacaggatatgatgtatccacgctaccagtctataatacatatagaaatagtatatataatatataatagtattatatattattatatattgatattatatcatctctaccttcccttcatctcttgtttgcggcatgagccactgcaaaccggcattctcccctggtccggctggatataagagataagcgtattttgtgaatttgtcccccaactcactgtgccacaataacacacggattcacaagccatatttaccggttgtgaatttgtgaatctgaccttgccggccttaaggaagtttgaaattagagccctattttggacttgacaaattattccttggtaaatttggtgtataatagctatggggcataatgatgttagcctgtggaacggcctctgtaaaggatcaacaagctatcaaccctccccatgcgacaggagcttcaatgtattataatttgacagacaaaccctggatcagtgtgctacagcttgacgggcattctgccaggctcggcctggctgaggtcctgcgaaaagcacacacactgcgtttggcttacggcaatccgatggaccgcatgtccgttttccgtttcctcctcgccctgggctattggtgttttgccaatacaaaacaagcgccggtatcagataagccactgcctcaggcatggacggactggcttgaacaaaaccaagaatatttcgaattgttcggtgatggccccagattctaccaatccccaggaacatccagaatacgccccagcacggaccttatccacgagcttcccacggcaaacaatttctggcacttccgccatgtgaccgatttcatcgatggcatttgcccagcttgctgcgttaccggtctgctgcgcctgccactctttaccaccgtaggcggcagcggaatcggagccggcatcaacagaactcctcccttctatgccatctggcagggtgatagtctgtcggaatcgatattcctgaattgggaacccacttcccggttgggtgttcctgcctggctgaacccgtttggatcccaaaacgagaaggatgtagccttgctgactggcctcacctggctgccccgcaaggtattcctgcttggcccggtgtcagacggagcaaaatgcagcgcctgcggagaagagcatgagcctctggtctatgcctgcaacaatgaggcggtgaaagtgcctccgaaccttgtctggaacgaccctcacgcgatttaccgggatgacaataatggcctgactgcccaggtggctctgatgtccggggacaaatacactttcgctaacagggattggcataaacccctggtcggcttcttacgggcgaaaggcatgtctcggaccgccacgctgtttttagtgggcttcacaagcgttcaagccaaatgtgtggacgtttgggaaaagaccattgccctatccggaaaaacaagctccgaggaactgctggaccagatatccgaaagagcctactccctgcacaggatgaggaaacaagaccgccggggcgattacaaggaatccgtgggaatcaccgccgtggcggacatcatcccgcacgtagagcatcgggttgacgtccattcgggcgagatggtggaaaacagcggcaatgtctggcaggaagcggatgaagattacggattcttcatgaagcgttttgccgtttctctagtgccggaaattacggttgccgccaagcttgaacgagaacaactggctcggcgcaagccctggcccctaaaaccaaaatcaattaaaaaaccttcatccggaggcgataatgaatgagagcaccgtgaaatttgttcggagcctgggcgaactcaaagagggcgacctgggcttgctcagaaagctcaggggtcgccgtctggatgaatccctgccgggtttcgacctgttttccggcctgtggtggccactccgcagtataagccccaaaacccccaggcggaaggtggtctggctagtcaccaagcttttcgcggaattccgctttgagcaaaagaaaggcgccagcctgccttggctcatgggcagaatatgccgtggacttaaagaagaaaaagagttcccacgtgttttagccaggttcgaccgcttgctcacgctcgagttgaaccaactggaggaaccgctggcgcaagtgctcgcgattttaaaaagacatgacattgccagtctggactgggttgccctcatcgatgacctctccgcttgggaacgggaatcaaacagagcgatatggtcagacacatttatttcagcatttaataatcagcaaggaggaatcaaatgttgattgaaatacacatgatccaaaaccacagcccggccaacctgaaccgggacgacctgggcgcgcccaagacctgttatttcggtggggtgttgcggtcccgcatctccagccagtgcctaaagcggagcatcaggatgagcgatgaattcaaaaacttgctcgggggtatccgtacccgtcggttggccgagttgattacaaaagctacaggacaggactgcaggaatcaggcagaggaagttctgaacaaagccggtttgaaacacgaaaacggacatagtaagatgctggtgttcatgacccggaacaagatcgatgcccttgctcaaattgtcaccagcgaaggcctgagtgttgcagagaaagccaagaaagcggcagatgtaatatcgggggcaatacattcccctgacatcgctctgtgcggaagaatgctcgagcccgataccaaggacaagaacacagacaaggtcaagtgggaaaataccactgttgaagcagccctgcaggtgtcgcacgccatttcaacccacatcgcccgcccagaaatagattactatgtagcagctgatgacgagcctggcgacgacacaggtgctggattcatagacgaggcgatgtttgcttcggcctgtttctacaaatattactcaattgattggaataccttgataatcaacctccagggtaatgaaaagttggcagctcatactgtcggagcctttatccaggccgctgcactcactaatcccagcggaaagcagaacagctttgccgcacataaccttcccgatggaatattggtagaaataaaagagacacctgtcagctatgcaaatgcctttgtgcgaccggtgggaatcgttaaggattctgacttggtagaacaaagcattggccaactggccaactatgtgaaggatataagtgccggtttcttccctggacagatgaaaggcaacgctctgtggttctcgcccaatggacgttatcccctaaagcctcaacagggcacgctggacataaagccagtttgcaacctgctagaacttgttcgcgaagcagttgagatgttgggttttgaatgggatgatgtaaaaaacgagaaagtagagagttgaaatgtcttctccgcctaataccctgttcctgagattggaggctccccttcaggcctggggaagcaatgaggccaaattcgccgtgcgcaggacagccgacgcgcccaccaaatccggagtggcaggcctgctctgcgctgccctgggaatcagccgggccgaagccggacagtattggctgggtgaaattgccaaattgcgcatgggggtgcggatagaccgcccgggcatccgctggtgggattaccatactgtgggagcggagcagaagctgcgcatttctgacctgaaaatgcccaacggcctagttctggttggcactgccctggccaaaaacctgggcgcggacaagatcaaatccaaacccggggctttgctctcccgacgcgagtatttggctgatgccagcttcctggttgcgctccagggtgaaccggatatcgtggcacaactggctgaagcgctgaaaaaaccagtctggacgctttatctggggcgaaaatcctgtcccccctcccgtccggtggatgaacacccgccagggttttatgccagtctgaaagaggctttgcggtcgatcccggcgcaactgagggaaaaaggcgaaccgatacctgacagtgttccctgtgtgctcgactgggttccggcccatgatgacgtgcacgctccgccgaacgccgaagcgcattacgacgtgccggtgtcctttgagcctccccaccacttgccccggctggtgatccgctgtaacctgccattggaccgcaacttcgaggcagagaccgtgctttccggcaaagcctggcaaccgccccgcaaccgggcaaattacgacaatcctgaatacaaaagggtccgcgctgagcgtttggtgatggacaatgccgcctgcatgttctgcaaggcacccgccactactgtgcagcacgtgaattaccgacgcgccggaggcagcgagaagccggaggacttgcgcgccctctgccgcctctgccacgatgcctgcaccatgctggaatatggcagcggcatgaccatggaccgcatagatccctgtgaccccgcctggcgtgagcgcatcttggccaaacgcgaggaaataatcaaattccgctcgctggagcagcgcaggcgcaaactcgatccgaaggaggagaacggatgatgtatctatcccaactgctcatcgacacaggcggcaaccctgaccggccaaggcccgggcgcttgtggctgaacaatatctataatgtccaccggcggctcagcatggctttccccatgcgcaagcgcaaggaaggagacccgaggtttctgcagccctttgaccccgcagattttgaaaagcgccagttcctctttcgggtggacaacaacaccgatggagaaaatcaaagggcgatggttttggtgcagtcgtccctgccgccggattgggactgggctttccagaatgccacgggatttttggcagcccctccccaggttaaggaatacgatccccagttctcagcaggtcagcggctgcgcttccgcatcctcgtgaatgccagtgtcaaacgcaaaatcgacgagttgcgggaaggacccggaggaaaggaaaaaacgggaagggttctgcacaaacgggtcgcccttacctgggacacaaattccaacccaaaggatgcggtggcgcaatggtttgccgccaaggctggcagactgggcttcacgcccggggagaccgaactggtaagcctgggctgggtatacggttccaaaccggagccccggggaaattcgccccggcgtgagaacgaataccgtcccctgagataccgttccgccctgctggaaggttatctgacagtggatgatgcctttctgttccgggaagccttggaaaaaggtatcggcagcgccaaaggaatgggcttcggcctcctttccgtggttccggcaagtgatgcgtaacagagaccttcacctaatgccaaaaatgcgggaccgcttcacctatctctatgtggagcatgccaaaatagacaaagaacaacaggcaatcgcctttcacgatgccatgggctccactcctgttccctgcgctggactggccctgctgatgctggggccaggcgtatccatcacccatgcggccatccttgttttagcagaatgcggctgtttggtggcttgggtgggggaacagggagtccgcttttactcatccgggacagggaccacccgtagttccgccaaccttatgcgtcaggctgccgcctggtcaaatcgagatacgcatctgcggatagttcgcagaatgtatgaattgaggttcaaggaaaaactggacccaaccctctctcttgaacagataaggggaaaagagggagcgagagtacgggatacctatttcagactttcaaaagaattcgatgtgcccatgagtgcgaggaattacgacaggagcaactggaataaaaccgaccccatcaacagagccctgtccgttgccaattcctgtctctatggcatctgccacgccgcgatagtggccgctggctattcacctgccctgggtttcgttcatactggcaaacaactgtcatttgtttatgacattgccgatctttataaaatggaaacctccgtgcccgcggctttcatagccacagccgcaggggtcgataacctggacagaaggacacgcattgcctgccgtgaccagttctatcaatttggtctgctaaagaagatagtggccgacattcacgcccttttcggtattctggaaacttcggacgatgagccagaccttgctgatgtcgatccagccgtgccaggcgggctttggaacccagatgataaagtgagccccggcggcttgtcatggggtctggatgatcctggaggccatgatgatggttctggtgcttgaaaaagttccctctggcctgagaggagaaattacacgctggctcctcgaaatcaaggctggagtatttgtcggtcaggtatcggccatgataagggaaaagctgtgggacaaggccaggtctggttgtgccggtggaacttgtatcatgatttacagcaagcattgcgaacaaggctttggaattgagttttggggtgccgcggaaaggatagtgacagaatgggaaggattgaaattgatgaccaagcatccgtgatccatacttgaagcctgttcaatggcctcaaagcgtctactttcgaagtgtgttccccacctgcgtgggggtgaaccgcggcattatcaagcaggcagtccaccccgccggtgttccccacctgcgtgggggtgaaccgagcatctccaaagtcagcgccgccgccttga

SEQ ID NO: 625 - DNA, 11253 bp, Artificial Sequence
  Synthetic Oligonucleotide
cggctgaatatgcccatcgtgaaaacgaatttcagccgggcatttcaatggagcgcggcggattttggcaaggttcttacggccctgacaatcttctatgcaatcgggcaatttgtgaacggccagttgggcgaccgttttggagctcgacgaatttcggccttcggggcgctcgggtcggtggcgatgaacctctgcgtttttgcgctggttttatttgccattcccgttggagacacaacggctgccggttccgccgcatccgccgccgcgccggatcacagcctgattctgaccttgctcatcgtattttggggcgcgaacggattcttccaatccatgggctgggggccgatggttcgcctgatggcacaatggtttcccgttaagggccgcggcaaagtcatgggactgctcggcacctgctatcaacttggcgctgccgtcgcgagcctgctggccatctttctcacgggcgattttgtgcgaaggttgggcggcgactggcgcctggcgttcctcgttccgtcagtgattctcggcgcaatcagcctgtgcttttatatggttgtccgcgacagccccgccgatgtgaatctgccgcccatctcggacgaatccgacgcctccccttccctggataaatccgcggcgcaggctcagacagcggcagcgacggtccgctctctttcgggtggcgaacggcgcaccctccggcaaaacctccttgcgacacttgccaatccatatctgtggcttgtggccggcgtgtttttcatgctcgacctcaaccggtatggatttgtgaactggatgcccgcattcctcgacgcgcaaacgagcaaaggcgccgcggcaacatcgtcagccggcctgggcaagatgataaaaatctgcatccatccgctggccggatcgctcggcgccctcgcggcaggatgggccacggaccgtttctttggcggacgccgcgcaccggtgattgcgatgcttctcgccgcgctcgggttgctatcgctctggttcccgcacattcacgcagaaaacacggcgctcgtggtagccatagtagcgcttgtgggcttttgcacctacggaccgcatatcctgatggtcgggcacgcggcccaggatttcggcaagaggagcggcgcttcaggcgcggcgggattcattgacagcatcggttatatcggcgcttcgcttgccgggtggggcgcgggaaagatgatagacgccagcgggtattccgtcacattttccgtgtttggcattgcggccctcgccggcgcggcaatggcctgcctgatctggaaggctggccctcaagccgccaagcactagcccaattgcatagcgaaggagaaacgatacgatgaactcgcgcgaacgcgtgcaactcgctcttgcgcatcaagaaccggaccgcgtccccattgactactgggcctcgggcgagatcaccgcgaaactgctcaagacgcttcgtttttcgtccgaagaggaattgctccagcactttgatgtggattttcgatatattccaggcccgcaatatatcggtcccgaactcactacgcggccggatggctcggtcgaggatttgtggggtgttccgcgcatccgggtcgaggttggcgcgggcgaacacaaagccagctaccgcgaggcgtgcgagccgccgttgaaagacatgacgctggaggaagttcaggcctatcccaaatggcccaatccggattggtttgactactcatgcgttcgcgaacaggcggccaaggttcgcgctgcgggcaagtgcgcgatcttcatgggcgatcgcatgaatcgctgcgcgcaactcaagccagcgatgtatttgcgcggcgtggccgacatcctgatggacatggtggtgaatcccgagatcgcgcagtatcttttcgaccggattgcggcgttttacctcgaatatgcacggcgcacgctcgaagccgccgggggcgaaatcgacatcttcatgatgggcgacgatttcggcgcgcaaagcagcctgctcgttgcgcccgatgtgtggcgcgaaatgctgcggcccaatttcaaggcgctgatcgaactcgggcaccgatacggctgcaaggtagcgcatcactcgtgcggatcgatcatgcccatcattcccgacatgatcgagtgcggcctggacatcttgaaccccgtccaacccgaggtgcaaaacatggaccggcgcgaactcaaacgccgctttggcgaccgtctgacgttccacggctcgatttcgattcagaagacaatgccgctcggaacgccggaagatgtgcgtgctgaggtgcgtgaacggtttgcgactctggggccgggcggcggatttattttctgcactgcccacaacatccaggtggacacgccaatcgaaaacgtcctcgcccttttcgccgcctaccaggaattcggccgctaccaatgatcgcccaattatgacgatggaattttccccacgaaatacgggaacaaaacgcaatcccgggtaagattttcaaaatcggggacataaaaatcgggaaaatcggggacaggttattcttttcgccctttccggcctgtttttcggttcgctcctttatttctcgaaggttttcggccgcgtttaagcggaagcaggattcggcccaatcgcgattccaatcgctcgataaacgacttcgatcccgtcgggcggcccgtatacgtgttttggcgtatccgttgcgccgtctcctcgtcaagcccctcggccagccactcggaccaattgcttacaggcccaggaaatggacgctcgggcgacaacagcgaatcgatttcgcccgaggcgtgcgcccgcgcgctcgaccaagcgttgtcctccggtgcatcggcgatccgagcacgaaccgggttcaactcgacatactttaccgccgcccacagatgcgattcatcaagcggcgtcgagtaaaaacaattcgaccatagatgcccggaccgctcccggcagcggttgatgaaacgcgaatagcgcatgtgcgcccgcccgattgcgcccgacagcgagtcgccccggcgcgccgccgttcacggacgggttgcgccattcgctcgcgatccggccccaggcgatgatggaaatgtaatggccaccttccttcgcctgaagtccctgaccataaatatccctgccctcagcgaaatcgggaatcccatccatgtccgcgccgccatcgttgacggggatgaggcagcctatgcgtgccttcaggcgccgccgatttctcgaaaaggcagtcgttctgctttggacattatggggctattaaaagtaaataaaccaattttgcttgcttcgggaaaaggcactacttatgaaaaagatagttagtgcctgataagccctccattccaagacaattgcgggcagattcagacaaaacgagaagcgggaggcggcaatggattttccagaacaggacaagaatttcaatttgctggatgcggaatggatacccgtcctctaccgcgatggcacgtataaacgcgtgggaattctcgacgcgctgaaggacgctgggaaaatccgccaaatcgccgcctccaaccccatggaccgcgtggcgatactgcggtttctgctggcgctgctctattggtgccaaggcaatccgcctgaagacaaaaacactcttccgcgcgatggctttcccgagacttggttctccaaactcaatgaacccgcccaccgcgaatgcttcaatctcctgggtgaggggaagcggttctatcagaacgcagaaattcgcaatcttcctgaaaagaaaatgaagcctatcggcgagctgttgccggagtttcctcgtgcggactcagtgaatcacatccgtcatatcgtccatgatggttcttatggtctttgccccgcatgttgtgctttaggaattctgcgtttttcggtatgggcaccagcaaatggcggttatccatcgtctgtcaatcccccctcaagtgtgtatttaatgacggaacttcgctctcttttgcatacccttgggcgctgtcttgccgacgcatcttcggaaaatacacctcccccttggattgagccagcggagcctgagcaacctttcggggccgtatcattattggcatggagacctcgcaaaatgtggttgggtatgattgaaggcgaaggtaattgcgcaaattgcggatgcagcaaaaggcttattcgtcagcttcgctttgcgccgggttggcccacgccgctcaacgatgaccaagcattcgcaaaacaggtgcaaaaagcgttcaagaaccgaggatttatcgcaaagcatgctaaagtaaagcctgtgctcgatgcgataccattgattctgtcgcgcatggatgatcttcggaacgcatgcagatcagcgcaatgcaatgtgcccgcaagtatggaccaagccgaggagattgcccagtcatttgtttcgctatgggaaagcagaaatcccgtggcggaagaaatcctgctgaacgaagctaagtatttcgctcacctaacaaagcgatgcttaacaaccttgggctgtaaagaggatgaccctgcagcgaaaaaggcagcaaatgccgcctggctgatctacaatacccgattgaacgagttgtgcaatatgtgtccggatccccttgccgcagaaattcaaatgctgagcctagatggggtgcccaccaaccatgcatgtgcgctggcgaaaatgatttgcttcattatgcaaaacaatgaggaggcattcaagaaaatcacacgcaagccaagcatgaaagaaaaagaagcactcatggcggaaaaaccacaaaaaaagaaattttggccgggagacccccatcttttaaaggagaaggagccaatcgcgtttccggtagcaggcaagaatgtggcagagcaagctaaagcatggaagcgcgcatttatagctgcctcaccgaacgatccccaaggcacaaatatcacaatagggccagtcgtcgcggacttgcagtcgggtatttacgcctgccacgacgttgttgccatttcgctcccggatcgttcatccgaaaagagagcagatcaatcagagcagatcagcaaattgctattcagcatgctgaaactcgcggtggatgctcaagagtggaagaaacctgatcggaagcgagaacatccagagattgactccgcgcttaccctccttactccggatcgggaatggcaaattcgatccgctctttcccgccccggcagaacaagcgacgacaaaggatttctgcttgcggtctttgccccgatggccagacatgcaatcttttcagcagtgcgcggttcaccacttcgccggaaggctgcggctcggcacgcgatgacaggattggaaaagagaatcgacgaggtaatcgccaaggcgaatcaatcggctgaaccggcggctgctgcaaacacgcagtctagtgtgcccgaggaacacaacagcggtggcaggaagagcaaggaggccggggaatgagcctgacagcggaattcattcggcgtctggaggacttgcaggaaggcgagcgttcgcgtctgcgccggcttgcgggccagccgcttgacaagacgctccagggcttcgacctgttcactggcctatggtggcctttgcgcgagaatagcccccgcgcaccacgccgccaagtcgcatggttgatcgccctgttgtatggcgcgattccggttccgcacgttcggcccgattcaggagcgggaccatcgcttgcggctcttcttggaatgtgtgaaccgagaaacgctaaagatcgccctcgttttcgtctgcgattcgatgccataatctgctcgtcgctttccgacatcgaaccgggattgaactgggggctgcgcgaaatcgccaaggcgatagcggggcgcgtgccgcacgcaaggaacattattgggatcgactgggcgctgctgctcgacgacctttcgctctgggacaaagaattcaacttggacgacacgtggcacaagggccgcctgaggacgcatgagcaactcgtccattgcgacgagacacaccgcacgccacaagacctatgggcgtgcgaatatctacacacgtcgaacagataatcgaaaggagaaagccatgttgattgaaattcacatgatccagaaccacagtccggcaaacctgaaccgggacgacctcggcgcgcccaagacgtgcatgttcggcggcgtcacccgggctcgcatttccagccagtgcctcaaacggagcatccgccgcagtccagaattcgcggcggcattggaaaacgatggcggggtgcgcacgcggcggctggcttcagtgctggctcacgttgcccaattgggtgactttgatttgacccctgcaaggctcgcgagcatgatcaaatcatctgaacccctttcccctgaagaagcgaaaatggaggtcattgcccgcgaggcgctcgaactcggaggtgtggcccccaagccaaagaaaaaggacaaaaaaagtgcccaagcgaaaaacgaagaggaaggcaatgacgagggtgataatgcagaaaccatctcgaaaatgttgctctttctttccacatcgacgatctcgaagatggccagggacttgaaggaggcatcgaacgcaaggaaccttgtggagaaattcaagggctatattgccgaaaatccctgtgttcccgacatcgctctgaatggccgcatgacagaagtcaaaaagagcaacgtgtttagcgacctaaacttttctatcgaagccgctctctcagcagcgcacgctatctcgactcacgcggttattaatgaagtggattatttcactgctgcggacgacatccccggccaggatgccggcgcgggccacgtgaatgaagggatgttcaactccgcctgcttctacaagcacttcgtgattgactggaaccagctcgttgaaaacctcacgcccgaagcgaaccgtaacgctcccgatgcagaaacaatcgaactcgcccgcaaaacggtccgatgtttcctcgaagccgccgccatggcaaatccctccggtaagcaacacgccttcgccgcatttaactgccccgacggaattctggtggagatcaagaccgaatcctccacgcccatcagctacgccaacgccttcgctgaccctgtcccggaaaaatcaccgcgtggtttgatcggcgagagcattgctcgtcttgggcaatatgcgcacgagatcatcgaaggctattccattccggccgagcgattttggttttctcccagcctctcttctcccagccagtcttctgcaagacagccttatcgcctgacgtggattgacaaaagccaaaaggagcacgaacaggagcaatcggttgtgggtgatggcaaagaattcggtaatttccccaaatatgtgcatgccatcatggaaaaggttcccaagggaggcgcggcacaggcgggaggaaaaccatgaccgactcttcaacgctcttcctccgtttggaaggtccgctccagtcgtggggtgacacgtcgaagttcgtcattcgccggagcatggaagcgccgacaaaatccggcgtgatcgggttgatcagttgcgcaatgggatggtcgcgccccaagggcgtcgaagacccaatccccgacagcaacttgcgcgacagggcgcaacgcctgatcaagcgccacgagaaagacgaggttgaaccacgacgagcgttgctggaccttctaaacatgctgacgatgggagtccgcatcgaccgtcctggaatgcgctggtgggactatcacacggtcggtgccaagatcggcatgacgacagcagcgggcggactcaagaccgatgcacagggcacagtcatcaagcgcttggagtatctggccgacgcgagctttctcgtcgcgttgcagggcgatgcggatttggtcgggaaggtcgcggaagccttgcattcgcccaaatggcccctgtatctcggccgcaagtcctgcccccctagcgtgccggtgcttatcaccaagaggcgcgacgataactccagggagccgctgctggaaagccatgcaacgcttgagtcggcattgagttccccttctgttccttggcggcctcgatatgaagacgaccttcgcgacgatgagcggatcctgcgggacggacaaccacgcgacaaatggaagattgtgttggacatccttatcgaatggcgaaaaagcgatgccgaaccagacgctccagacgacgccgatgtctggtatgacgtgcccttttccttcgatccgcctgcccatcgtccgcgtttggtcaaacgcgacggcaaagtcacggtgaatatcggcccggcgcttcagcatcccacgccgccgccgccacggccccgcgcaaactataaagacgccgagtggacaagcgaaaggctcgtcgaggttgttgacccgaaaaccggaaaggtcacgctggaaccttatagcgcgcgtccccggcgtttgcgccgggatcaaggactgtgcgtgttctgcaagtcgcccgcaactacggttcagcacgtgacctatcgccgcgccggtggcaatgaagaccaggacgatcttcggtccctgtgccgcctgtgccacgacgccgtcaccatgatcgaatacggcctgggcatgggtctcgaccgcatcaatcccgaagacccccgctggcgcgacgacatccttcgcacccgctgcgaaattctgcgctggcgcagcgaggagacccgacgtcgcgccctacgcagcgcgcccgagaaggtgcgcaaggagatgctggaggaggaagactgagtatgtatcattctcacttgctcatcaatgttggcgacaaccctgaccggccagattggaacatcacacgcaagtggctgcgaaacctttaccgcgtccatcagcggctttgcatggctttcccgtcgaatgctccagtttcgcaagccgaacgcgttgttgcctattgcgcgccgtttggcagcgcgggattgaatgatctgcgcgaattgcccagcgaaccgaatgcctccgatgttcattgtgctcgcagtgataaggctggttttctctttcgcatcgattatccagcctatgatatcgtcgatggcaaggcaacatcacggtccggacatccgcgacgccgcccaatcatcctcgtgcaatcctcacatgaagcagcgcccgattggaatctcgctttcggattggatgaaaacgcgattgacgatctcggacgccccattgggaacgcttcgtatctgttggccgcgccgccgcaaaccaaggaaatctgcatcgaaataaaggacgaaacgcttctattggcatgtccgacgcggccggaacaggatttttcgatacgttcaggcgaccttgtgcgctttcgtcttcgagccaatccgacgcggacaatccaggaaggatcaccaaacggcaaacgcaagcgcatcagtccgaccttggataagcatgcggattggttggcgggcaaacttggaaacgcatgcatctcgccaatctgcatcgagacattcgtgcctggatgggcttacggctggcgcaccaaacacgaaccgcagcccggccagagaatgcaatggtggtctgtgttgtttgaaggcatattccgggttggcgatgtaaacactttgaaaaaattgctggaatccggcatcggctccgccaaggccttcggattcggcctgctctctcttgcgccggtctgatcctgttttctttcgtttgctcctgctatctccccgcgctcgttcgcggcgccgctctccggttctttgacataaccaatttccacagcccacgccagcaacatggggagggaggatagcattttgggaggcggggaaaaggaggaaactccccatgaaagacctgcacgaactcccgcgattcagcgagggtctcagttatctctatctcgatcattgccgcatcgaacaagacgccaaatccatcgcagcgtgggcgcaagacggcatcacgcgcattccggccgccgccctcggcctgctcctgctcggtcccggcacgacggtcacccactcggctatgcgcgtgctcgcggaaaacggcgtctcggtcgtctggtgcggcgaactcggcgtgcgcacctacgccgcctcgacgggcgaaacgcgccatagccgcaatctgctgcgccaggcatggctcgccacgcgcgagccgctccgcctcgccgtcgtcacgcgcatgtatcggatgcggtttcccgatccgttgccgcccggcctgacgctccagcagattcgcggcaaggaaggcgcccgcgtgcgtgacgcctacgccgccgccgccgcacaatacggcatcgaatggaccggccgaaccttcgaccactcggactggaatcaatccacccctgtcaatcgcgccctttccgccgccaattcctgcctctacggcctgtgccacgccgccatcctctcgctcggatactcgcccgccctcggattcatccacaccggcaagcaactctcctttgtttatgacatcgccgatctctacaaggtcgagttgagcgttcccgcggcattccaggccgccgccgaaagtcctgaagccgtcgagcggcgtgtgcgactcgccatgcgccagatcatgacgcgcgccaaactcctcgaacgcatcccgcgcgacatcgcccattgcctcgacgtcccaaatcccgaaaccgaacccgatcccttcgccgacaacccctccaatccagccagcctctgggaacccagcggcggcgcgggcgcctgcatcctcccgcgcgatcccgcctacgcctataccagcgcttccggggcgggggaatctcccggcgcaagcaacagcggcggcggcgcacttccggttccgcccatgggagcgctggaaccatgatcctattaaaccgcaaataggcccgcgaaacgcttgaagcagcggagccgaaacccagcaaagatgaacgaaccacagatgaacacgaatggacacagacgaaaatcgtcgcaagaagcaatgattgaggaggatggcaataccaaaagacgcgaaatagaaggattttcattcagaacctgttttgcccgccagataactcaggctctgaattaaattcctggagtgtagcgttttttcctcaagcggcgagaaggggcgcataggtcttgata

SEQ ID NO: 626 - DNA, 11186 bp, Artificial Sequence
  Synthetic Oligonucleotide
tgcgtggggaacacgcattcgccgctgacgccgactctcgggccatcggttcacccccacctgcgtggggaacacaggtgaatcggcttccggcgagaggccatcatcggttcacccccacctgcgtggggaacacgtgaagttggtgagcgtacccttgcctaccagcggttcacccccacctgcgtggggaacactccgtgccgacctttgtcttcttgcacaggtccggttcacccccacctgcgtggggaacacgagttcgcggttcatctggtcgagcttctcaaccggttcacccccacctgcgtggggaacactttcacaccgcagttgtcacaggtgtactcgtacggttcacccccacctgcgtggggaacacgtagtcgtcagccgctacgccagtgaagatgcccggttcacccccacctgcgtggggaacacgggagcctgcctcgggagcgatactcgtcctgcggttcacccccacctgcgtggggaacacgtcctcgacgttgtacgactgcgcctcggtctcggttcacccccacctgcgtggggaacacgaagccgcctagtacagtccctagcttacccacggttcacccccacctgcgtggggaacaccctgacttgccacgactggaatgcatggtggccactcgtcatcaacgggtttcagtgtcgctatcctgaacagtccgcggttgaggagagactgtcaccagcgccagaccctcgaagtccaccagttgcctcgtttggatgccgtgctgacgataggagaacccctgtggattcctgtctgaccatatctgcagcacccacccggtctccttcgttgtcttgacggccttcatccacaactcgtccctcactcgcccactcgggttcccaagaaaggttccagtcgccggctccaggagccatcgcgacaatgcgcccctcaagttcgtcggcactctccccagcatcattaccaacaccaagcacctccgcgatatctggcagaagtctctccatgagtctgaattcgtggaacgccgtacggcaacgcattcgcgtgccgcgttcgatactctcgggcatctcggccgcggtttgaaaggccagcggaatcgtgagagttgtcttgtacaggtctgctatgtcgtagacgaagctgagcatcttgcccgtgtggatgaaaccgagtcccggagagtatccggccgagaggatcgcggcgtgacacacaccgtacaagcaggcgtttgcagcagatagcgcacgattgaccgggtccgcagcttcccagttgccctggttgtatcgcctgcccttccagtcgatgccatatgcgcgggcggcgtcggcgtatgctttgcgcacacgtaggccctccatccctcttatgctctccagactcacgacgtctggtacggattccgcgaatctgaaacggtacatgcgccaggcaatatgcaggcgggattcatcgtcgctcaccagcgacgcctgcctgatgagccttttggcgctgtgtgttccacctgtactggcggcatacagtcgcgtgccatcctgccctgtccacgccaggagacagttgttccgcgagagcgccgctaccgcagcgtgtgtcaccgtagtgccgggtccgagcatcaacaccgagagctggtcgatgggcactcgcgttgttcgggtgtcctggcggaagcacaggccgagatcatctacatcgagtcgccccgtctcgaggtacacgtagctccagcgatcctggaaccgtggaaggtcgaagagcgtgcgcatccgctatcctctgtcaggtgctacggacaacagtccgaatccaaaagccttggcgctgccgatgccgccgatgatagcctcgcgtaaggcttcagggcctgtcactcgcaggatgccgtcgtagcggaccgaaagatgcgacatgcattcggagtcctcgttctcttcgaggtgtttccgggtcgccctcttgaagctctcgtcggtcactgtcgtggacagtacttcaaatccaccagactgtcctttccgaaccagccattcgcgctgcttttcctccgttaggacgccctcccgctttcgggtctcgttgttccgtctagtggggttggcacgcaggcggaagagcagcgactggccttcttgatagtcatggtggacctccttcacttcgggtggcccagccagcaggtagtccgcattacggaaggcgtactcccaatccggccgtcgtgccgactggacaacaatcatggccctgccgttcaccagagggtccacccggaatagaaaggcttgctcgcttgtccggatcttctgatgcaccccgctaaaggcgcccactcgatagggtctgacaaagtccggatcgcctgcctttgcttccgccagcgggaatcccatgcacaacctctgatggatacgatagggttgtctcatccagagtcggcccgggcgcggtctgtcagggtttatgcctgtgtcgacgagaagagccgacagatacatggtcactccacctcctctggagatagatgacgccgcctggtctccagcgaccggaaccggatgagttcttgccgcttctgaatgatggcctcgcgccactgcgggtcctcaggattgatgcgatccagtcccatgcccagtccgtactcgatcatcgttactgcgtcgtggcacaggcgacagagcgaacggagatcatccacggtctcgttgccgcctgcgcgccgataggtaatgtgctgcacggtggtagcaggagccttgcagaagatgcagaggccagagtcactggctaatctgagggagcgcgccctgcgataggcgctgttcttgtagtctgctcgcggccgtggaagagcggacagatactgctgcagaggttcttcgactgacacgtgcagcttggttctcatcacaagccgtggtgcatatgcggggggaaagaaggaaagcggcgagtcgtaccagacttcaagaggctcctggtgtcgctgtccttggatggtgcctcgccactccaatagacacggtagcgcgttatcgtttggagggaagtctaccccgccaagtcttggtcgccaggggtgtgtctcaagggcctccaggagactctgggcgttgtccgcggcgccaggcgatactactgtgactctcgttgcgacgaccggcactgccggtgcgcatggcttgcgcccaaggtaagtgggccacctgggacacccgagcgcctgtgctacctcctcaataagcgcactctcaccctgcaggccgactagaaagctggcatccgagagatactcacggcgagacaccaaggtctcatattccccggtcgtctgcgtcttcttgacctttcgctccgctgtgagcatgccgtatccagctccggctgtgtgatagtcccattggcgagacccaggacggtcgatccgtacagccatacgtagcagtgccagttcatgcaggcgccgggatgcctcacgccttcccagtccgagcgcgcagcagatgagcccgaggacaccggacttagttggggcatccatggtgcgccgcaacagaaagcgtgagccatcaccccacgattgaagagggccctcgagcctcagcagtacgatgctttcgtctgaggcagtcactatgtcgcctccggcaagaaaccgtccggatccttcaccctgttccattcgaggccagaaacctcttgcacaaccacactcacgaagtcgtcgaatctcgcgtgcgaatcttcacctgcaacaacttcccgctcggtcggctctcctttctgacagcgctcaatccatgtcaattgatagcgcccccccggtgagaaccagaagcgacgagagtcaatgccgtaaccctctgcaatctgatgaacgtattggcccagttgagcgatgctcatacccacgactccccgcggagcattcattgcgacaggctcgacaaacgcgttggcgtagttgacagggattttgccggtccgcttgacttctacgagaatcccgtctggaaggttgtgggctgcgaatgagttctgcttgccggttggtgtcgtcatggcagccgcacgaatgaaatggcccagtgcggacgctgcgagtgcggaagaggaagagccaccgaggttactgatgagttggtcccagtctagagcgaagtacttgtagaagcaggcggaattgaacatggcctcgtcaacgtggcctgcaccaccgcccaactcgcccaggtcgtccacagccgtgaagtagtccacatccgaaaccgcctgatgggttgatatggcgtgagctacctgcattgcggcttcgacgtcctcgaacgcatcggaagtagtcatgcgtccgaacatggcgatgtccactgatcgtctcgaataggcgcgcgagagttcacgcaggaaagctgcgagaggccgcttctgcagtttgcctgcgatccactggcggtagctggcgctccactcgtcactggtacgcatcgcctccaacacatgaacaaacgcatttgcctcagtacgctccaacaggactagctgcggcagtttgtgccgctcatcgctgtcgccgggctcctgtacatcctcgtcgcctatctggacctccttcttggcgatactcgtgcaagcctgcacgactctgtcccattcctcgtctggtacgcttgagtcgttcagcgcctgccgcaccatttcaggaaagtacttcgtcctgattcccgtgtgttcgcgcatcgcttcgacgaaaaggcttgcccctttgttgtgtacgtcgttagaatttcctgggttgcggatactgcgcttcagacactggcttgaaattctcgcgcgagttacgccaccaaatgtgcagctcttgggggcaccaaggtcatctcggttcaggttcgacggactgtggttctgaatcatgtgaatctcgactaacatcgctttccctccctgtttctagacgccagataggcgcgagcccatgcgtcgcgcacattgtgctttgattccctgccgggtcttccgtcccataccgcgaggtcatcaagaagctgcacccagttcaaccctttggctgaaccggcaactaccgcctgtgccaccaccttcaatgcccattgaagctgcggttccagcaaagccattggggattgcaagagcctatcgaaccgcagcaggaaacgaagtgcgtagcgagcggacagtcgccgctcggcgctgccgagcaaccgaggtagcacgctgtcatcggacgaagcgagcggaatcggccactgacagatcagctttgccgccagccaacttgtttctctctgcggtgctgccggactgcgctgtcgcaatggccaccagaggccggtgaacaaatcaaatccctccagggactcactgagagaggcaccctgtttgtgacggagttctgctcgttcgccgtcccctagagccagaagacgccgcacgtagacctcggttggattcatcttgtcgctccctccaattgcccttgctcgtgtctgacggaagcgcgcccacgcgatgtgacagtcatcccggcgtcatgccggagcgcttccaccgcccgaagttgcatctgcctgcgtttcagagccgatccggggtcacaggttgtaagggcaagctgaatcatcgaggcgagcacgtcaagtacttctcgtcgccagcgttccaccgagcctcgctgctctgacgaagtctcctgcgccagtgaccacaacagagtcacgaatgaaccgaacagtcggcgctctgtctcgcagatgaggggattgactaggcacctagccgcaagcttcctgatgcggccgtcacctcttgcccttcccaggagcttcctcaagttgaaccggccaagccaatcgagttcctcgaaggcagagcgacgcaggacatcgtcgtggagaaccttgcgtggtatccgccactcaatccggtgctcatcgaagacctttccctgggatgtgaatggcgcaatacactcgacaacgactgcgtcgcttcctgttccgtcgtagctatcgccggctggcaacgtgccgcactcatgtggttcgacggacaacataatcgctgaggctgtcctcctccagagggacgcctccaaggccgcgtacttgagcggatgcgatgcgcgcagaacgttatcgcgggcgtctggatctgcgttatcgttgcccgtgcgctccttcgtgtagtgaacgtgcgggtctctccatgagcgtgtgtcatcctttcttgcctgacccttggcgaataccaggcttgatacgacggggccgcttcttccacagttgctgcaccgactatctgaggtcgccctcgtcggacccaaccacacagctcgtggttgccacgtgaatccttcgagtgtaccgatctcgctgctcgaccttgggccgggcttccacacgggactgtcatccgcagccggcccgccacgaggcatattcaacatgagtgtgtctaacagcgttctaccgcgccgtatgaagtagacaggaggcgcattattgatggacggcgacttcccagcgccgccctgaatggcaagcaccgggaggcgtatgagccccaaggcacaacacgctgggcagatggcgacatcgtcgtcgtggatgtgtctgaagtggttgatttcagttgccgccgggaagtatgagagaaggtcggacgccggtctgcccggcacctcggacttcaccctcccgtcttgatagaaccgtgggccatctccaaagagttcaaatgcgcccgagtcttcatccagacgtgcaagccagccttcagggattccgcgcgactcccgcagagcttcaatctccgaggagccaggttcagacctgcaccacagagtgacggcaatcagcaatcgaagcagagccagattgtccgtcgcactgggctcgccgagactcaagagcagccccgatcttgccagggcatcacgtatgccgacatgagtctgggagccatccatacgaagcaccggaatccatggttcttgaagcaagttgtatttcacgctacggatcctcccggccagtctgcattgtgccggcgccgtgcgagccacggaccgttcaaggccttgttatccaagtcaccaacaacagcgggtctcccggcactacggtcacactgcgttgtgacaactgtctgtcacaactccggcagccacaagaagaagcgcaagaatcgtccatatgcctcctcgcgcctgcaaggatcggcagtgaggcaatggtgaggcatataccaggagcgcctcatcgccgtgggggagaacgccggcgttggggccaatctagaccaagtggctcgcggtgtcaacggtgcgaactgcctccggattctcgttgtcgagaaagcgctcggttgactccctacgaattcggttaccgatctcgagtgcagtcctaataacgacatcactccgccagcgataccagcgccagctagactcgcattgtggtctgcacacactcccaagacaattcaaccatgtggcgtgtcgtatctccgtaagctagacctgtacacatgagcgcaattgcgtgcagggattggcgttgccggcggacgccgaactgcgagattggctggagcaacggatgcgacagccgcttccctcagatgtattgaagcggcgcgcaatgcgagacccagtgcgggtcgtaaatcaattgaagcccaatgctccgctgggccagctgctagatgcactgcgcaatctcaaaactgccaggcattgaccgccgcatccagcgtccgcccagccgcgaaccgtctgttcgcgaccttgaacttgttgcttgggaactggtcgtggggccggatggactggcgaacgagactcttctctctggggagggttccacactgaactgaggaggactcagtgattcggactggggttctacgtggagttgttctctggaacgggacagaaggaggggagccacttcactcgatgtcagtcagcgcctcggccaatgacacgcgtaagcttcttccgtattcgcttgatcggcgggaagtgcttccctgcccgactgcctgcccacgcgcggcttggcatcggctgagtcaactggctcagattctgcggacttgctgggcctggactttcggagatcggcgtacggcatatatccggcgccggcctcaggctcatccagagtcactccaccatcctcatggaatatcagcctgcccactcaatcatctcctgcccgatagagttcaagtcaaagaactgggatagtccgggttcaggttactgacggagtgcttcgtggccagagggcaaacgcggcgccacgcttcatcccgctgccctcttccgagccgccagaagctatctagaaacatgaccacgatcctaattgtactccatgggcaggtagctcggtttgctctgttgcacggtctgcgttccgggacgcgccccggtgtttcatgtgattgctggaggcatggccacagctaacggacagctaacggattgcccgattatcgctgacaccggatggtatccagtgaggtggccccacagatgcggacaagctatgaagggagggttccgctcaggagtcggcgtgatcttacccgccgttgatactagtgccgtttagagtctcgttgctgcaaacacgtacttgcatggcaacggccgccccctgaacctctgcactgcgatcaaggcggcggtgctcgtggaagtcggtcgtgcggagacaaagaagagccccaagcgtcctcacagtttctatttcgactcagcctccggagtactcctgccttacttgtccctcaacctttcggtcctggaactcggcctgacacttcctctaagaagactgaccctttgtcgctgcttggatacctggggctagggctaaggtacccgacgcgcgaaaggtctgtcgaggccatgttaaacgtgcgacgggaaatcgcatgcgattatcagccggttctgtagggtgtcgacaggagtccgtcccgcacacggcatcatagatgactctcaccaacggtcggaagttcgtgttcaccgtagtagggacactaatcgccgcgagaacaacactgagatgtgcacagtggtgaccagcgtgcgtatctgtctcagtattcgcttagagtagaacacttctgtgccagtctgcggcggttcacgtccctctgtgggccgtggccacaccgcgggacagggatttcactggtctgcgtcacgactaccagttctttcggtgcggttgcgcagcattcacgcgccgaaatcgatgtactcatggccattcctgtgtgtgcagaccgccgcgcgggtgcatccaggcgtttcatgtgacattcacgttgcgattggctacaatgccagagtcgacaactcgtcgacttacgaacaaatgccactcaatgtgacacgaaatcgtggtgaagtgcgcgtcaacgcacggaaacatcaacgcgaggagacccagtgatgcagaacagaaccataatgcggccgaaaaggggcaggccgcgtgaagatgtgaagcaaatcaagataccggagactgcctacaagatgctctacgcgttcgccgcggcacacaacatgacattcggcgatgcggcagcgaagctcatcagggacagcattctcgattttgtcggggagggaccgacgccaggaatcacaggactgcactttgaccgtgtgagaaagcaggtgaaggtgccgataggaacgcatgcggccctgttcctgttcgcgagctaccacagcatgactatcggcgatgcggccgcgctgcttattggagtcagcctgacggagtactacgggctggacgaggacacggagaccggccaggggcgcggaaaacgagggaagaagtcgaagaagactgacgctgcggtcgaacgtgcgaagcgtcgcgagagccaggaccgcctgcacgcactgagggaggccgtgcgacagcaactcgagctgaccgacggcggcccagccactacgtgactggcgtcatgcgccacagagaagagtgttaaccatcgggtctgcgcccgcgttcgagttcgattcgtgcctcatgacagcgaatcacggtgcagctcatgcgtgcacggccctgcgacactgttgctgcacgacacccgcatccgggtggcggctcggacatctgcccgcgctgtccgattcgcgcttctgttcgccagtagcgctcatttccgctcagccagctatagctccatgtggcagcagccacggtttggcgccggcttgagacacgagctaccatgagcgtacggaggtaagggcaattgaccacgacagcagtcatcattctggctctggtgttctacggctcagtctatctgttgttcggcaggcgcatcagatcacgtgtggcgcatcaaaggcagatactccgtgcgcactctcaaaggcacgaggacggcactgtctagccgctgagcggaaggccgccgggaggcctggaacaaccctgaactacaaacgcgtcggtactgtgcgtggcgcttgtttctttgcgacatcgcagggaattgagcgccggtgtgctgaaccttggctgttccagccatagcggttcagatagtccacgttgtcaatcccttctggatacatcgcgcttgtgtgactcgtgtccgagtcaaacgcctcacccggcagtgagacacccttgagttcaacggcgatggccgccgccgtatcccgggagtcaggcgaagacggctactgccacatcgctaagaagagcgcgagattgcgcgcagttgacgcatgatgtgactgatggtcgcagaggctcgagccgttacgagtcgcgtgaaaaccgaaatgtcacccaccttctagtcacctgcaatgtgctcaacgtttgcacgccataactggagttatgtgtgagttcacgtacaggcagacactcacgggaggcgtcgaagtcccgacgtcggagaaaagaccatattggcgcgaggttgcatcggcaacttggggtgcaagtccgcggtcggcgagcatcggccacattactaatagtctcataatagtatagacagaccgaggtcgacaggatactattggagcatgagcgagacggatgcgcgacggctgacg

SEQ ID NO: 627 - DNA, 11186 bp, Artificial Sequence; identical to SEQ ID NO: 626
  Synthetic Oligonucleotide

SEQ ID NO: 628 - DNA, 11170 bp, Artificial Sequence
  Synthetic Oligonucleotide
caggcttttcgagacctctttgtcgaaaagctccttcagttcgggcatgttctctctcgcctgaaatagctgccttaattttttcagctcgcttacaagaccgtctacaaccgcggtcttacttctgggttttcctctcggcatgatttctcctttcgtttgtgatctagtataagaaggaaatgggaataggtcaagaaaaatgataggtttatgttttagatggctccgtgcttccgcacgttgtaggagagataatgaaggaggcgggggatttataaaaaggcgatgacttaccgccgttattcgtaccgccgttgatgttactatttaaagctattaatcgtcgagtacggcagcgactcgcccccattcttagtacgacagatggtgttgcgccgcctacgcgagaggattcggacgtccgaccttctgcctgataggagcgtttaggcttacgttatatgtttaccatagccggagttatcggaaacataaatctccggtgtgaactttaataagaagattattaacgtaaccgacgaaaaggggtgggtaagggatagggtggaccgtcttaggtcccaaagtattattatttattatatattcgggcttagaatcaaccctacgcacccccgcgtcgcgggtggtcgtgggttaggtgttttcccgaaaaggccgaggcaccaattaaaaacgcagttttggtaacggccggtcccgggaagcgacgactctacccccccccttactaaccacggcgctgactatattatgcgagtcgcaagggaggtagagtaatggctaggatgtacggaccttatagaaggggagttaatgttactgagttaccgaagaagttcgcggagtagattcttactccagaagaggaaagggaaccggcaacgatctccgaacgtcccgacgggttttatccctccggacgttccgcggggttctctaacaaaaaaaacgcgaatttattttccattacccggtaatggaaaaccattaaggtagtaatggaccagtaatgaaaatctcgttcttcaaaaaacggcggaatacgcacgtttttttaggaataccaataaaaaacctggttttgacggaaaataaagttcgttttatttttactacgcggctgtgcctataggtaggaaaagttttaatcaaggttatcgggtacaagaagtacaagagagaagatagaagtaggagggagtataaaaaaagagccgccctccaaaaggagaacggctcaggtttagggggggtcttatttagcggtagaggctcttgattcggcctagggaggtaggagctataccttgtgtattctcgaatgttagtcttatgttaagggcccaagggtaaagatctccacggtcgtatcgatactataaggtccataacgtatggtcttggttataattgcctgcatgaagaggtgtgctcttttttccgttaccgttatacgtaacatataatattaggttatagtttttgttgtagtcgtatctcatattcttacccaatagtatgtcataccacccgctttgggctggggtttcgtagggttcggcccatcttcctatttccttcttgcttcccgctagatagttattctcgaaatagcggtcaagtttatcgttcttagtcataccgatgtttatgatggtagggtagcttggttctcctccataaaggaaactacttgtgtccgatttgtaccattctaccttcgttattgttcctgtgtagttgattctacctctgcctgtcagcgacatgaatgttatcctgatgtttgaaatccaaggtacttcgatgggggttgatccgtagaatacctcgattggattagccaaaactaaggaagtggctaggagaattaataccgttatggttattagctttttcatttcatcacctatacttatattatagcacatttctgtctggtaagcaggagcgcggagggtccccagcaccctcccgggggtctgtagcggcacgttggccgcggcacaactgtaaaaggactttccgctgtatgacctgtcggcgccgcgccgccgcgaacgtcgccgcatcctcgccccctcgccgggattttatggcccgttctatttgctcccgtttcgggacggaccgtcggccgccggccgttcgaccgccgttttcttgtcaggataatatgtgacctttacctcgctgaaaccgtccacgtcaacggagtagtcgacgaccgttagctctcgagcaagttttatttcttcctcgtctccgtccgtgtacgtcaagtatacgaagccctcttcgccggccggtattacatgcctgatgactacaacgtcgcggcgctcgagttgagtttcggcgcgcgtctgacccctttccccgggcgcggttttagtgacgatttcgaccgctttcacttccctcgcggggatgctcgtaattgcttccttcgacatctctaggcctccttttaaataactcgcagttgtggggtgaggtccgactaccgggttaagcttaaaatacgcgccgccgatttacttttaatactcctcccgaacgccgtccggcgagatcatccaccatgtgcgagttctagatctagcttgtctaccgccgcgcgcaggtcgtcgccgaggagcttcaaatatctagccgtcgtgtttacgcttgtgtgacccagtagctctttcacgacgtagacgttgacgccggccctaagaagcgcggtcgcgcagttgtgtctgaactcgccgaagcggaactctacgccggtggccttcttggcccgctcgaactttctcttgaagtcgacgaggtgagagttattacggcccgggaagaggtaaccgtcgccgtgttcgtttttacgacgggacaggacgtcaaacacccagtcgttcagcggcaggtgcaacgtcagctcgccgctacgcttggaaacttgcaccgtaagcagtcgcttttcgccgtcgacgtcggcgccgcgtatcttcaagatgtcaccccgccggaggccggtaccgaacgcgaccgctgagaggtcgtacaacaaagggtcgtttgcgcggcagtagtcgaagtagctcttgagttcgtcttccccgaggatctttataggcttcctcttctcagggaaacttttaatgccctggcacgggttgccgtcgacgaggtcgcgtcgggcggcgaagttgaagaagtgtttcaagacggttaacgtccggttattggcgggggcgttgccgtttaaagcgcggtggctcataaagtcctcgacgagagggcatttaatatcgtggatgggtacgttcccggcgaagtctacgaaacgccttaaataggttcttttgagagatatcgttcgcgccgtattccgaacggtgcaataggagatgtacgacgctattacgtcgttcagcgttacgtcctcgccggtagatggggattttttgttggccatagcaagctcgatgcgaacataagcagtttcgttaggtttccgtctatcatcgggagggaccagggttgacggcgaatggtaccaagaagtggaaataccgaatacaaccgtttaaagcagccgcgctatgatcagggtagtctccgtagcggacgtcggggcttcacttaattaataccaatcgggcaacgagtaggacgaaggcgtcggctatcagccaggtcttcttcagcgagccgcggcgctcgccggcctcgagctcgttccagtaaacgtgcgagataccacaaaggtctgcagcttctccttgcgataggccgcgtaggttacgtaggtctacgaggttatttactgatacgcgaatttccataaattatacgctatacagaagttaaataaatacctgactcgcgtctccgcctatatatataacatatccgcaagggaaagtcaagcaaaaaacttaccgatatgtcgatttttattgaaggccttgcgtatatgtgatatatagggccgtggaattaggtaaacgaataaaagagcttcgagaaaaccaaggcttatcccaagataaattggcagaagctgtcggtacatctacgactactatatctcgtatagaatctgggaaacaagtaccgagcgctacgctggtagcaaagattgcagaacgtttttccgtctccgccgactacctcctcggccgcgcggtccacgccgaagacctccccgacgattaccgcgagctgttcgagcttgccgttgaagccgggtacgcggcggacctcaaagatttcttccgttggctcaacgcgaagaggaataagctcgtcgcggacgccgagaagttcccccgggagccggacgaagaactgctggcgctaatacccgattttacgccggaacagatcaaggaagtcctgtcgaaattcgagggggacgtcgtgcagcggatcgcaaagctcacgccggagcagacgaaggcgttcaacgaagaggtcgcgaagatcctctactacctcgacctcgaggccaaggtaaaaaagggtggagaactgacagaagctgacaggtaggttgggtataatataagggagttagtatccgtgggcgttaagcccgagctaattacgaagaattactaccgtctcgccggcggccgcgttccggtcaacctggagcgtctgtgtcgccggctaggctttgcgatcgtcgagtggcccgggccgcccgacttcacgtcgctgctatccgttccccaccgcatcgtcgtagtcaacagaaacatgcgctacgtgcggcgccggttctccgtcgcgcacgagctcggccactacgccctcgggcaggccggcgttcaattcttcggcgagtgcggccgtgccgaacgcgccgccaacaggtttgccgctagacttctcatgcctaagtcggtagtcgtctccttctggtcagatctcagccggggccgcgaacctttcaattggcgcgtcagattactcgcgcatcgcctcggcgtctcgcgggcggcggcgagggtaagattagggtagatgggcttaaacgaaaatacgaggaggtagcgaaatgggaggtaccaacgatatcgtcacggtcaacgcggaagcggtacgcgaggcattagagcatttgaagataatccgatctggagttagttcgataaggcagtgggttacttttttcggtataatcgcgattataggattcctaatagtcttactgcagttggtatgtagcgcggcgaagtaagggtttcaacaacttattcttttaacctctggaggtcgagcgctattaaaacgatctttattacaaccctcgcggccttggccttgtcgattcccgcggctggcgccgacgacgcgtacgccgagatccactgcaagcacttcttcaacgggtacccgacagggacgccggtaacgaacgacctcgtcatccgcgacgggtacgcgctatcgtcgaacgacgagacgaagtttgcagactgggtggcctgccggctggactgtgcgacggtgtgcggcgacgttccccagcagcggaaatggatgacggatccctggcttgacgaggacgagacgcttgaatcgaagcccgacgactacgcgggcgcgagcgacgccctcggcgtcgaccgcggccaccaggctcccctcgcttctttcaaaggcacgctctattggtatgaaacgaactattactccaacatcacgccgcagatgtcggacttgaaccaaggaccttgggttaagatcgaagacaaggaaccggacctcgcccgggccggcgacatcgtctacgtgatgaccgggccgctgtacgagcgcaacatgcccgggctaccgaacgccgacgaaccacacctagtgccctccggctactggaagatcgtcgccgtccaaccgagcgacgactacgactcgatacgcgtcgcccgctttcatcttcgatcaggagacgccgcgggacgcggccgtattggactacttagttaccgtcgacgacgtcgaggagcggagcggcctcgacttcctgtgggaactgtcgccggccgaacaggaccgaattgagagcggtacgttcgcggagtgggcggcggagaacttcgggtaataagaatctagtacctcgtcgacagttacaacgaccgcatccaatacttccgcgacacgacggcgggcgttttgccggcgtcgctcgggaaagtgaaggcggtgtttaggtaaattctgcatcaagcccgtcgcatctcaggtgagacagtatgggtaagattggcgcggagcgtacggcggccgcttcgacgcggccgaattagagtcataaacgggaagaggaaatcatgaaaaacgggaactacaatttaattgacgaacaatggattcccgttcttatgcgcgacggcgaattccggcgcgtcggtattttgaaagcgctcacgcaagccgagcagatccgggatatcgcggccagcaaccctatggaccgtttcgcggtcttaaggttattgctggcgttgctttattggtgcagggggaatccaccgaggcatcccgccgaagatattggggacgctttcccggcgggatatttttctaaaattaccgataacaaagaagcgttcaatttgctgggagacggtccgcggttctaccagttcggggttaaaagcgcgaaaacacctacaacgcctaactacctgatccacgaaatccccacggccacttacatcgctcatttcgtccacgcccgcgacggcgttgacggattatgcccggcgtgttgcgcgatggggttagcgcgactgccggcattcgccacccaacaggggcaggggaagggaccgggtatcaacggcaaacctcccatatacatcgtcccaatggggccgtcgctggcggcaacgctacggctttgttggcagccgcacccgaacctgggtgttccgtcatgggagaacgcggaattgcgattgcttaaaaacggcaaggttcctttactcaccgggttaacctggataccacgaacggtttggttagacgatcccaacgaaccggtagaaccttgtattatgtgtgggcgcgttacgcgtttaatacggcggagtgttttcgcccgaagggtaagcgtcgagttgcggaaatgggatcctttcgtagtttatggcaatgatgacgacgacgtacgcccgttgcgggctgttgaccccatagcttctaaaaccttccccctttccgttactcgcgagtggaccaaagtcctcaggggtgttctccaacgctatgcgccattattaaacgtaggggaatcgaagatatgggttatatcgttttcgactgaccaggccaaatactttgaggcgattgattacgaattcggtttccctcagacctcttccgatttagtagaaatagacgaccagtgcgaccggtggcgtaaatggcgaccaagagcccctcgaacgcccgaagccgcattttttaatatcgtccctcacgccgagaaccggatcgccgcccgggccgccgagttgcttgcgggagacgaagcttgggcgcaggcagcggacgaatataggcctttaatgaagtccatcgccagcgccttttcgccaggcgtcacgaccagggcgttgcggcagcggcggcggatttctaaggtagcgcccgccgccgcccttcgatcgcaaacaacggaaaaaaagcggcgcgagagagaggcggataaatgacggcaacgggacaatacatcggggccctcgcgcgattaaaaccaggtgacctcggtttactgcggatccacgccggccaaggactcgacgaaacggtgaacgggttcgacttgttcacgggtttatggtggccgattagacaaacgagtcccaaagcgccgcgacgcggcgtagcctggttggtggcgaagctgtacgcgttccggccgttggaatacgcctccggctacacccttgcgcgcgggttacggcgatgccggcctcgcgacgaaaaggcccggttgaggttcgaccaacggttcgaccaattattaacgttgccggtcggcggcgtcgagcccacgttacgttgggcgttggacgagctggccgaagggaactacgagctagattgggttcggctgaccgacgacctttctaaatgggaacgagaacccacgcgcctcgcgtgggcggaggaatatttacgaacggctaccgacggaggataaaatgttaatcgaaatccacatggtccaaaatcacgccgcggcgaacctcaaccgcgacgacctgggggcgcctaaaacctgctggttcggcggtgtcctgcgctcgcgaatatccagccaatgccttaagcggagtatccgcatgagcgacgggttcgcgaacctgcgcggcggcgttcggacccgacgtcttgcccagttgatcgctgaacaggctccgggcgtaaaagacgcgcgaaagcgcgccgagaagatcctcgacctatgcggtttcaaagccaagaaaaataaagcaacggaagcggaggaaggagccggcccgagttcggatacgagtaaaatgctcgtttatacgagccgcgaagcgattcgggaaatggcggcacttctgcaagacacgaaacgcaaggacgcggatatagccgccgctttcgccgagttgatagctaagaaaacagccgtcccggacatggcgctcactgggcgtatgctggaaccggataaagcggccaaggacatatggaaaacccgcgaaacgacggtcgaagccgcgctccaagtcgcccacgcgatttctacccacgaagcccggcccgaggtggattactatgtagcggcggacgatgtgccgggcgacgacgccggcgccgcgttcatcgaagaggccatgttcgcgtcggcttgcttctacaaatatttttccgttaattgggagcagttaacaaaaaacctgcggggctacggcgaacgacaccaggagttagcggcctacaccgtcggctcactcgtgcgcgccgcggctctcgtaacgccgaccggcaagcagaacagcttcgcggcccacaaccctcccgatggaatcctcgtagaagttaaagaaaacaatattcccctcagttacgccaacgctttcgcgaaaccggcggtcgcgggcgagcgggatattatcgcgcaaagtatcgcccaactcggccaatacgtccatgacttggacgccggatacggagagccgcgtttccgcgtttggttctctccgaacctccgttatccgctagccttcgtcgacggcgaccgggaagtccccttgctggagaacaacgtcaaatcgctggacgaactagtctcgggcgtcgtcaaagcggtcgggcacgattgggagaacgtccgggaggtcatcgcggccgccggagtggagcgatgaacgcgaatacgctattcttacggctcgaagggccgctgcaagcctggggcgaccaccgctctaagttcgtcgtccgtcggaccggcgatgtcccgaccaagtccggcgtcttcgggatggtgtgcgccgcgctgggcgtttcccgtcgggaagccgcggcggaatggctcccgcgattaaggccgctcgcgatgggagtccgcgtagacgtcccgggagtccgctggtgggactaccataccgccggcgcggggtacggcttgatgaccgccggcggaaatatcaaaataacggcctcgaccggcgaattcgaaacgctcgtgagccgtcgcgaatacctctgcgacgcgtctttcctcgtcgccctccggggcgaaccggctttaatcgcggaaatcgccgcggccgtcgaaaaaccgcgatggactttttacctgggacgcaggtcttgcccgccgtcgcggcctatattcgaaaacccgccgggcgcgttccccgatttaatttcggcgctttcggccgttccttggcgggcgcggtataatgaagatgcgaaaaccgcgccgaatgtggtaacgtgctttgtcgagtgggttcggggtatacacggagacgaggcccctggcgacgcgattatttattacgacgtacccgcaactttcgcgccgccgtcgcacgatgccaggctcgtcgtccgcaaggaattacgggtcggcccgggcgccgacgtcgagatcgccgaaaaacccgcccagcgcgacacgccgcggccgccccgcccgagagccaattataacaatacccaatatcgcgaagcgcgcgccgctcgcctcgacgccgaccacggcctctgcgtcttttgtaaatctcccgccactaccgtgcaacacgttacgtaccggcgagccggcggaaacgaatcccaggaggacttgcgctcgctgtgtcggctatgccatgacgcggtgaccatgctggaatacggcctgggtatggggctcgaccgcatcaacccggaagaccctcgttggcgcgaccagatcatccgcaaacggcgagagataatcgctttccgctcgctcgagacacgccgccggcgcctcgccgcggaggaggtggaatagcgtgtacctctcattccttcttattgacgttggcacaaacccggaccggccccggcccgggcggatttggttgcgaaataggtaccgcgttcaccagcgcctttgcatggcgttcccgtcggcgaccagggctgcgggagacccgcagttcctcaagccgtttaagccggatgatttcgcggctcagcaagtccacgtcgcgcgtaaggccgacgccgggttcctgtttcgcgtcgacccgcaactcggcggccgcgtcgtaatcctcgtgcagtcggcgttaaaaccggattgggactacgcctttcataacgccgggtaccttctggcggctccgccggaggcgaagcctttcgaccccgacgtcgcgaagggacaaaaactccggttccgcctcgtcgcgaacccgacgcgtaagatcgatacgaagagcgggccggacggacgccggcgcaacggcaagcgcgtgccggttaactatgacgaactcggggaatggctaacccgccgggccgagcgagggggtttctccgttgacgaagattcactcgccgttcaacccggctacgtctacgtgaacaagaaacggaacggcgacggccaacg

SEQ ID NO: 629 - DNA, 11146 bp, Artificial Sequence
  Synthetic Oligonucleotide
tcccatgctctccaattgggagtacaccgtcacgttggcggatgccaaccagacagtggcagtattctatggcgataacgtagcccgcaaggttttgggcgcaacgatccggtatcgaccggcatacaacagcccgtcgaacaactggatcaacgacccgtgtgaactcttaaagcgggaacttgcctttggtcaggcaccagaacggggcacactcacctacaagacggttccagggaacgtcaggtgcagcccaactaccgagcagcagcggacgcttgcaccgatggcatctgatacatgtacgcaagtacgacaaacaactgggaagcgtcaaagtttaccattcccttctggcgtttgcagcgtcaccggctatagaatcttactatctaatggtaagagtctgtccgattgcaccatggatcgtccatctgttagcggcgtcgtcgtggatggagtcatcaatggctggcccgaggaggggcgtccgccttgtccctgaggaggcagtactcacaagcaatcgaacgcttcgtcaccggttggggagagcgctggtgagtgagttgctccgacactatgtggggatagtgaatggtcgactctcctccattttacctcacccccacgcgtgtggggacaacatgatgtttcgcaccgcttccgtttgtaggtccggttcacccccacgcgtgtggggacaaccggggttgagggccgatcttacaggggccaaccggttcacccccacgcgtgtggggacaacctcagccaatcggcggaagaaggacttcctctcggttcacccccacgcgtgtggggacaacgccgatcttgcgtctacgttgaccgtcgtgcccggttcacccccacgcgtgtggggacaactgcggcgtccacccgtgctgcgcagcgtactccggttcacccccacgcgtgtggggacaacggtcgcagtgtttgcacgtcatgccgtgcccccggttcacccccacgcgtgtggggacaacggtcgcagtgtttgcacgtcatgccgtgcccccggttcacccccacgcgtgtggggacaacggcttcgccagcgacctgaccgaccagcttaccggttcacccccacgcgtgtggggacaactggttggcagcctcggtgacgcgctgggcccacggttcacccccacgcgtgtggggacaacttaaacctgagacttgctcattagcactatatcggttcacccccacgcgtgtggggacaacgtagaagttcaaattagcaacagtcacgatgacggttcacccccacgcgtgtggggacaacactggaaaatacatagaaaaacactactcctcaggcacagaacgcggcacccgcaccagcgaaagcccctcgaagtctaccacctcccgcgacggagtgccccatgtccgcagcgcgaacccctgctcattgtccgtgctataggcaagtaccgctccacctcccttcaggctgcggcacaccagcgtccatagctgttcgcgcaccatggcagacaccctgcccacaaacatcccggtggaggcctccagcagccaccgtgtcagttcaccccgcaacgatgcaggaacccgctcaagtcttagcaccagcatcatttcacctcgctaggctcgcatgacttgttccccccggtaccgatcccacttccgggtcccacaggccgccggggagggcgtcgtctgcgtcgtaggcgctgtcctcatcctgctcggtaggcttcacgccgagggcgcgatcaatatcggggattatacgggccaagagccgctgtttgtggaaggcatccctgcttgcctgccgcacccgcgtctccagttgatgaaacccttcttcggcagccccaaaggcaatcgggatgctgaagtcgaccttgtagagatcggcgatgtcgtaaacgaaggagagcatcttgcccgtatggacgaaacccagggctggggagtacccggcagagacgatggcggcatgacaaattccgtagagacagctattggctgcggagagcgcccggttcatagggtcggcgacactccagtccccccgtcggtaggcccgtccggaccaggggatcccggtggcgcggctggcctgggcatatgcctcccggacacggatgccctctttaccccgtatttgctgcaagctgaggccagggtccaggggatcgggaaaccgcatctcataaagtcgccgcgccacctgaagccgcagggaagggtgggtacagaggtaggcctgatggagcaggcgccgggccgaccgggtttcgcccagtccgacggcataacagcgcacgccctcttcccccgtccataagaccatgcagccgttctccgccaggacatggatggcggcatgggtgattctggtgcccggcccgagcatcagtaacgacagactcgcgcaggggacggcggtgacgccctgggcatcgtgcagggcaatggccttgtcctcctgatcgatgcggcaatgctccacgtacaagtagctccagctatcccgtatcttgggtaacgcgtgcaagtctttcatggttcacctccctggcggggcgactgacaggagaccacagccaaaagccttcgcgggaccaatgccgcgtatgagggtatcttggaaaggtgcgggatcggtgacttggaggataccgtcataccggacggagcgaagtcggtttcccccaccgccgccatccttggaggcgtggacgtaaccaggttgtacgctaaggagcttctctacgcggaatccggcaggtgcagctcgctgcgctagccactcctctagcttttcggttggaacggggactcgtttcccaatccattccgatttgacgggttggccgtccttttcccgtgagttctggctcaatcgctttgtgggattcgccacaagacggaattggagacgctgctcctttgtggcggacggttcaaatgctttcgtgctggggggagccgccaggagatagtccgcattatggaaagcgtagtcccagtcgggcatgcttgcagactgcacaagaatcacaactcggccactgggttgagggtcaatgcggaacaggaagccagcatccatgctccgagcggcatgtactggctttggcccgaaatcgtccgggttgaaaggctgaaggaagtccggatcagcggacaccctggatgcagtcggaaacgccatgcacaggcgctggtgaactcgatagaggttgcggagccacagccgaccggggcgcgggcggtccgggttatctccgacgttgatcaagaggcacgataggtacatggctactacacctcctcagggctgaggcgacgtcgtcgggtctccagcgagcggaattggatgatctcttgacgcttctggataatgtcttcccgccagcgtagctcctcagggttgatgcgatccatgcccatgccatagccgtattcgatcatcgtcaccgcgtcatgacaaagccggcagagtgagcggaggtcgtcctgggtttcgtcgcctcccgcccgacggtaggtgatgtgctgcacggtggtggcgggacttttgcagaacacgcagaggccatagtcgtcgttcaggcgcttagcgcgggcattgcgatactcggtattccggtagtccgcgcggggtcgcggaggcgatagcgtccgattctgggcaggcttgtcggctatgctgacctcgcctccgataccgacgcgcaaccggcggcgcatgacgaatctaggggcgtgtgcaggaggctcaaaagtgagcggcacatcgtaccagacgagggcgtcggcgggtgctactggctcctccagcgacgactgccagtcgagcagacactccacggttgccggcacacggtctgttgcgagccgctttcgccacgggacggagcaaagtgcagtcagcaggtcgccagactcctcggcgggacgctccaacagcgggcgggatggcgggcaggcctttctccccaagtagggtgtccagtggggttttcgcagcgccgcctcgaggcgggcgaccagtgtcggctcaccctgcagagcgaccagaaagctggcgtcgcagaggtactcccgccgcgtcagcatcgcgccggctttggtcttgccttcggcgatgcgcatctgcatccccgcgccgacggtgtggtagtcccaccagcggacgcccggccggtcggtccggactcccatgcgcagggcgctcaacctcggaagccactcataggaggcatcggggcgcgagacgcccagcgcggcgcacagcataccgatcactcccgatttggtgggggcctcggctgttcgtcgcaccacgaacttggattcctggtctccccaggcttgcatggggccttccagccggagaaacagggtgttggcgctcatacggctcatctcccattcaaggcaatgctctggaccgcgtcccagtcgtagccgatctctgcggtgacagcgcgtaccaggtcctccaatgacgtcaggttcttgtcggcgacgtccttatcctccttatcgtcccgcaccgttaacgggtagcggccattcggggagaaccagaagcgcttctgcggtctgccgtagccggtatccaggtcatgggcgtactggcccaactgggcgatgctttgcgagataacgtcgcgctcgccgtgcgacaccggattggcgaaggcgttggcgtagctaatggggaagtcccttatctcgatcagtatgccgtcaggcttattatgcgaggcatggctgttctgcttgccagagggattgaccagcgccgccccgcgaatgaacgcgccgacggtatgggcggcaagctctttgtgattgtccccataggctttcaagttcttgaccaattgttcccagtggatagagaagtacttgtagaagcaggcggaagcgaacatcgcttcgtctacatatcctgccccggcatcctctcctgggacatcgtccttcgccacgtagtagtccacctccgggcgggcttcatgggtggaaatggcgtgggctacctggagggccgcttctacagttgtgtctttcaggacaccggtttccagcattcttccactgagggccatgtccggcacagccacccgttccctaatgagcatcccgaaatcactttgtagctgtgcatcggtcttgccttcgtcgttctgtagcagcgcagccatttgggcaaccgcctccctagtcgtgtaaacgagcatatcgcttcttgactcatctttcggtgcgatgccacatgcttggagaattcgtgcagcgcgattctggacatccgccttgccagttacgttctctgcgatcagcttcgccaactgtcgcgtgcgaacgccgccaagtagcttgctgaactcatcgctcatgcggatgctgcgtttgatggcctggctggagatgcgtgagcgcaggacgccgccgaagtagcaggtcttgggcgcgccgaggtcgtcccgattgaggttgtttgggctgtggttctggatgatgtggatttcaatgagcatggctatgtcctttcgttgctttccagaaattgttccgcccacctgagccgggtacgttcccgttcccagatggacaggtcatccgtgagtttcacccaatcaagcttgagatcctttgaggcgatcatggcgactgccccttgcagcacaggctccatcttgatgatgggcagcatgagcatccggtcaaagcgctgccggtagcgctgacgctctggctccttgcttggctggcaacgggccagttgccgggcgagggtatcgccaggcgactggaggagcggacagcgagcgtaaagcttcacgatcagccaggtcacctcgcgttcaggcgctgcttggtttctctgccgcagcggccaccaaaggcccgtgaacaggtcaaacccatgcaccgatttgtccagcccttgcccggcatggctgcgtagcagccccaggtcgccaggcttcagctttgccagaacgccaatgtactgctccgtgggtgttgggctcatggcgcgcctcctttctttcttgcggccttttttgtaggccctgtggtggtcatatccggcagcgtgtcagcaatgtgcttccgccattcaacagccgcagtcgtaaagcctgggtagagagacctggcgactgcctccatcatggggcgatactcgctggcggcctccagccatgcggcatcgccgccggtaagcagctcccccactttggcagagaccttgccttccacatggggacgaacggcggcgatggctgacgcaatctcgggatgcttgcggtaagaccattgctcatctggcggccagactttgcgggcaaggcgtgcgttctcttcttgccatcgttccaagagttgcacagcggtcacagattgacctgctgaggcagggagagacagtgtgtactcaatagcctccagatacttgtcgttctgcacggtggagaagccgacgacccatatgctgtatttgccaccctcggcccaactgtcctgattgggcaagtccgttgcagcgggggcgctttgctgttggaacatcccagctacgattgacgcccactggccagcccccgcatcggtggcgcccagggcgttcctagcgtgtagggtcgtgactttgctcttgccgctgttatcatagatgacatgggggtcccgccaaaggcggttgggagtttcatcatcggttttcatactgccgatgccggcgaaaacgctggatgttatcaaccgattcttgcgaccacacgagatgcaggtggcttcggattcctctggattgccgagccatacccgcctgggcagccacgatagtcctgttaacaacggcacctcgccagtctttggcaacgagatgtccggcttctcccatgccggcgttcccagactcggcgcggagcaccaagagagccgcagcgtctttgcaagggagtcgccgacaggtatgacataaagtgggggtttcatgttgatgcctggaggcttgccgctccccccggacgttgcaaacaacggcagccgcaacaggcccaaagcgcagcaggcaggacaaaggccatccactccatcggtggcgtgtcggaagtgccagagattggtgcccgtgggtatctcgtggaccagatagtttgccgtgagcggcatttcgcgttttcccctgtactgataaaaccttcttccctccccgagcaggttgaagcaatccctgttctggtccagcttcgcgaaccattccgtgggaaacgagtcatcgggcgcactctccgcttctgttggcggattccccttacaccaatacagcaatgccagcaggaaccggaggatcgctagccgatccatgggattgcttgccgcgatttgccggattgtgcccgcttgcgtaagtgcctctctgacgccgattcgacggagcttcccgtcattgttcaggcacggtatccacggttcatcgaggaggttgaacgagaacgactctgacatgggcacctccttcgttagagacggatgatttgcaaaccgaggctggtgtcataccgcagtatcccatttcccacccggcactcgttgttttcatcgagagagagcagccgcaagcggcgtaacagtccggagcgcttccacgggtggggcacgggaagtgcgagcaatagatgtacaacatcagcggcagtgatggagacggagtgacggagaagttccctgcaagttgccagggagggaacagcgtccgctgccgcatccaagggggagttcgcgggcagcaacacaacctccactgaaggctcggcgaggcgcgtcagcgcctgcagagcgggatgaaggtcggcagcatcctcttcacgcgggtcgcgcgtatagtcttccaatcttgcgcctgttgaaggcgacggaatgcggggcaccattgctttgtcacgctcacgttgccgcttcctcttcatctcggcgaaggtgctgtgccagcgggcggcgaggtgtcctggcgcgccgtctggcggttcgcccgattcgcggtacacctcctcgatcaaaccctcgatatcctcaggaacggcgatggcctcccgatcctggaggacgtgccaggtgcggaggaggatgtgctcatcatagacgtaggtggtggcgcgctcgaacgcgggggtgccgtcgtcccccagcgtgggcgacaggacctggagcacgggttcactggtggcgcgccgatccgcccggtggtggcgctgaaggcgccctgaccgctgcaagaggaggtcaaccggcgccatctcgctcaccatgacgtcaaagtccaggtccagactctgctcgatgacctgggtggccaccaggatagcccgccatggtctggctgcggtgggtccgtcatctttatcgggtttgccgaagcgcttcaggcagcgctcctcacgttccttgcggtctttgaacaggaagcgggcatggaacaggtcaaggcttggacgctcctcttccgggagggcggcataggcgtcccgaagggcagtggacctcctgggcgcgattgacggtgttgcagatgaccgcggcgcagcctccatccctgagctggccgagcaagtgtgccggtagactctcgataccgaagggcagccatcggaggccgagccgtcgtcgggtctccacagcagcctcgaccgtgcgcactctcacgcccacgacccctgtccaggtgatccgcggatatgcctcgttaggaagctccgctacgggcaggcggccgagaccgctcaaatacgcgttcacgagcgcctgcctccttacggttggcagtgttgcggagaggagtacgaccggcgagccgagcgccgccagccattccaggaggcgctccaagagggtcgtcatgtacgcgtcgtaggcatggacctcgtccacgaccaccgtcttgccggccagcccgaagagtcgcacaaacccgtgcttcacctggagaaccgacaggagcgcttgatcgacggtgccgacaccgaagggagcaagcaggcctcgcttgcggtaggtgaaccactcccctgcgcccacggtcgcttccagctcgccgctgccgggatcaatgccggatggcgctgggaaggcatggccgttctccaaaagcttgatttccgtgttcagagcggcgtgtccgtgcagaagctgcatgttgatcttttcctcggtcccgtaccggccgcgaaggaaccgctcgaaccgctgatgcagctggttgctggttgcctgggttggcatggctatgtacgaacctcggaaacccgaggcgttccagtagtcagcaagatagaaggccgcctcagtcttcccctcgcccatgggagcttcaaggattacgagaccgggtgccacgacctcgggcgcgacctgctccgtggccacctgaagaggccttggcgacattttgggaaagagttcttcgaaacgaggcagcttgctctgccgaggccaggcatcccagtgcaagagcctgatcgcgtcgtgagcccgcagcttccggtcggccaggtacgcagggagatcgtcggggccatccggcgcatatgggaagaatgcgctgtcatcgatggagccgatccagtccgcgacggagatgaatccggccagcagcatgctcgcggcgttggagggcagctgcggcgaactctcaagaccgacaaggccgagaagactggcgagggtagtggcgagctcatcccgaatgctcggccaggggttaggctcgccccgccggggctcaccccgagcggtgggaatgcgcgcgttcctgcgggacgttgccgaagggaaaaccccgtggtggcctcctgcgatcacggcgaggcggtctgcactctcttgggaaacgtccaactggcgactaaggatgtctgggaggcaggcggccgtcaccgtgccgtgccatgggtccttatctcctaaagataaaggccggaattcgaggggagtgttcacaagccatggcggtgtcgaacgtcgatcccggctgcccttcgcctggaagactggagtggccttgccgagatcgtggatcccggccaaaaatgcgacccactgtttggtggatatgctgtcgagttggagactctccgtcagatgctcccgcgcacgtttagcgaagcactcctcccagagggcctccgcaaccacagccacatcaatcaggtggcaaagcagggggtggtaagtgtcctgtccatccgcactatgtcgaaacttggccgcaataagcccagcagccttttccactgtggtcaccgccgtcctgggagtgaatccgtgttaacgatgcaaaggtattagaacgcacattcttataccataggttgacaagattgagcaaacagctgttgaggcttccgtctccaaccagtcagcccttggaaaggcacttccagagaacagcgtacccgcttacgtaaacaagaaagctgacaaatcgaatgaggaaatcgatgcgtagtcctagctcggtccaaacggatcaactagtgctaagtggcaaataatagcgttcattcagctcctcgtggaaacgccccgttcccttcgagagcctcagggaacggtcttctgcaactaagcactaaagtcaaaagagagggaatcttgggagtcaggtagcgatcaggaagacgaaggaatcctttgtttccaccattgagaccgaactctcgcttgggcgaacaaagcactattgcaacgtcgtgtctacagcggcctatcctacgacctctagcgtcagtttcaaacgcgctgggaccggagtgccgagcgcccacttttgcacatatagcgtaccgactgcaggtggttgccctgcggtctcttcttcgtaccgcaccgtgttcttggtctcccgttctagcttgaacccgatgaccttggcgtccacacggtacctcctcagattcctgctgctctcgtgctcgccgcgggcgctgcggctcgatcccttaaaaaggcgaccccgaatccgtgagtggggtggtcgggcttggccctgggccgtccggacggggtttttgacggtcggacgaggactcagcctccgttcacggtcctt

SEQ ID NO: 630 - DNA, 11051 bp, Artificial Sequence
  Synthetic Oligonucleotide
ggaacctgcggctggtccttccgcgactggaaggggacgttctaccctcccggcaccaaggatgagctggcctactacgccagccagttcgacgcggtcgagatcgacagcacctactaccggataccctcggcaaagtctgtggaggcatggcgtgaacgcactcctcagggattcctcttctgccccaagctgcctggcgagatcacccacgagaagatgctggagggggccgacgagcaggtcacggccttcaccgacgtgatctcccggctgggagacaagctcggcccgatactggttcagcttcatcccagcttcgcctgtccttgtcaggggcctgcgcagccggcctagcatcatgccgccaaccagaatgctctgactcgcgtgtcggggaagagccgtcgctcggtggtgggcgacgcgaccccgtcagtgactcccagcctagggagtagccggagtcgggggtgaccgcatgccgacctcacgggcgggtgacacccacatgtggtgccacgctgcgtctggcgtccagtgccgcgcacaatgcggcgatcaacccttcgtcctttgacgccgcaaggacctcgaccacgatatccgtcccctcgagagcccggaagtacactgccctcacgggttctctgagttccccggggggagtgggagtctccttcgccgcccatggagcctccgcggggaggtcctcgctctggaaccggcaggagatatgaacccacggcaagctgtcgcgatcgacgttcagcggaggggccagagaccagagccgcgggttatactcgatctcgaataagaggcgaggccagcgcagcaccaagttcttggggagcgagaagagcgacaactcagcacgatgaggcttcacctccctctcgatctggcgggccacgcggatgacctcagctcgggctcgtcgctccacctcggcatcgaatacggggtgtctgcccctgttcttgctccaccatccctgccaccacagaactacctccttgtgccgcttctcgtcctcaacaagccgtgcccagtagacctcccccgacgtatgccgtgtcaggtaaccgagggcatagaagcacttctggcccacggagaaccggtcgggatggtccagagcctcgatcagatagggcagcacccgtgggtcattgatcaatcgtttctcggccaggtgtcgcaggagctcagcggcggccatgttgatcccccactgtcttcgacactcggcctcgcgcggggaatcctcggccggaggtgtggtgaagtgctcccagagcctgctttccccgatcgcatctatgtattgggcgatactcagggacttggcggccgccagcgcgatggcgttccgctgatcgagggagaggtgctcgacagaccccgggcagagctcctggatctggcccaggtctcttccctccaacgcgtggacgactcgccgccaattgacctgctcctcagccgcgccagtcgtcgccagcacgacaagtgctatgaagaagacggcgcctgcctttatgatccttacgcccagcagaggctggtgcacttcgccttatcctctccagacacgtggcctcaatgctgcaattcgtcggccgaactggatgataccacacgcaggacgggctcactagcggtgacggggcgctacggggtctgagcgcgcctgtccctgtcacgggcccgttcggccggctaactacaacgccgccagcggaatgccgtgacctggcgtaaagccatctgtcgacgtcaagggcccgtgaagccgacctgacatcacgccgccaaccgaagcgcggtgacccgcctgtctggagagagccgtcggtcgacgacccacgacggaaccccggacagtgacaccagccgagggggtggccggagtcgggggtgctcgggataccggactcaccggcgaagccggtaccagactgggccgttagcgactgccatcctctgcgtgccccttccgccactcctcgtccgcagccgcgcgctcgacatcgtcgtccgcccacaccatccacgacttccggccctgcactcggtacggctttcccggcgtgtacctggggcagtcgcgcggaccatagcaatgcgtctcgaatcgccacctcttcttcgaggggttccactggtcgattgtgatctcggtcggcatcactagcccgaacggacagcgctggcactgagcacggtaccgcgtggtgtcaagacggaggtgaccccgggagcggtattcgggaagcgggggtgcaatgccgccttccgggttcgctggcacctcctgctcggctgggcaccgctggagcaaccgcagtccgctcgccttgtagtgggtggcccattcctgatccgggtccggtactggttccgccatcccctggagctggtccatgatccggaaacggtgggtttcgtgggctttggggccgacggccactcgtaggtcgtccacaacaaccccgtccactgtgccgtcgaggaccagcgtgtaccccaggtaagcatggctgacctggtcgaacgagcgaagcagccggatgcgtgctttcaccgcggtgacggtgccggcgaacgcgaccttgctgtgtgcagatcctcgcatgaggtatgcctcatggtgatgatagccccgccgatcatgacatgcaacttgggagatgatccgccaagtagtatcgcagagtttcccagtatgcgcatgggataccggcctccgccgtcatggtgaccgagtccgacggttcacccccacacgcgtggggagcacatcaagcgcgaggcccggcgggagcgccgacacggttcacccccacgtgcgtggggaacacgtgaccatgttcgggtcggtcgtatcccagagcggtccacccccacacgcgtggggaacaccgagcacttcgggtcgggggtgatcttcattgcggtccacccccacgtgcgtggggaacaggcatcgtgaagtcatccaacacccccctgtgccggtccacccccacgtgcgtggggaacacactacgaccagcatcctcttcatgttgacctccggttcacccccacacgcgtggggaacaccacacctcgcctcagcacggtctggggttccacggttcacccccacacgcgtggggaacaccctgccatttcagcccttctggggcatcctggccaagacgataccctgtatgtccagcagctctctgctagggtctccaaaggtcctcacggcgaatccctgttccgtgttgctcgcgtgaagcagaatcccgctgccgcctttggctgcgcgacgaaccttatcccagagcttgtctcggaccattgccgaaaccttgcccgcaaacaccccggctttgggctggatcatccagcgcgtgatctcgccgcgcaggctcgggggcacgctttccagtatcatcacgaccatggagacgcctcctcgtcggctcccggcgcttgttcgccgtcagaggcagcgttgagttcggcggtcggcgtccacagctcgatcggcagcgcagggtcctcgtcggggacgaactcctcctcctcgccaccatccccgagcgcctggcggatgtcagggattatccgctgaatgaggcggctctcgcggaacacgtcgcgacactggagccgcacgtgccgctcgaggtcctgcgggttctcggcggtcgtccgaaacgccagaggaatggtgagttcgaccttgtagagatcggcgatgtcatacacgaacgaaagctgcttgccggtgtggatgaagccgagtgccgggctgtatccaatagagagaatggcagcatgacagacgccgtaaaggcaggagttggccgccgaaagggcgcgattcacggggtcggtagagcgtcagtcctttcggtcatagctgcgtccactccagggaacgcctgtctcgcggctggcgcgggcgtaggcttcgcgcacccggattccttccatgccgcgaaattgctgaacagtgaggtcggccggcagcttctcccggaaccgcatccggtacatcctcttcacgacctcaagtcgaagcccctcatcgcctaccaggcgcgcctggcgaagcagcgccgcgctggatcgggtcccgcccatgccaaaggagtagaagcggacgttctgctcgccgcaccagatgacgaggcagttgttgtcagcaagggcccgaatggcggcatgggtgatgttggtgccgggccctagcatgagcacggaaagccctgccactggaaccggcgtcttgccctcggcgtcccagaaagcgatggacttctcctcctgctctatccgcacatgctccagatagaggaaggaaagagcgtcgcggaacttggggagctgatgcaagtcgtccattcccaccctccctactgcatatcttgctgtggttgttccgcagtcgggctacaaggcaccacacgtacctgcgttccgccggcctcggtttgcctcaggagatggtcggagattattcagttgtcaaggtccgcacttatggtgaccgtgcttagcgcgcgctaagcacgggccacagacaacaacccaaagccgaagccctttgccgagccgatgcccgactggaacgcatccaggaacagctctggttcggtcacttccaggatgccgtcgaagtcaacgcagaggtgacggatgggcggtgagccgggggacctgcggctggtttggaagccccggtcggtgactacgcatgagaggatgcgaaaaccgttctcagcggccttgcggtcaagccaggctcgctgcatctcttcgccatggacaccgatgcgcttgcccgacggcttctggcctgggagcggctcgccgaaaacgcgccgctcggttggattggcgcgcagatggaagcggaggcgttgggcaatgcggaagcttaggtccagcgccttcaccttgggtggttcggccaggaaatgaccggcgttgcggaaggcatactcccaggcgggcttcacagcagattgcacgaggatcacggcccgacccccgagttgtggatcaacgcgaaacaagaaccctgcatccgacgcccgagcgacgtggacttgctcttccaagtctcccggtttgaagggtttgagaaagcccccatcatcggccactttgggggccgatggaaacgccatacacaaccgctgatgaacgtggtagaggttgcgcagccaaagccgtccagggcgggggcggtcggggttcttccccacatcgatcaagaggcaggacaggtacatgcctattcgacctcctcgtgggcgagacgccgacgccgagtttccagcgaacggaactcgatgatctccttgcgtttcctgatgatcttctcgcgccagcgcggctcctccgggttgatgcggtccatgcccatgcccaggccatattcgatcgtggtcaccgcgtcgtggcacaggcggcaaagggagcgcaggtcgtccggggactcacctccgccggcccggcggtaggtggtgtgttgcacggtcgtggcgggggacttgcagaaaacgcagaggccatgatcggcattgaggcgggcggcgcgggcgttgcgatactcggtgttccggtagtctgcgtgcgggcgcggcggtcgtggagtcgggttctgcgcgggcctttccgcgatacggacctcgccgtccgcacctactgcgaactgcctgcggacgacgaatcgggggcggtgggccggcggctcgaaggtcagcggcacgtcataccagacaagcgcatcgtcgggcgcttcgggctgttcagacgttggctcccagtcgagcaggcagttcacggtttggggtggaaggtcctcttcgagccgccggcgccaagggaccgatgtgagggccgaaagcagatcgggaaaagcgtcggaggtatgctctagcagagggcgggacgggggacaggactttctcccgaggtagagagtccatcgtggatttcccatcgccgtttccagttcggcaatgagagccggttcgccctgcaaggcgacgaggaagctcgcgtcgcagagatactcgcgccgggtgagcatcgcgccgggcttggtctttccctcgccttcggcgatgcgcatctgcattctggcgccgaccgtgtgatagtcccaccagcgcacgccgggccgatcgatgcgcacgcccatgtgcaggtcactgagcttcggaagccactcgccgggggcctgcggacgggaaacgcccaatgccgcgcatagcatcccgatcacccccgatttggtcggggcctcggccgtccgccggataacaaacttggattcctgatcgccccatgcctgaagcggaccctcaaggcggaggaacagggtgttcgcgctcatggggccgcccctgggttcacgatgaccttctgaaccgttgcccagtcatggccgatcgcagcgatcacggcgggaatgagatcgtcgagcgccttgatgttgttctctgcgagctcgatctcccgcttgttctctacaaccctcaatggatagcgcaggttgggcgagaaccagaaccgctcttgcggctggccatatccggtgtccaggtcgtggatgtactggcccaattgcgcgatgctctgcgagatgatgtcccggtcgccttgggccgctggcctggcgaaggcgttcacgtagctgatcggggtgttcctaatctcgatcagcatcccgtcggggggattgtgagcggcgaagctgttctgcttgcctgtgggattgaccagcgccgcacctcgaaggaacgcgccgaccgtgtgcgcggccagttcctcgttgcccatcaggtttccgaccagcgcttcccagtggatcgagtagtacttgtagaagcaggccgaggcgaacatggcttcgtccacgtagcccgcccccgcatcgtcaccaggaatgtcatcggcggcgacatagtagtctacttcggggcgggcctcgtgtgtcgagatcgcgtgggccacctgcagcgccgcgtccacggtcgtgtctttgagcacaccggtttcaagcatcctgccgctaagcgccatatctggcacagcgacgtgttgagtgatcagcttcccgaactcctccgccagtacgccatcggtcttccctgcgtcattctgcaggagccttgccatttcctcaaccgcctggcgggtcgtgtacacaagcatcttgctcttgtcagagtctctgggatcatcttcgtccgcgttctgcttgctcgccttcttaggctcaagtccacaagctttgaggattctctccgcgcgtttcctcacgtcggacttgccagtgactttctccgcgaccaatcttgccaactgccgggtgcgaatgccgccgagcaactgctggaactcgtcgctcatgcggatgctgcgtttgaggcactggcttgagatgcgcgagcgcaggaccccgccgaagtagcaggtcttgggcgcgcccagatcgtcgctattcagattggccgggctgtggttctggatcatgtggatttcgatcaacatcattgtcccctttcgttgttcccgatgaactggtccgcccactcgaggcgggtggattcgcgttcccagatggagagatcatccgtcagtttcacccagtcgagtgcccggccgcttgaggcgaccaagtcaagcgcccatcgcagcgccgactcgatctggtcaagcggaaggatgagcatcctatcgaacctctgccggaaacgctctctcgccgggtccttgttgggctggcagaggcgcagttggcgcgcgagcgtgtcgccaggcgaatacgagaccggacagaaggcgtagagtctcgcgatcagccaggccacctcgcggcggggcgcccgctcgtttctctgacgcaacggccaccagagacccgcgaacaggtcgaacccgtctaccgattcgtcgagaccttgcccggtgtgcgtgcgcagcgacccgagatcaccgatcctcaactcggacaagacctggatgaactgctccgtggggctcacgtgtctcctcccttcttccggccagtcttcttcgccgcctcgggttgtggccgcatgtctggcaacacgttcgcaatctcctttcgccgttgaaccgcggccgttgtgaagccgggggaaagcgattgagcaatcatatccatcatggggcggtattccgccgcagcccgatcccatgcgtttgcgtcgccagcaagcaggtcgcctaccttgccggagactctgccttcgacatgggggcgaacggcggcgagagcggcggtcccctcagtcttcgaccccgagatgcgcctccccaattggctggcttgtttctgccactgcaggatcattgaagtcgcggtatccctggatagctccgatgaagtcagggcaataagccgctcccacacgtcgatgttctttgcttggtcagtggcgaacccgacgataaggaacgctgctgaccgctttcccggtccgaacttgcctgcttcgagcatgcgggcaagcagatcaggccacggacgatccatcctgaacttgcctgctgtcgtcagatctgctgctttcgaagctctccgtggcatctcgcccgaatagacgacatggggatcgctccactgggcgttcttctgttcgccagccgactggaacatgcacgttcgtatgactggcgtctctactgctccgcagccaacgcatgtgccggactgttcgggatcatccaaccaaacccgtctggacagcagcgtcaaacccgttagcaggggcacatcctgacccggagttggccggatatccggctgggtccatgccggctcgccaagcagcatggatggcgaccagtttgccagaagcgtctccagcagcgacataccccaaggcacgacgtacacgggtggcgtgccgttgatgccggacttcaggtcaggcaggccacttacggaaaacagcggcaaccgcaggagccccatggcgcagcacgcgtggcagactccgtccgccttgtcagtcgagtgccggaagtgccagtagttattgcccgtaggaatctcctggatgagatccgtagcggcccggcttcttcgtgcggcacgatcctgatagaaccgcttcccctcacctagaaggttgaagcagtcttcattgtcattgagtttgagaaaccaatccgcagggaatgcgtcgccggaagttcccctgccttcgtccgccgggtttcccttgcaccaatacagcaacgcgagcaggaaccgcaggattgccacacggtccatggggttgctcgctgcgatctgccgaatccggcctgcttgcgtcagcgcatccctgatgccgatgcgaccgcacttcccatcggtcatcaggatggggatccactgctctacgagcaggttgtagtttgtgggtctctcgttcatggcttcctcgttcccgtatgtggttcgtgtgccgggtagcggggttcccgaacccactcgaacgagcgtgactcgtggcggaaggctacgacgcggtcggacaacgtgagtccgagggtccgcaaggcagcgactcgctccgcgtccttgttctggaacctggggtcggccttgccaatatcatgcagggctacgatgtaggagcagtatggctgggcgagggagctgaacggcaaggccgagtgccgagcgcgccgcataccgccgcagagtcgagcatgtgggagaccagcgggtggaagcctggcgtgccgcgacgcgtcttcgcccagcatgcgagaacggcctcacgctgcacggtaggaacccccttcccgggcggtcacccatgagcatcctgggcaactgctcccccaccggacgttttccctgtgccccacgtttggtccttctgattaccccttttgcagggacgcctgcggagcaccgtacacggccacgaacggcgccacgtgcgcccgtgtcgagctttcggcggccggttggcgctgtcgccgcgtttgggctcctgttgggattgcttgccgtactaccggacccagaatcgccttgacttccttgtgcatccgatcaatagacttatcggaagtacttcgacactaaccatagggagaggacaggatggcgaggaggcagcagaatggtcggcggtcaaacgagcagtggttagaggagttcctgggggcgctggcgctggaggggcggtcgccgcattcgatcggggcctaccgcagggatctgcaggcactgctggcgtcattgcctgggccgcttagcgaagtgcggccggcggacctgcgggagtgtttccgccgccagctcgccacggcgagtctgccacaggcacgacagcaggccggccgatccccgtcgagcatcaaccgcgccattggggcgacgcgctccttctgccgcttcctcttcgaggagggccgactggaaaagaaccccgcccagaccctgcgctcgatccgcttgggtccggcgctggcacccaagcaccttaccgtcgccgaagtccaaagtcttctctcgttgcctgacaccatgacacccataggccgacgcgactacgccatcctaatgctgctctataacaccggtctgcgggtgggggagctgtgtgccctgagtcgcgaggacgtgcgcctgccggcggaaggctggagcgcactccaggtggtgggcaaggggcggcggctccatcggctgcccatcaaccgccctgcggccgacgcgctgctggcctatctcgccgaccgggatgatgcggagccagcgctcttcctgaaccgcaatggagaccgcttctcggtacggggcattgcgctgttggtgaatcggtatctgcgggcggccggcatcaccgatcgctccgggccgcacctgctgcggcacaccttcgccacccacgccctgcgcgcccggcccaacctgcgggcagtgcaggaactgttgggccatgcctgggtcactaccacgcagcgctacacgcacttggaggtggaggacctgcaggcac

SEQ ID NO: 631 - DNA, 11044 bp, Artificial Sequence
  Synthetic Oligonucleotide
gtcggatatccgggatgatacgctggatcaggcggctctcccggaagacgtcgcgacactgaagccgcacatgccgctcaaggtcctgtgggttctcggccgctgtgcgaaaggccaacggaatggtgagttctaccttgtacaggtcggcgatgtcgtacacgaacgagagctgctttcctgtgtggatgaacccgagcgcggggctgtatccgaccgagagaatggcagcatggcagactccatagaggcaggagttggcagcggagagcgcgcggttcacggggtcggtggaacgccagtcctttcggtcgtagcttcggccgctccacgggacgccgctctctcgactcgcgcgggcataggcctctcgcacgcggattccttccatgccgcgaagctgctggacagtcagatccgccggcagcttctcccggaaccgcatccggtacatgcacttgacgacctcgagccgaagggcttcgtcggcgacgaggcgcgcctgacgcagtagcgcggcgctgctgcgggtgccccccatgccgaaggagtagaagcggacattctgctcgccacaccagatgacgagacagttgttgtcggcaagggcccggatcgctgcatgcgtgatgttcgtgccgggtcccagcatgagcaccgagagcccggccaccggaacaggtgtcttgccctcgacgtcccagaaggcaatagacttctcgtcctgctcgatgcggacgtgctccaggtagaggaacgggagcgcgtcccggaacttgggaagctgatgcaggtcgtccattcccaccctccctgctgagtgtcttactgtggttgttccgcagtcatggtgcagagcaccacagcttcccgcgtctcgccagtctcggaatgcccaggacagaagaccggaaagctattcagttgccaatgtccgcacttacggggactgtccttagcgcgcgctaagcgcgggccaccgacaagagcccgaagccgaaggctttgccgggcccgatgccgcggacgagtgcctcccggaagcggatagggtcagtgaccgtgagaatcccgtcgtagcggacagagcgcaggcgttggccgctgacactgcgtgtcttgttcacgtagaggtatgcgggctgcagcgcggtcgagccctcggcgatgcagaagcctgccgcgtccgcccggcgagcgagccactcttcgaattgggcgggagggactgcgacgcgcttaccattgcgcctgcgcccgtccggtccgctcttcgtgtcgatcttgcgcgtcgggtttgccacgaggcggaatcgaagatgctgttcctttgcgaagcaggggtcgaatgacttcacctccgggggagctgccaggagataggcagcattgtggaaagcgtactcccagtccggcttcgctgcggaccgcacgacgaccatgacgcggccgccggcctggggatcgatgccaaagaggaagccggcatccggcccacggactacgtgcacatggggttcgaagtcttccgacttgaacggcctcaggaagtccgcatcgtcggtcttcctcgacgccgagggaaatgccatgcacaagcgctggtggacgtgatagaggttgcgcagccaaagccgtccggggcggggacggtccgggtccgtgcccacatcgatcaagagacaggacaggtacatggctattccacctcctccggggtgaggcgacggcgacgggtctccagcgaacgaaacctgatgatctggtcgcgcttctcgattattgccttgcgccagcgcggctcctcggggttgatgcgatccagtcccatgcctaggccgtactcgatcatggtcaccgcgtcgtggcacagccggcaaagggagcggagatcctcgggagcttcgtcaccgccggcgcggcggtaagtgatgtgctgcacagtcgtggcgggggccttgcagaagacacacagcccatggtcagcactcaaccgcgctgctcgcgcctcgcggtactgggtgttccggtagttggcgcggaggcgcggcgggcgtggagtgggattctgcgcgggcatgtcagaaatgcttacatcgtcgcctgcacccacgcgcaactgccgtcttaccacaaacctagggcgatgtgctggcggctcgaacgtcagcggcacgtcataccggaccagcacatcgtcaggggcctcaggctgctcaggcgtcggctcccagtccagcagacagtccagggattcgggtgcccgatcgcctttgagccgtcggcgccaagggactgatgtgagtgccagaagcaggtcggcagaagcaccagacgcgtgctccagcagcgggcggcatggcgggcaggacttcctaccgaggtagacggtccattgcggattctgcagcgctgcctccagcttcgcgacaagagccggttcgccctgcagaacgacgaggaacgaggcgtcgcacaggtactcgcgtcgggtgagcatggcgccgggcttggtcttgccctcagcttcggcaatgcgcatttgcatcccggcccctaccgtgtggtagtcccaccaacggatgccgggccgatcaatgcggacgcccatgcggagggcggcgagtttcgcaagccattcctcgccggcctgcggacgggaaacgcccaacgccgcgcacagcaggcctatgacccccgatttggtgggcgcgtcggccgtccgccggacgaggaactctgattcctgatctccccacgcctggagcggaccctccaggcggaggaagagggtgttggcgttcatcgcgccaccgtttggtcaacgactacactccgaacaacgctccaatcgtggcccaaagcagcgatcactgcggggatcaggtcgtcgagtgacctgaggctggtctgagcgaggtcggtctcctcctgattctctacaacggccaagcgatagcgcagattgggcgagaaccagaaccgctgctgcggcttgccgtacccagtgtctaggtcgtgcacgtactgacccagttgggcaacgctctgcgagatgacgtcgcgctcgcccttgcttggcacggggtcggcgaaggcattggcgtagcttatcggagtgtctctgatctcaatcagcatgccatcgggagggttatgcgcggcgaagctgttctgcttcccactgggagtggccagtgcggcgccccgaaggaaagctccgaccgtgtgggcagcgagttcctcgttgcccttcaggtttctagtcagggttgcccagttgatggagaagtacttgtagaaacaggccgaggcgaacatggcctcatccacgtagcccgctccggcgtcgtcacccgggacatcatcggcagcgacgtagtagtccacttcggggcgagcctcgtgagttgagatcgcgtgggccacctgcagcgccgcctccacggtggtgtccttgagcaccccggtttcgagcattctgccgctgagtgccatgtccgggaccgccacatgctgggctatcagcttgccgaactcatccgccagttgagcatcagtcctccttgcatcgccctgcaggaggcctgccatttcctcaatcgcctcgcgggttgtatacacaagcatcttgcttctgtcggagtccttgggggaatcctcgtctgcacttcgcttgctcgccttcttgggctcaagcccacaggcttgcagtatcttctccgcacgtttcctcgcgtcgccctgccctgtgaccttctctgcgatcagtctcgccagttgccgagtgcgaaccccgccgagcaactgctggaactcatcgctccttcggatgctgcgcttgatgcactggctggagatccgcgagcgcaggacgcccccgaagtagcaggtcttgggcgcgcccagatcatcgcggttgaggttcgacgggctatggttctgaatggcgtgaatctcgatcagcatggctatcccctttcgtggtgtccaatgaactgctccgcccacctaaggcgggtggattcgcgttcccagaaggacaagtcgtccgtcagctccacccagtcgagttcgtggcgcctagaagcgacgcagccaactgcccactgcaaagcgggctcaatccggtcgagcgacatgactagcatcctatccaatctctgccggaaacgttctcgctccgggtctttgctgggctgggagatgcgcaactggcgagccagagtgtcaccgggcaagtgtgggatgggacagaatgcgtagagcttcgcgatcagccaggcgacttcccgccggggtgcggctggactcctctcccgcagcggccaccagatccctgcgaacaggtcaaagccgtccaccgtctcatcgaggccctggccggcatgtgtgcgcagcagtccgaggtcgcccaccttcaactcggacaaggcctggatgtatcgctccgtttgggtcacctgtccactcctttcctcccggcagtgtccccggtcgcattcgctctcggccgcgagtccgacaattccttggcgatctgctctcgccgtcggacggcccctgaactgaagcccgaggagagagatcgggcgatcacctccaccattgggcggtactcctcctccgcctgaccccatgcgtcatcgcttccggcaatcagttccgttgcccgagctgagactctggcctcgacctgcgggcgaatggcggccatagtggaagcgatctcaggatgcttgcgggatgaccccttctcgttgggcggccgcagcctgcgcgcgagactcgatcctgccctttgccattcctcgatcctctcggcacacagagacgcttcagtcttattgggcagaccgggaggcagcgcgattgtccgctcccacgcgtcgatgctcttcgcctgatcggtggcgaaccccacgatcaaaagtgacaccggcgctttctgcgactggaacttgccggattcgagcacacgggcaagcagatcgggccacggacggtccattcggaacttgcctgccgctgtcaggtccgtcgccctcgaagacttgcgcggttcgccgccgtagtacactacgtgcgggtcgtcccagtccgcactctcctgttcgccagccgactgaaacatgcatgttcgtatgaccggtgagcctgccgccccgcaggacacgcatggaccacactgctcgggatcgcccagccagacgcgtcttgacagaagcgtcagaccagtcagcaggggtacgtcctgacctggagctaggcgggcatggggctgaacccaggagggctcgcctagcagtgtggacggcaaccagttcgcaagaagtgtctgcagcagcgacatgccccagggcagaacatagacagggggttttccgttgatgccggacttcagatcaggtcggccgctgacggagaacagcggcaaccgcagcaggcccatggcgcagcacgctgggcagagcccatcctctttgtccgtcgagtgccggaaatgccagaagttgttgcccgtggggatctcctggattaggtctgtcgctggtcgcttccgtcgcgcggaggggtcctgacagaaccgcttcccttcgcccaaaaggttgaagcagtgttcatggtcatcgagtttggcgcaccaacccagagggaacgagtcaccatgcgccgggctgctttcggccggcgggttgccgttgcaccaatagagcagcgcgagcaggaaccgtaggatggccacgcgatccatggggttgctcgccgctatctcccgaatccggcctgcttgcctcagcgcatccgttatgccaacgcgacggtactggccatcggtcatcaggacgggaatccattcctccacaagtaggttgtagttcatggtgttatggctcatggtcttctcactatggcacgcggactgcgcgcctgggtgctgccaacacactcacctacgtggctcttggtgcggcgcagcacagtcgggttcgccaggctgaggccgagatgcttgagcagacctgcctggttgacgtccttgttctggaacctggggtcggccttgctgatatcatgtagggcgacaatgtaggagcagtacggctgggccagggagctgagctgcaaggccgaggtgccgagcgcgtcgcaaaccgccgcggagtcgagcatgtgggagaccagcgggcggaagcctggcgtgctgcgacgcgtcttcgcccagcatgcgagaacggcctcacgctgcaaggcagtaacccccttcccgggcggtcaccggtcagcatcctgggcgaccgctccctcgttgcactcccttccctgtgccttgtgcatggtccttccgctcatcactcatgaaaggacgcctgtggagcgcagcctgcggccgccgtgggcgcctgtgggcgaccccgtggggccttgacttccgggccgacaacctccgatcaatagacctataggaagttcatgcacaaccagtaggaggcgaggatggctaggaagcggcggcaggaccggcggttgggcgggcgagagctagtggaggggttcctgggggcgttggcactggaggggcgatcggcgcactcgataggggcctaccgcagagatctggaggcgctgctggccgcgttgcgtgggccgcttagtaaggtgcggccggcggacctgcgggatcacttccgtcagcagctgaatgctggcagatcaccgtcgaccatcaaccgcgcgattgcagcggtgcgttccttctgccgcttccactatgaggagggccggctggagacgaaccccgcccaagcgctccgctcaatccgcctgggtccgccgctggcacccaagcatctcaccgtccccgaagtccagcgcctgctgtctctgccttcccccgatacccccacgggccgtcgcgaccgcgccatcctgatgctgctctacaacaccggcctgcgggtgggggaactgtgtgccctgagccgtgaagatgtgcgtctgcccgccgagggctggggtggtctgcaagtagtggggaaagggcggcgacttcaccggctgcccatcaaccgccccgcagcagacgcgctcctggcctatctcggcgctcgcgacgatgctgagccagcgctgttcatcaaccgcagcggcgatcggttctctgtacgaggcatcgcgctactggtgaaccggtatctgcgggcggccggcatcactgatcgctccggcccccacctgctgcgccacaccttcgccacccacgccctgcgcgcccggccgaacatccgggcggtgcaggaactgctgggccacgcctgggtgacgaccacccaacgctacacccatctggaggtcgaggacctgcaggcgcaggtggccgacctgcctgccaacttgtagggcgaggccggccagagaacagacctgcgggcgcttcacgcactttctgggtagggatgtgatcagaggtgcgtaccagatggtgtggtgctcgggcctgccgacgcttggcacccacctgaagcgaccctgaccgctagccagacggccacgcatgtggcgagagcctgtgagttggcgctgtcacactctcagccaggaagtgagctgtgtgctggcgaactgcttagtgggtgattgcaccatgcatcctgagtcatcctgctgagagacagcctcgccttcggtcgagacgcgaccgatacggtgtttgaccagatgtaggaggttatctcgatgccacatatgcgagccctaggccgtctcgtagtctccttctgtctgttcatcatccttgccaccgaccgtgcgtccgcagtgagcgtccagcctggctggccccagaccacgggcggcgcggtggatagctctccggcgctgggcgatctggatggggatggggacttggaggtggtggtgggctccgacgaccacaatgtatacgcctggcacggggacggtgctgcggtggccggctggccccggaccacgggcagctatgtgcttagctctccggcgctgggcgatctggatggggatggggacttggaggtggtggtgggctccgacgaccactatgtatacgcctggcacggggacggtgctgcggtagccggctggccccagagtacagggggcccgttgtggagctccccagcgctgggcgatctggatggggatggggacttggaggtggtggtgagttcgctcgacggtaacgtctatgcgaggcatggggacggcagtccagtggcgggctggccgcagggcctcggcttcgtgttcatgagctccccagtgctgggagacttggacggggacggcgacctagaggtggtggtgggctgccttgacggcaacgtctacgcttggcatcacgacgggatgccggttgcgggctggccagtcagcaccggggactgggtctacagctcgccggcactgggaaacctggatggagatggaggcctagaggtggtagtcgggtcggtggactactggctctacgcctggcacggggacggggccctggtagcaggctggccccagagcacagggggcgcgttgtggagttccccggcgttgggtgacctcgacggggacagcgacctggaggtggtcgtgggctccgaggactacaacgtctacgcctggcatggggacggagcgctggtagcaggctggccccggagcacagggtggggtgtgatgagctcgccggcactgggcgacctggacggagacggagggctagaggtggtagtcggctcactggacgagcacgtgtacgcttggcatgggagtggcaccccagtggcgggctggccggaggggacttcgaacaccgtccactggagctctcccgcgctgggcgatctcgacggggatggggacttggaggttgtagtggggtgccgcgacggcagagtatatgcgtggagccatgacgttgcgaccttggactctcttccctggccgatgttccgccatgacgcgcggcacacgggcagagctgaggggggcggagctacaccagtccctcgcctctctgccgcgaagtcgggcagcgcggccgccggcacgccgggctcggaggtggtgttctccctccaagttgggaacactgccggcggggctcactcagtcaccctgactgaccctcttgaccccctcttcgacttcgtcagcgcgagcgacggggggttctacgatgctggctcgcgcaccgtcacctgggacctgggcgacctgggggcgggcgcttctgagtctgtaatcctcaccgttgagatcagcgagtcggccgagttcggcgacaggatctccaactcggccaccgttgatgcgcagaatgctgaccccgtcaccagcaactcggtcgaggtgtccgtctgcgaggttcggtcgcagaccgcggacgcttactgggacctatcggtcacggcgttgggcggactcagcgtcgggcttgagggcgaggtagctggcaaaggtatcacagcggcgaagctcggtgtcgtgggctcgaagaaggcagcggccgagtaccgcctccatcacttctacgccggcgacgatcctgactgcccggcagaacacgacggcctgtttctcacgcgtcgtcggggcttcgatgtcaaggcagttggggatgtcgggaaggctgagctcggcatcgtggaaggagaggccgtcgcggtggaggccggcctcggcgtgcttcagggccgccggtacttcttcccagaccccttcgggtacgatgacgagagcctgaaccaggacaaggtcatctccctgctagctctcaccgacctcattgaagtcggagccgcgttcgatccctttgcgcctgcgatcgtggcgtggatggcagataactggatcgacgctgaaccataccgcgatgcgctccgcgtcgagttcactgggcatgcatcgggagaggggggcatcgtcaagcttggcttcgacgcggctgacggcggggccaggttctcagtgagcggggccgtggatgagagtgtgataggtggtgcaatggacctctctctctaccacgaaggccagttcgacccacacgtcgccgagatcggcgctaccgtcgccatcagctacaacgtaggggtgccacttgtcgagcagacatcccaagtcggcagcctgacctatggcgtgcgcagcgacgacacgtgcgagccaaccagctacttcatcggcgccacgtcggagactgtcatcggtgaagggttcttctacgaagaccagatcctcgactcgatccgctacgatatcccaccggagaccatggcggccaaccaggccgccttagccgacacaaacgcggccggcttattccagaaccctccagtcctgctcggctacggcgcgcctgccctggctggaggcgtcgacgaggtcggtgatgtcctgctccaatactccgacgctcaccccgggctccctgttgcctcctaccggacaaccgaggcgactgctcgcgcgagcgaagtcgggattggtgtctcggtcaccgctggtgtgggggccacattgggcttcgccttcggatctatcatgggcaccgagaccgtgctgtctgatggtgtggtccaagatggtgagctacgacccaccgtcgtctacacggagccggcgaggtggccaacttacagaggcgaggaaggcctctcggagatgatggggaccatcgtcggccgcggcattgacaccatctggaccgatttcgtggactggctgcctgaagtgtggcgtcagatcgaggcaggcatgagcgcgatcatcctcctgggttttccgggtcccggggaagtaccagagggagagagtcaggttgaggtcgacgccggtccgttcggccagtggatcatcgtcatcgtgaagtcggtcgccaccgaggtggggaaggcgatcttcccatcacccgaggagtccggcgtgtcactcgcagtcccgtatcggtgcccccgcgtggtgtcttccggactacatgcggctgctcagcaagcggagcagctagccc

SEQ ID NO: 632 - DNA, 11020 bp, Artificial Sequence
  Synthetic Oligonucleotide
gcgcgggcggatttgagttcggctggggtcatggagccttggcgtcaaggtgaggtttggcctggagtatctgttggatggccgcgactcgatccaatatcgcgcggcgcagtgcggttcatccccgcacacgcggggaacacaccagcgtgacgtgccagcacggccagcgctccggttcatccccgcacacgcggggaacacaaggaaatacccgcgcggggttgtctcatccacggttcatccccgcacacgcggggaacacgcggtcgtgatctgcgcgaaggtgccctgcggcggttcatccccgcacacgcggggaacacgcagaccttgtgggattcgtccagtgccatttcggttcatccccgcacacgcggggaacacaacatcccgtccatccaggtcaaccctatgttcggttcatccccgcacacgcggggaacacgccatcatggtgattggcttgctgtgcgcggccggttcatccccgcacacgcggggaacactcctcatgggcaacgtcgtcgtcaggctcgaccggttcatccccgcacacgcggggaacactatagttatatctggtacagggctccacgccccggttcatccccgcacacgcggggaacacacttcctggatctccaattacatcattctgctggagatgcacagtccgtctaccggccaaaggtacgtgccatgcgccccggccggagggcttgcacgggcagccgggaagcctccccgacagcgtctgaggtcaagcttcatgcggatcggtctccacggcatcctcccgggcttcagcaggggtggcggcgggtggaagaaatttgaccagcgtcactccatccatcagcctcggcacgcgccgattctcaccggccgtttcaaaggcaaacccctgctcgttgttggccgtccacgccatcacggcattgcctccgccgattccggacccgacctgttgccacaccatctcgcgcacccgccgggagacgtcgccgacatagaccccggctcgcaactccagcaaccacacggccagacggcccctcaggcggggcggtacgttttcaaccacgatgaccagcatcgccgatgccctccggattgggaatcgccggccccaccccgtcctccggcggtttcggcaccggaagctctccggcggccaacacgtcctcgatcgtgggaataatgatgtccaacaggcgggtctgccggaacgcatcccggcacgccagtcgcacgtcgcgctcgggatcgcgggggttcgtggccgcgatccggaatgcggccggaacgaccgtatcgaacttgaacaggtccgcgatgtcgtagacgaacgacaggggcttcccggtatggatgaatccgatggccggcgcgtagccggccgccaacaccgccgcttcggtaatcccgtagaggcaggccgtcgcggagctcaggcaccggttcggcaggtcgccgctcccccagtccgtcgggtcgtagttgcgggtcttccacggcacgcggaacttgtcagccaggagctggtacatgcgcctcacgcgggcgccctcgatgccgcgcaattgctcgatgctgcgcttggcgggcggctcctcgccgaagcgcagggcgtacatcttgcgcacgacgcgcagccgcgccgcggggtcgagcgcaagctgggcctggtagagcagacgatccgagcgggcgccgccgggctggccggccgcgtagagccggactcccgcctcgcccacccaggtcagcaggcaccccacccgggctgccaacaccacggcggcatgggaaacccgggtgcccggctccagcatgaggcaggccacgctgcccacgggaatgtgggtgcgcgcgccctccttgtccaccaacacgaacgccccgtccagaacgtccagttgcccatactccaggaacagcacggacagacgctccttgatctggatcggcttgagcggtggcagcatggctacaccctccgcacgagcagcaggccgcacccgaagcccttggccgagccgatgccctgtttcagggtcgccaggaacagaggcgcgtcggcgacggtcaggaggccgtcatagtccagcgtactgaagcgaatctggcgctcctcgcggtcgcccgcgcggccctgccgcccgggcttgagcaggcgctgctgccgatagccggacacccgcacgtcgtcgtcccggacccggaagccgtgccgttcggcgcgcgccttcagccaagccagcccctccgtccgcacgaggttgtccggcgcctccgctcccgggttctcttgcagctgcttcttggcattcatcaccacgtcatgccgcctcccgcgctgggctttctcccgcacccgcgagcgcacggggttgaccctaatgcggaagcggagaatcgagtctttttcaaacgcaggctcgaacggcttcacttctgggcggcacgccaacagatggtctgcattgcaaaatgcatagtcccagtcaggctcggtcttcgactgcgccagaatgaccacgcggctgccgggctggggatcaagccggaacaaaaagctttcccgcacggcagattcctcgttgccgctcgctcttgcgaaatcgcacgggtcgtacggcttgagaaaatccggatcgtccagtttcttggcgggggatggaaaggccatccagagccgctggtgaaccaggtacaagtttctaagccacgctcgaccgggtctcgggcggtctggattttgtccggaattgaccagcaggcaggacaggtacatggctattccacctcctcctgggtaaggccatcatcggttgccaggtgcctacggcgcgtctcaagggagcggaagtgaataatctcccgccgcttttccaaaatcggctcgcgccaacgtggctcttccgggttgatgcggtccaggcccatcccatgcccgtattcgatcatggtcacggcgtcgtggcagtatcggcagagggttcgcagatcatcctggctttcgtcgccgcctgcccgccgatacgtgacgtgctgcacggtcgttgccggggacttgcagaagacgcagaggtgcctgtctgcttccaggcgttggtcacggcgcgcttggtattcggaatttccatagtcggcgcgcagccgcggccgagggggcaggggccgttggagagcggcacccctttccacgccgacgagccatcggcgtaccacgcgcggatcgtggaccggcgggtcgaatgagatgggagtgtcgtaccaaacttccgaatcgtcgggaatcaggggcgcctcggccgagggtcgccactcgacgaaacatagaagggttccgtccgccggtggggtatccctcctgtcgcggggggcccaaggttgtagccgcagtgccgacggcagatcttcgtttgtggagaccccggcaaacaccggtctggacggtggacaggacttccgccccagatagaccggccatctggggttctccagggcgatttgaacacggccaatgatctccgggtccccttgcagcaccgcgagaaaactcgcatcacacaaatactcgcgtctgctgacgagcgtttcgatctgcttggtgctggccgtcctcttgatctttccgtcggccgtgagcaagccaacatgggcacccacggtgtggtagtcccaccaccgcgtgcctggccggtcaatgcgcactcccatcgccaagcggttcaaatccggcagttcgtgacgcgcctctttccggctcagtcccttggcgcagcagatgagaccgattataccggacttggtgggtgcctccatggtgcgccgaataacaaacttggagggatcgccccaggcctggagcgggccttcaaggcgcaagaggacagtattggatgcttcggtcatgagcgaatcccccggctcttgttcttcgtgtgttgctcaacaaccttgatcacccgatccaccaactgatcgagcgtcgggaaacaattctccccgggaatgaccggtttgaccttgtcgggctccttcttggccgtgcggtcaatgtaggtaagatcgtggcgggcggccggcgaaaaccagaaccgatcggcttcgattccatacccctccgcgatgtcgtgaacatgctgacccagtcgcgcgatgctttcgccgatcaagccgcgcggcgcgttggccgggacggggtcggcgaatgcattggcatggctgatcggcacggctcgctttgccttgatctcgacaagaatcccctcgggcgggttgaaggcggcgaaggcatgctgtttgcccgtcggggtttccctggcggcggcttggatgaaatgtcgaatcgtcaggctcgccaagtccgaatcgtcacccaagttgctcacaagtttgtcccagtcaatgctgaaatgcttgtagaagcacgccgaattgaacatggcctcgttcacgtgcgcggccccgctgcctttcgccaggtcgtccgcggcggtgaagtagtccacctcgttgatgaccgcgtgagtggatatggcatgggcggcggaaagcgcggcctcgacgtggaagtcaatcttgcggaatagccccttggattccagctcggtcatccgaccggacaaggccatatcgggcaccgatactttctcgccgagcagggttgcgagttcctcgcacaataccgcggacttgacctttccgcgccaagcctcgcgcaccgcattcaccatcttgtccagagttgatctcgggatgaacaacaggacctcggtgttgtccggctcttcgcccttgcccgttctctttacaccacctttgtcgaatgcatctgccaccaacttgaccgcttcatccggggccggcgaggaaccgctggcccgctcggccaattccgtgatgagtctgcgggtacgtatgccgccgtctctctccagggccttctgaaagtccgcgcctctgcgaatggtgcgcttcaagcactggctggaaatgcgggcacggatcacgccaccgaacaggcaagtctttggcgcgcccaggtcatcccgattcaggttggcgggattgtggttctggatcatgtgcaattcgacaagcatggtcatctcctttgaagggaagggacggcatcgaggtaactgttggcccactcatccgcaaccgtggattgttcgtgatagcgttggggctggtcccaacgcgaaagatcgtcgagcaaccgaacccagttcaatcctggcgatttcccatccgccggaacggtggctgtcacccgaatagcccaccgcaagtgaggttcaatggcgtgcaggggcgattgcagcagggcatcgaagcgacggcggaagcgctccctcttcttttcgtcagcgggttcgcatctcccgagcatgacggccaagtggaagtcttccctgtcacggtgttcgagcggataggccccaaagagcttaccgacgagccagctcgcctcgcgtcgtggtacgcgcggactcttccggcgcaaaggccaccacaggcccgtgaacaggtcgaatccggcaagcgacctgtccagcggacggtccgcaagccggcgcagtcgtgagcgctctccgctcttcagtgcctgtaggcggtccacaaaggatttggtcatttccatcggcttcacctcctattggtgttttcgggaattgacccttccaaaggccttcagcggctccttgtctttgtcgggctccgccagccgagctatcgctcgttccaattcctccctggcccggatggcggcttcacgcctacgcagcggcgaaccgaaggtggtactagcgatcacggcctcaagggtcggccagacctgttcgatcaactcatcaagggacgtttcgccggcggcgagccatcgggccaacacattgcgtaaccgcatctccagcgctggcgaaagagcgtcgagggccgctttgcggttaccatgctcctgtttggggttttgcgtgctttgccgcagcacgccggttaacagctgcgtcgcattgttcaagagcctgaatgcgtgagcggggtgattaaatggcggcgagaatgaaagctcggcggcgtcctgatacagccccttgttcgccgccggtccggcaacagtgatggccgccagcgtggcggtcccggaagctatgtcatggcgcaggaggcaagcggcgagtgcccgccgccagaatcgggcgtgcttcgcgacgcggttccctggggacgggaacccgatggtcgtcatttcggtaggcctgtaagacggcgactcctcctccgccgggctgtctccgacagcttcccgcgggttctcgtccgcttcatccctctgcgccctgggttccagaatcaaatggggatcctgatcccagaactttttttcctgccccttggttttgaagggaggcttccagccgccggtgaatttcatttgcttgacgagccgggctgaccggccgcagtaggcgcagggttccgcctcgttctcaagggcgcccagccacacctgacgcgaccgccaagcgaacgcagtgggtatgtccaggctatcgagcgtagggggcttgttggatagccatggaggtgcacgcttcggtacagttgtcgaccagttcagcagtagagactgtagcaagtctccgccctgggcgatcgcatagaccggcgccggtccgttgatcgcggaagtatatcggccgcctccataggcgtttgcaaacgcacagaatcgtataattccggtggcacagcaggcagggcacaagccgtagtcgccatctcggacgtgtcgaaaatgggcaatgctggtttcggttggaaactcctgaagcaggtccccgatgggccgggtctttgccttggtcttctcgtcttggaagaaccgatcagcattgccgagcaagttaaatttgccctcatgctcatcaagctttttcagccacgcagatgggatgcccttcgcgcctgccagcgacttgcggtcttcattggtcaactccggcttgcaccatgaaagcaccgccagaaggaatcgcaggagggcaacgcaatccatcggattcggcgccgcgatccggtgaatggcgccagcctgcgcaagggctgctcggattcccacccgatccgcgtgtccgtcgtttcggagaatcggaatccaggattcttccagcaggttgtagttcatgggcggttcctcttggtcccattaacgcaaaagcacagtgcgagaggcatacggcgctcccctaccggcgcgttcggtgtgttcctagagtgctacaaatccaaagcttagttcccgcgtatcacgctcagtggacagaataggtctagccgcgcgagtggtggcatcacgggtagcgtcgggcccttcggtgggacggcagtaacagggcgcacgggacggccaaaactgccccttcctgccgcgtggggggccgcccgtggtgtccggtgcaggccagcgcccaaccctggaacaccgcttcccattcgtctcgctcctcggcgggccgcgcagccgcgcccagcccgaaccagtcctcgtcccaggccaggggccacaggtactcagaccacagcacatagccaaggctgtcatgatgcacggaatacccgctgcgactgtcccggctccgcaagcggcgaaacaggtcccgttgcagcgcctgaaagccctcggcgaacttgccgatgtcgtgcagcgcgagaaagaaggcgagccaacctgcggcggtgctttcatgcagcccggtcagttccgccagccgctgcctcagcgagccgtcccgcgccaggagcgatgcgccgacggccgctacgtcaagactgtggtacgcgagcgggtggtagggagggtcagaaggccccccggggcgcgccttcccccagaaggggcggtaaggctccatggcggaaacagtttcgggcatcggggcgcctgctgaagagggccttccgaaaaccttaacggcaagtggctatctacggattgttgcacccaataccacggtcaactattttggcaaaggacattcactccagattagggtgggttgggtccgccgaggtggccccaataaccggaacgtgagattagcaacctgcgacttgatggaaggggtgagcgattgagcgagaagcgaatgtggtaaggcgcggcattcaaggcactgttggactggcggacaatgcgcacggctatctatgcggccactcctttgacggcggacacgaccagcgctatgcgttacggtcctgggtggaatggtaccatcgggagcggcctcaccaggggctggggtaccagacccccgatgaggtgtaccatgccggacaggagcaagaagcagggtcgcttgagaccggagacaacccgtggactgtagcttaatccgagggtaaagctatctcacggatggggtccacttcgattcccttgcactccctgccccgagtcatgaactgaaatctaccaaggccaaaccgccttccagccgattcccgctcggttgcccggctgggcagcctgtggtagccgtgtaggccaaccgcaccccgcgccccggggcggccccccaagaccgcgggcggcctgccgccggaacgccgggccgccaccatccgccattgggggagagcgatgcaacctgaaacgcgcgtctgcgtgatcggcgccgggccctccggcatcgccgccgtgaagaacttcctggaccggggcctgacccacctggtggcctacgaccgcaacgaggaggtgggcgggaactggctcttcaatcccgcgcccagccactccagcgtgttcgagaccacgcacatcatcagctccaagatgttctcccaataccacgacttccccatgccggaggactacccggaatacccctcccacagccagttggcgcgctacttccaggcctacgcccggcacttcggtctctatggccacatccagttccgcacggaggtgctgcgcgtcgcgcccaatccggacggcacctgggaggtggagaccgagcagggcgggcggcgcacgagccgcgcgttcgactacgtggcggtcagcaacggccaccactggcgaccgcgcatgccggagtatcccggcaccttcaccggcacgctgctgcactcccacgccttcaagcgcgcggcggaccatgcggggcggcgcatcctggtgatcggcgggggcaactccgcctgcgacgtggccgtggagacctcccgcgtcgccgcctccgtggacctctccatgcgccgcggctactgggtgctgcccaagttcttcctgggcgagccggtggacgtgaccaacgccaagacgatgcgcatgttgcccttcctccccggctggctgcgcttctggctgatggagaagacgctcaagctgatccagggagacaatgccaagtacggcctgcagaagcccgaccaccgcatcggccagacccaccccacggtgaactccgagctgctctacttcatgcgccacggccgcatccgcccccggccggacattgcccgctgcgagggccggacggtgcatttcacggacgggtcctccggggagtacgacacgatcatcgcctgcacgggcttctggatttcccaccccttcttcgacccctccgtggtggacttctcccagggtcccgtgccgctctggctcaagatgttcgacgcccggcaccgcaatctgttcttcatcgggctcttccagcccctgggctgcatctggcccgcggcggaactgcaagccaagctggccgcgcgggtgatgaccggcgagtggaagctgcccgacgacctggagcggcgctgccgggcggaggtggaccatccggacctgcaccagttggccacgccgcgccacaccatcaccgtggactaccacgccttccgcaagcgcctgctggcgcacctgcccaaggactaccgccggccccagccccgcatgtccgcccaggacgcggcccagcccgcgccggtgccgcttccggcggcggggcgttagccgggggcggaaagttccgccgcgggggagccagaactggcccgccggggggagcggttcgcgcggccgctacggccggatggtgaagcttacgatgcgcggagacaccagcggcaagccctcgtcgtccaggatcccggcggtgagggaaatgctcacggtcgcccccgcgccgaagggcgtggcggggacgaacacggccgtcgcgctgccgacgccgcccccggccgggaccgaggtttgcacggtgtagctgccgggcaccgtattgcccggcgtgcttgtggcgctgctgtcccgcacttgcagggtggcggcgttcaccgtcgccgggatcaccgcgtcgttgaagatcacggtgaagctcgtggagggatcaaccccggtggcgcccgcggcagggacggtcagcaccgcgtccagcgcgacggtatccgccccccgcgtcgtgttggcgcagccctgggtcgtggacatgtggccggagccgcagtcctcggcgtcatgcatggcgcccacatgggcgtcgcccatgcagccggccagcaaaatcagcgcagtgagaacggatagaacggggaggatagggcgaggcatccaggacctccaacaaggcccttgcccctggggtgcccctgaaacagaccactccatccagcgtacgcgatcgcgccgcgaatgaaaagcgcggcacgctgcccttgccccggctcaccgttgggcttccgtccgcactgggccgcgccgttacttcaccccctacttctcccccgcccatcgggcagcccctgccagaactctccctcgccctgcgggcacccccggggacctccccccgccctgcgggcaccccctgccgggacctcacccccgccctgcgggcagccccccggggggagggggccggagtgaggtagcctctcaccccctccccccgaggggaggggccgccggggggaggggccgccgggg

SEQ ID NO: 633 - DNA, 10996 bp, Artificial Sequence
  Synthetic Oligonucleotide
gccgacccgcgacgggcctgcggcggcgcaccgcgcccgggggctaggctccgagcgcctgacgccggggctgagcgccgaggaaggcacggcgcgccccctcgatgaggtcgggcgcctcggtgttttcgccggggtaatggtgcatccccgtgcgcagttcggcggccgcgaagtcccggcaccagttttcatagcggcggacggcctgggccgcctcgtcgcggtcggtttcgctcaggaccacgactccgctgtaatcgttgatagggcagaaaatatcgctacgacgcacacaagaatcatagaaggtctcaatcttgacggcagaatgtttcatttccatgaaaaccagggagatataccggcgatgccgcttggccagcgccacttcatgctcgacgagattttcgaggtcggtgtactgaaacatcatgatccagaccttacatagcgcgaaatccgttctgtcatcccacgggcgttttctcatgtccacgcgctggtcttatgcaaccggggtgccagaattgtccggctgtaggaatttttttccgatggttggaaatgctcgtgttgcgagattttctaaaaccagtttctcaagagttatgcacagggcaggtgctcattttgagcaccaggtagtaaaaaatgagtacccgagtgagcacaacgatattttctgacagggggaaggcggaagtttcaaaactgaaattgataaggggacgggttccggggaacccgattggggaggaccggctggatcagaagtttatgaatctgaaaacagcagttgatggcagaaaacaagtcgtttgttcttccattatggggcgaaaacggtttgggccccctcccctttcgggtgagggattggaccgcgccaatcaggagattggcggtcccaggaaccgctttctccgcataaaaacggtctttccgggagggcgggcgtctcgcccgcctgaaagaaaagccggacgatagacgatcaactgcggttttcagatgaatgacgcaaagatccccctcccgcctccacgactccggctcagggccggaagcgcgggaacgaaagggggccgcattgtccattgtcaattttcaattatccattgccgctcagtgatggcccgccagaggcgtcccggggtcgtcaatccgggggatgcgcggcggcgccgcgggagcggcgggaggggactgggccggcgcgtcagggccctgcttgagctggtactcctcgatcttgcggcgcagggtgctgtagccgatgccgaggagggaggccgcctcgcgccggttccagttgacctggttcagcacgtgcaggatgtggcaacgctcggtctcgcgcagctggcccgggggatgggcggagcggggggaaccgccccgggccgggtgaaccgacggaggggacagggtggaggcgtcggagactctggtttccaactccttcaggatgctgttctcgctgccggtcagcaggaaccggcggatgacggattggagttcgcggacgttgcccggccaggcgtattggctcagggcggcgatcagggtgggggaaagcgtcaggtgctcgcgcccgaagggtttgccgtgcttgcggatgaagtggcgcaccaggagggggatatcctcgaggcgctcgcgcaggggggggaggttgatcgaaaagtcggcaaggcggtagaagaggtcacgccggaaccggccttcggcgatctgctgctcgagcgagacgttggtggcggcgacaacccgcgcgctgacgtggacgggccgggtaccgccgaggcggtaaaagaccttgttttcgatcacttcgagaagtttagcctggagcgtgaggggcatgtcgccgatttcatcgagaaagatggtgcccttgtgggccatttcgaactgaccgggcttggagtggcgggcgtcggtgaaggcgcctgcctcgtggccgaagagttccgactcgaggagcgattcggggatggccggacagttgatcttgacgaaggtgtccgccttgccgccattgcgcgagaaatggctgatgaggcgggccacgatctccttgcccgtacccgactcgcctcggatcaggacgttcatgtcggacggagccacctgcgcgatctgctggcggacgttccgcatggagtcgctctcgcccaccagttccccggcgacggtgatctggcgcacgagggcctggcgtccctgttcgagctcgcgcgaaaggcgctcgcgatcggactcgaggagttccataagacgtttattctcagaaatcagcgcgtgatgcgccagggccgaccgcacagtgcgcgccaggtggtgggtcgggatgggcttgatgaggtaggagaagacatggtggtcaatggcggcgagcgaggtttccagactcgggtcgccggtcatgatgataaattcgcagtggggacaatgctccttgaacgaggggatcgcctgcaggccgctgataccgggcatgtacacatccaggagaatgatcttgattcgttccagatcttcatactgcaacgcggcgggaacggaatcggcagtcacacagtcaaacccctccgtactcagcaaagtttccagagtcgaacgggtaaccgtatcatcatcaacgatcagaatgtccggcatagaccatcctcatctctgtcatgacgcattttccagagcggatccaaaacccgattcttcatagggataaaatagtttctctacccgaatttgtttcgtacaaagaaccctaccacaaaacaggcgtcagtatctgtattatgaatggatttgtcaaggtactttccaatcctttcagatatttatatgttctatgcactttttatgctgaagaatctggaagacaaacaagtccggaattcctgaatataggcagactgagtattcatccactcgaaataaccgacaggtggggggggctctcagttccaacgatccgcggacgcgggacgacgactggctgcctgcggtgaagtgggtccgcaacacctttatgaacggctcgacatccaaccggagatcggttcttttgtcgcagttggagtcagccggattgtatccttctgtcagcgcgccggaattcagtcagaatggcgggacgttgactcttggtttgtcctgacgattaccgcatcggggggggaccctctattacgcgatcgatgggaccgatccacgacagatcgtcgaacagtggttccgtgaataaccggacacattggcacccccccgcagattctgatcctcgtcaacacctcctggcacaaattgggaagtcagacctggggacgtttcgaggtgttcgaccgtcccccgtaggtttcgacttcagtccgatcgaatgactttggctcctgattcaggccgaatgtttttccgatttcatcgcaagaatcgtcagagttgatcgaaaggtcggacgaggtttttgtgtgggcaatcgcccgtcaggccagtaacaaaaccacccgcgccattccggcatgaattccgaaaatataataaaacgtatttacacttaattttacttgcatactgagtcacgcagtgctaagtaccactgagtattatgcgaacaaagtcacgtcgtgatatggaggagaggggacaatggactataacctgttggacgagccttggattcccgtgctttatggcaacggagagtggcggcatgttggccttctcgaagccttgagagactccgcccgcattcgacagatcgcggcgaacaatccgatggaccgggtcgcgattctgcggtttctgctcgcgattctctattggagccggggcaatccgcccgagaatgcttccgaaacatccggcccgatatttacggaagaggcgttcgccaaactcgagacgcatcgcaattgcttcaacctgctgggggagggaaagcggttctatcaagatcgtggtgcatcccggatgcgtccgactacggacttgatacaagagattccgactgggaacaatttctggcatttcaagcattcgacagatggacaaaatgggctttgtccagtttgttgtgttatcggactcttgaggcttcctctgttttccgtcagtggccttcccgacttaaaggccgggatcaacggcactccccctatctacgttgttcggtgtggcgattcgttgcaggaaacgctctattttaactgggttacttgcgaaaagataggccagccttcttgggacaaatcatgtcccctccaagatagagatccgggcgtacctattcttcaggggttaacgcttctttccaggcgagtcttcttgcaccctccatcgaatgacgccgttggtgggtgtattagctgcggatctgtgaaggggcctcttattcgtacctgtgagttccagtctgctggcccgcaggaaaatccagattggaccgatccacacgtcctgtactcaacagaaacaccccgcaaatcttcgaaagcgcctgacttgaccgcagggaagaaatttcgaatggatcgcccgtggtttgatttgcttaccaggatgatagaaatggggaagttgtcttcccagaatcagtctctcaggtttcttcttgtcggttttgctacagacaaagcgaaaaatatcgatgtctgggaacgcactctcgttttacccgttgagttctctccatcagaggttttctccattcagattgagcaatggaagaaaggaaactggtatctggagaaatcgttgggtaggtcaaagacgaatggtccagctgcaatctcgaccattcgtccccatgtcgaaaatcaagtctctgacaggctgtccgatttattgggcggcggcgaagaggcctggagattggccgcggaggaatatcgtcccctgatgaagtctctcgcgcgatcgctttccccaggcttcacgacagaagcggtcgctctgcggcgcaagatcgccaggacggtacccgatatgacgcccaaggcggaaacaccggagaagaaactccgaatcagcaagaaggagaagaagggatgaacgatcccgagaagaaaggaggaagacccgatgaatgctgccacacatgaatacataaaacgactgacttgtttgaaggttggcgatctggggctgttacgcacgcacgccggtcaagggctggacgagtcgcttgaaggtttcgacttgtttacggggctgtggtggcccttgcgccagaaaaatcagagagcgccccgacgctcgaccgcctggcttatcgccaaactctacgcgttccagcccgtcgagcatggagaggagcaatttctggcgagccagttgcggcgctgcgaaccgcgagaggaacgggaacggaaacggttccgtaacaagttcgacgccttgttacgccagccgctcgaacggatcgaaccggcgttgcaatgggccatccgggagattgcctcaaatccagtggggcttcggtttgactgggttcaattgaccgatgatctttccatctgggaacgggaagaaacccgcctgaaatgggcggagcaatatctggaaaaaaacaccacaggcctgccgcctgtcgagacttctgtgtccgagaacgaaaggaccccaccatgttgattgaaatccatgccattcagaatcacagcccggccaacctcaaccgggacgacctgggagcgcccaagacctgctactttggcggggtcctgcggtcgcgcatctccagtcagtgtatcaagcgcagcatccgcaccagcgagtcgttcaaggcattgtgtggcgggattcggacccgacaattggccaaactcattgccgacagagtggccggtaacgccgatgtaaagaagcgcgcggcaaagattctcaaggagtgtggtatcaatcccaaggatgagaacaagagcgacatgctggtctatacgactcagcaggccattgacgaaatggcgagtctcctggaaaacaacgcgaccgatgaattgctggctgaaaaattcgggaaattgatcggggaaagcacggccgttccggatatggcgcttagtgggcgaatgctggagacgggtgtcctgaaagacacgaccgtggaagccgccctttaggtggcccatgccatttccacacacgaggcgcgtcccgaggtggactactacgtcgcggcggacgacatcccgggtgatgacgccggagcgggctatgtggacgaggctctgttttcttccgcctgtttctacaagtatttctcgattcattgggagacgctgacagccaacctgaaagggtatggagacgggtacgagaaactggccgcccacacggtaggcgctttcctgcgcggcgtggcgttcgccaatccgtccgggaaacagaacagttttgccgcccacaatcttcccgatgggatcctggttgaaatacggaattcatcccccgtcagttacgcgaacgcctttgcaagacctgtttccgggaatgatcagcgggatatcgtctcgcaaagcatggcgcagttgggtcagtacgctcacgatttggacgagggatatgggaagccgacacatcggttctggttttctccaaatcttcgttatccccttacaatttcggagaagaatcgggaagttcctttggcaaacgatgggaataatatcaagtcactcgacgcgttgatcccggcagtggtgaaaaccttgggttttgagtgggcgaaggttcaagaggaggttgtgacgccatgagcgttcagaccctctttcttcgcctggaaggccctctgcaggcgtggggcgatcaggagtcgaagttcggggtccggcgctcgggagaggccccgacgaaatccggagtcatcggtttgctttgcgccgctctgggtgtcccccgttccgaagccgccgacacgtggttgccgcgactcgcggccctgcgcatgggggtacgcatggatcgtcccggtgtccgcagttgggattatcacaccgtgggcgcagagatggaaatgcgtaccgccgaggggaaaaccaagtccggcgccatgctcacccggcgcgagtacctgggcgacgcctctttcctggtcgcgctccagggggaacccgctctgatcgccgaattgcgggacgcgctgagcgcccccaaatggacgctctatcttgggcgaaagtgttgcccgccgtcccggccgatactcgaacaagattttccggctggggagtatggcggcttgctcgaaaccctggcgtccgttccctggcgtccgcgtctcacggaagacgcgcgcccggcatcgctcgactgtctgctcgactgggttccgactgactccgaacccgaagcgcccgccgatgcccttgtctggtacgatgtgccgctgacgttcgatcccccgtctcaccgtccccgttttgtcgttcgcgcgcagttgactgcgagcaaagaggaagcgacagcgaaggagttcagggttcggattgaccgagtgccctcaccgtcttccgtcggcgcgcctccgcgtccccgcgccgactatacgaattccgagtatcggaagaaacgtcaggaacgcctcgatcacgaccgccatctgtgtgtcttctgcaagtcccgcgccaccacggtgcaacacatcacctatcgccacgccggggggggcgagcgcctggaagaactgcgcgcgctctgccgtctttgccacgacgccgtcacgatgatcgagtatggcctgggtatgggtctggaccgcatcaaccccgaggaagagcgctggcgcgagcagattatcaggaaacgcgaagaaatcatccagttccggtcgctcgaaacgcggcggcgcaaactcgccgcagaggaggtggaataatgtacctgtcgcaactcttgattgacgtgggcagcaaccccgaccgcccccgaccgggccgcgcctggctgcgcaacctgtaccatgtgcatcagcgcctctcgatggctttcccctcgcattcgcaactcgagggcgaccccttctttctgaaaccgttctctccggagggtttcctggggactcatgttgtcccggatgaatcgaaaagaaccctgttcctgtttcgcgttgactactcactgggggaaaactctccgcgtgttgtcattctggtacagtcggaggtaaaacccgattggaagtacgcgttccagaatgttccgatgttcctggccgctcggcctcagacgacagagtacaatcctcagttcgaagccggtcaagcccttcggtatcgcatctgcgtcaacctgagcaggaagaccgggacgggccgggacgcggaaggagtgaaggacctgcgccagtacaagtcggaaaaaaccgacgctcagggccgcccgaagtctcagggaaagcgcgtggcgtggacctggcccaaagaagagggcaaagacccccaggacttcatcctgccctggttttcagagaagggggcccgaaagggatttgcgttgggggacagccatttgatgcgtctcggttgggtcagtgggcagcgaccggggaacaagtcctccaatgaggaggatgacgtcaagcggcgcatgaaattccgctccgccctgctggagggacagttgacggtcactgacgcctcgctcttcggccagacccttgccctgggcattggatcggccaagtcgttcgggttcggactcttgagtgttgtacctgtaccggtgagtgtcgcaccttgaaccgcacgcccatcaacccgcaggacctgccgcgcttcagcgacaaactctcctacctctacgtcgaacacgccgtcgtggatcaggaggagcacgccattgctctctatcggcaggacggcatcagcctcatgccggtggccgcacttggagtgctcctcttgggaccgggcacgaaggtgacccatcaggcggttcattccctgtcagagaacgggtgcctggttctctggataggggaacacggcgtccgttactacgcccagggcatggggctggcgcgttcggcgcgaaatctccagcgtcaggccagcctggcgagtcacccggtgactcgcctcaaggttgttgtccggatgtactgcaaacggttcaaggaaccgatggatccgggcatgacgctccagcagcttcggggccgggaagggatccgcgtccgtgaagcctacgcccacgccagcgccgagtatggcgtgccctggaatgggcgcagttacaagcgagactcttgggaaaatgccgatccggtcaaccgcgccctctcctgcgccaactcgtgcctctacggcctcgtgcatgccgccattctctgtggcgggtattccccggggcttgggttcatccactgcggaaagcaactctcgttcgtttacgacattgccgatctctacaaggaacatctgaccattcccgccgcgttccgcatcgcggcagagtcccccctcgatattgaaacgcggatccggcggacgctgcgcgatgtcttccggggagagaaactgatggaacggattctcccggacatcgccagtgtcctgggaatgggccggaacgaacaggaacaagagctcgaagaatatggcgaagacgcggccttacccgccgaatggtgggccccctcagggttttcgcaggaaacccccatcggccagatcctggaagcttgcgtgggagactgactcatggtgatcctggtcctgcgcaaagccaaaccgggcctgaaaggctgggtgacacgctggttgagcgaagtcgcccccggggtctatctggggacggtttcctcccgggttcgagaccgtctctgggcccgcatcggcgaagaaatcgccgaaggggcagccgtcctcatctatccggctccgaccgaacaaggatacacaatccagaccgccgggaaaacctcctgcacctttgaagacttcgagggcttaatcctggccaagcggccggaatcgccgagaaaatcgctccagaatctgccatcctgatcaatccggctccgcccggacaagcatacgcaatccagccccccggaaaaaccgcgcgctccagactgccggaaaaagccctgttgcctcaaaataaaatgttaccgaaggcgggggtatgaggcagaataatttgtccttttggggacagacggcgggacgcgtggtcttggagaacgcgcgccccccgcttgtccttgggtccgggtagcaggccggctcccggacagaaccattgtggacttgtgcgggttcctttctcaagtgttttgaccgggcgcttgcctttggctggctggcacgccggcagatgggtcgcgcttcacggagaaattttgtggcgcgcgaatgtcttgcccggcaacggcgctcatacgcgcctggcgcaggatctctttcagtttgcgctcgatcgcctggtggagcacgaagggatcgaggctctcgtactcgcggcgcagttgctgtttttcctcctcgctcaggtgcccgctggcgatcaaacgcgtgtaaggggtggccggggcgctgtggtgacgcacgaggcggccgccctcgcggctcttcgagaccaggcgcaccgtgggcaggaagaagttctgcagcgagcgccactcgcgggcgtacaggtcgttgatacgcgccacgaggcgcttgtcctcgagccggtcgtagccgaagagttaacgcacgtgggtccactggcgctgctcgacgtgggcgttgtcgttcttgtggtaggggcggctgcgggtgaattcgaccggcgcggggcgctcgcgcaggaagcgcacaagcgcgtgggtgatgaactccgagccgttgtcgctgtcgaacccgagcagatcgaacggcagggtctgctcgatctcgcgcacacgcgccacaatctgacggtgatccttgttccacacggcgcggttctcggtccagccgttccagatgtcggtcagcgtcaggctccacacaaaggc

SEQ ID NO: 634 - DNA, 10413 bp, Artificial Sequence
  Synthetic Oligonucleotide
ccgctcacctctgcgatcggttcacccccacgcaggtggggaacacacttcgaaagtagacgctttgaggccattgaacaggcttcaagtatggatcacggatgcttggtcatcaatttcaatccttcccattctgtcactatcctttccgcggcaccccaaaactcaattccaaagccttgttcgcaatgcttgctgtaaatcatgatacaagttccaccggcacaaccagacctggccttgtcccacagcttttcccttatcatggccgatacctgaccgacaaatactccagccttgatttcgaggagccagcgtgtaatttctcctctcaggccagagggaactttttcaagcaccagaaccatcatcatggcctccaggatcatccagaccccatgacaagccgccggggctcactttatcatctgggttccaaagcccgcctggcacggctggatcgacatcagcaaggtctggctcatcgtccgaagtttccagaataccgaaaagggcgtgaatgtcggccactatcttctttagcagaccaaattgatagaactggtcacggcaggcaatgcgtgtccttctgtccaggttatcgacccctgcggctgtggctatgaaagccgcgggcacggaggtttccattttataaagatcggcaatgtcataaacaaatgacagttgtttgccagtatgaacgaaacccagggcaggtgaatagccagcggccactatcgcggcgtggcagatgccatagagacaggaattggcaacggacagggctctgttgatggggtcggttttattccagttgctcctgtcgtaattcctcgcactcatgggcacatcgaattcttttgaaagtctgaaataggtatcccgtactctcgctccctcttttccccttatctgttcaagagagagggttgggtccagtttttccttgaacctcaattcatacattctgcgaactatccgcagatgcgtatctcgatttgaccaggcggcagcctgacgcataaggttggcggaactacgggtggtccctgtcccggatgagtaaaagcggactccctgttcccccacccaagccaccaaacagccgcattctgctaaaacaaggatggccgcatgggtgatggatacgcctggccccagcatcagcagggccagtccagcgcagggaacaggagtggagcccatggcatcgtgaaaggcgattgcctgttgttctttgtctattttggcatgctccacatagagataggtgaagcggtcccgcatttttggcattaggtgaaggtctctgttacgcatcacttgccggaaccacggaaaggaggccgaagcccattcctttggcgctgccgatacctttttccaaggcttcccggaacagaaaggcatcatccactgtcagataaccttccagcagggcggaacggtatctcaggggacggtattcgttctcacgccggggcgaatttccccggggctccggtttggaaccgtatacccagcccaggcttaccagttcggtctccccgggcgtgaagcccagtctgccagccttggcggcaaaccattgcgccaccgcatcctttgggttggaatttgtgtcccaggtaagggcgacccgtttgtgcagaacccttcccgttttttcctttcctccgggtccttcccgcaactcgtcgattttgcgtttgacactggcattcacgaggatgcggaagcgcagccgctgacctgctgagaactggggatcgtattccttaacctggggaggggctgccaaaaatcccgtggcattctggaaagcccagtcccaatccggcggcagggacgactgcaccaaaaccatcgccctttgattttctccatcggtgttgttgtccacccgaaagaggaactggcgcttttcaaaatctgcggggtcaaagggctgcagaaacctcgggtctccttccttgcgcttgcgcatggggaaagccatgctgagccgccggtggacattatagatattgttcagccacaagcgcccgggccttggccggtcagggttgccgcctgtgtcgatgagcagttgggatagatacatcatccgttctcctccttcggatcgagtttgcgcctgcgctgctccagcgagcggaatttgattatttcctcgcgtttggccaagatgcgctcacgccaggcggggtcacagggatctatgcggtccatggtcatgccgctgccatattccagcatggtgcaggcatcgtggcagaggcggcagagggcgcgcaagtcctccggcttctcgctgcctccggcgcgtcggtaattcacgtgctgcacagtagtggcgggtgccttgcagaacatgcaggcggcattgtccatcaccaaacgctcagcgcggacccttttgtattcaggattgtcgtaatttgcccggttgcggggcggttgccaggctttgccggaaagcacggtctctgcctcgaagttgcggtccaatggcaggttacagcggatcaccagccggggcaagtggtggggaggctcaaaggacaccggcacgtcgtaatgcgcttcggcgttcggcggagcgtgcacgtcatcatgggccggaacccagtcgagcacacagggaacactgtcaggtatcggttcgcctttttccctcagttgcgccgggatcgaccgcaaagcctctttcagactggcataaaaccctggcgggtgttcatccaccggacgggaggggggacaggattttcgccccagataaagcgtccagactggttttttcagcgcttcagccagttgtgccacgatatccggttcaccctggagcgcaaccaggaagctggcatcagccaaatactcgcgtcgggagagcaaagccccgggtttggatttgatcttgtccgcgcccaggtttttggccagggcagtgccaaccagaactaggccgttgggcattttcaggtcagaaatgcgcagcttctgctccgctcccacagtatggtaatcccaccagcggatgcccgggcggtctatccgcacccccatgcgcaatttggcaatttcacccagccaatactgtccggcttcggcccggctgattcccagggcagcgcagagcaggcctgccactccggatttggtgggcgcgtcggctgtcctgcgcacggcgaatttggcctcattgcttccccaggcctgaaggggagcctccaatctcaggaacagggtattaggcggagaagacatttcaactctctactttctcgttttttacatcatcccattcaaaacccaacatctcaactgcttcgcgaacaagttctagcaggttgcaaactggctttatgtccagcgtgccctgttgaggctttaggggataacgtccattgggcgagaaccacagagcgttgcctttcatctgtccagggaagaaaccggcacttatatccttcacatagttggccagttggccaatgctttgttctaccaagtcagaatccttaacgattcccaccggtcgcacaaaggcatttgcatagctgacaggtgtctcttttatttctaccaatattccatcgggaaggttatgtgcggcaaagctgttctgctttccgctgggattagtgagtgcagcggcctggataaaggctccgacagtatgagctgccaacttttcattaccctggaggttgattatcaaggtattccaatcaattgagtaatatttgtagaaacaggccgaagcaaacatcgcctcgtctatgaatccagcacctgtgtcgtcgccaggctcgtcatcagctgctacatagtaatctatttctgggcgggcgatgtgggttgaaatggcgtgcgacacctgcagggctgcttcaacagtggtattttcccacttgaccttgtctgtgttcttgtccttggtatcgggctcgagcattcttccgcacagagcgatgtcaggggaatgtattgcccccgatattacatctgccgctttcttggctttctctgcaacactcaggccttcgctggtgacaatttgagcaagggcatcgatcttgttccgggtcatgaacaccagcatcttactatgtccgttttcgtgtttcaaaccggctttgttcagaacttcctctgcctgattcctgcagtcctgtcctgtagcttttgtaatcaactcggccaaccgacgggtacggatacccccgagcaagtttttgaattcatcgctcatcctgatgctccgctttaggcactggctggagatgcgggaccgcaacaccccaccgaaataacaggtcttgggcgcgcccaggtcgtcccggttcaggttggccgggctgtggttttggatcatgtgtatttcaatcaacatttgattcctccttgctgattattaaatgctgaaataaatgtgtctgaccatatcgctctgtttgattcccgttcccaagcggagaggtcatcgatgagggcaacccagtccagactggcaatgtcatgtctttttaaaatcgcgagcacttgcgccagcggttcctccagttggttcaactcgagcgtgagcaagcggtcgaacctggctaaaacacgtgggaactctttttcttctttaagtccacggcatattctgcccatgagccaaggcaggctggcgcctttcttttgctcaaagcggaattccgcgaaaagcttggtgactagccagaccaccttccgcctgggggttttggggcttatactgcggagtggccaccacaggccggaaaacaggtcgaaacccggcagggattcatccagacggcgacccctgagctttctgagcaagcccaggtcgccctctttgagttcgcccaggctccgaacaaatttcacggtgctctcattcattatcgcctccggatgaaggttttttaattgattttggttttaggggccagggcttgcgccgagccagttgttctcgttcaagcttggcggcaaccgtaatttccggcactagagaaacggcaaaacgcttcatgaagaatccgtaatcttcatccgcttcctgccagacattgccgctgttttccaccatctcgcccgaatggacgtcaacccgatgctctacgtgcgggatgatgtccgccacggcggtgattcccacggattccttgtaatcgccccggcggtcttgtttcctcatcctgtgcagggagtaggctctttcggatatctggtccagcagttcctcggagcttgtttttccggatagggcaatggtcttttcccaaacgtccacacatttggcttgaacgcttgtgaagcccactaaaaacagcgtggcggtccgagacatgcctttcgcccgtaagaagccgaccaggggtttatgccaatccctgttagcgaaagtgtatttgtccccggacatcagagccacctgggcagtcaggccattattgtcatcccggtaaatcgcgtgagggtcgttccagacaaggttcggaggcactttcaccgcctcattgttgcaggcatagaccagaggctcatgctcttctccgcaggcgctgcattttgctccgtctgacaccgggccaagcaggaataccttgcggggcagccaggtgaggccagtcagcaaggctacatccttctcgttttgggatccaaacgggttcagccaggcaggaacacccaaccgggaagtgggttcccaattcaggaatatcgattccgacagactatcaccctgccagatggcatagaagggaggagttctgttgatgccggctccgattccgctgccgcctacggtggtaaagagtggcaggcgcagcagaccggtaacgcagcaagctgggcaaatgccatcgatgaaatcggtcacatggcggaagtgccagaaattgtttgccgtgggaagctcgtggataaggtccgtgctggggcgtattctggatgttcctggggattggtagaatctggggccatcaccgaacaattcgaaatattcttggttttgttcaagccagtccgtccatgcctgaggcagtggcttatctgataccggcgcttgttttgtattggcaaaacaccaatagcccagggcgaggaggaaacggaaaacggacatgcggtccatcggattgccgtaagccaaacgcagtgtgtgtgcttttcgcaggacctcagccaggccgagcctggcagaatgcccgtcaagctgtagcacactgatccagggtttgtctgtcaaattataatacattgaagctcctgtcgcatggggagggttgatagcttgttgatcctttacagaggccgttccacaggctaacatcattatgccccatagctattatacaccaaatttaccaaggaataatttgtcaagtccaaaatagggctctaatttcaaacttccttaaggccggcaaggtcagattcacaaattcacaaccggtaaatatggcttgtgaatccgtgtgttattgtggcacagtgagttgggggacaaattcacaaaatacgcttatctcttatatccagccggaccaggggagaatgccggtttgcagtggctcatgccgcaaacaagagatgaagggaaggtagagatgatataatatcaatatataataatatataatactattatatattatatatactatttctatatgtattatagactggtagcgtggatacatcatatcctgtttacaatcggcttccgcggatgtataagagaccccttttttgtgaattagcctcataattacccgtctatcagcaggttgcaaattcacaagccatatttaccggttgtgaatttgtgaatttgccttccaacgttggtgagcctggagtgcagcgagcttgcgagtatggactacaggagatgttgctggcgtccatgctcgtgcctcgctcgacgccagcgtcaggaaggtcgatgtccccgtcggccaatcgttctgggaccttcgggctccaaacatatggattacttgcccgattgggaagtaagtcctttattttaggttatctaccacagttggtagcgtaactggaaaagcaattcgtatgaattcgcgcaatttgtggacttcctcccattttgatacccactatcaatagaagccccatttgccccatcccatacacatctaaaatacttcccgctgagttcccattggccgggcgggaatttaaggggaggtttacgggatgttagtgggaaggggcaaacggcctgtccgtgggcgaaaaaggctttgggaaaggaatccgcagttattgtggcagattcggaacgattcttgcatctactatatgcataatcataaattttattcccctgggaggatttgaacatggtgaaaaagcagatcgtactgttcgcggcggtgctgctcatcctttgcggatgctcgcggcgcaatcccgcctgggaggaccaggacgtcctcagcctgctcaagcaggtgcaggtggtcggcaatcccgtggacctgtcttttgacaacgagagcatttttgtggcccaggaccagggcggcatttccgtgatcgatgccacggattactctcagcattggtggacggatatctatccccccagcgcggacgccaccctggtgaacatccgcaatatctcggcagtcggcgagcacaaactgctcttcctgggcgagtatgtgagcgcggacaaaatccgtattgtcgattactccgatcccgattcgctcaggctgatagattccatcaccggcggcactgacggcctgcaatcgatttctttcagcgccattgaggcccctgtggatgacaatatcgtccagggctttttcggagccggacgcaacctgatgtacgttcgctacaacggcggactctatctgggcacagattacgtgatcaccactcccgccaccgcttcgggaatggacgccacggacaactacatctatgtggccgccgaacagcgcggattggtcatttacgaccgcgccaccaaagagaaggtgagcgaaatcgcgctccccggccaggccctgcaggtgaaggtcgcggggaattatgcctacgtcgccagccgccagggcggcctgaacgtggtgaacatcggtgcgcccgccgaacccttgctggtgcataccttcgacaccaccggctacgccaccagcatcgacattatgggcagtctggccgccgttagctcaggcagtggcggcatctacctctttgacatcagcaatcccagcagtcccatcctgaagcagaacctccgatccgccggctacaccaacaacgccaaattcaacaagggaaaactggtcgtggcttcccgggaccagggtgtcctgatctatgccatcaaatgaacaaagcaaaagaaaacctttatgcaaaaaacgcaaccataacctggagcctcaactccaggtttttgatttgacgatacaaggatgatacaatgaaaaggatcctgtcactcaccatgttggcgctgctctgccttgccgctctgaacgccgaaacagcaagcccgttctcggtcgcgcggtctaccggcagccagcttaaactcgcggtttccgtgcccgccctcagcttttccgccggcgaagacggaggccaaagcgtccgggaaatccgcatggaaggcgcgcttggcacctgcgaacccggccagccggaacttcccgtgttcagcaccatggtggccatcccgccccggggcagcttcaccctttcctatagctacggcggggtggaatacagccagcttgacgagcccaaaatatgcagggaaggctgggacggcgtggcggtcccttccggcgggcttttcccctccagcctggcaacggcctcagaacccgccatcctgcgtgatttccgcgtggttcagatcaacgtttatccctgccaatacgatcccgtcaccaggcgcctggccactttcagggatatcgaggtaaccttggatttcactgccgaacccggcctcaacgaactgcccgattatacgggctacagccaggctttcaggaagatatacgaggcccaaatcgccaatttcgccgattaccgcaatcttgagaccgcgccttcccacgcccgcatcctgctgatccacggcaacaacagcgaccctgtgttcctgaccaaactgaatgaatttgccacctggaaacgccaaaagggctatgccgtgaacgtggtgagcacctcccagaccggcggggccagcaccaccagcatcaagaactatatccaaagccagtacaacaatctggaaacccgcccggatttcattatcctgctgggcgataccagcggcaactacccgatcccggcctggtttgagtcctacagcggccgcaacggtgaaggcgattatccctatacccacctggccggcagcgacctcctgggcgacgcgttcatcggccgcatttccgtgcaggaccttacccagctcatcaccatcctgaacaaggtttacacctacgaaaagaacataaacaacgctcccgatgccgccgcctggctgaaccgcatgctgctcatcggcgaccgctcctactccggcatatccacggtttacaatagccagtacatccacgagatgagccatgaagtcaatcccgattacacttacatcgaaaactacaccggcggtttcccctccaccatcaacaacggcatcaaccagggcgtgagctttttcaactaccgcggctatatcaacatgagcggctggagccccagcaattccctaaataacggtccccggctgcctcacgccgtcatgctgacctgcggaaccggcagttatgcctcccaggaaaccacctctgaagccttcatccgcctgggcaccgaagccgttcccagaggcgccctcaccgccatcggcatggccaccatcgccaccaaaacgatgttgaacaacgccctcgcgaccggcattttcgacggcatattcctctacgggatgcgcagcatgggcgaggccctgctcaacggccgcctctatctgcacaacatgtacggccagaccaataccagccatgccaacagttctgcccactggtgcaacctgatgggcgatcccaccgtggaaaccttcattggcataccccaaagcctggtcatatcagccccggactccatcccccgcgggaccccttttgtggacatccaggtttccgatccatctttgacccccgtggaaggggtgagcgttaccatctataacgacggttatggcgatgtggtggccaagggtttcacggacgaaagcggaatggttaccctcctggtgcccaatttcgtgaccggcgacctgctgatcaccgcctccaaacacgatcacaagccttccca

SEQ ID NO: 635 - DNA, 10361 bp, Artificial Sequence
  Synthetic Oligonucleotide
cactaattcggatcaaccctgaaatcgccgaacaacccgaccgcgccgacgaattgattcacaaactacgcgccatcctcatcacagtaaataatgtgggattagtaaagtcaaatgaagagtttgccaagtggtacaagggtgagattacgatgccgttcggcatcgacggtaagcacgttggtgtaaacctaatcgactttgatcatcctgaaaacaactcctatatcttgactaaccagttcaaaattcgtgcccgcgagaccaagattcccgatatcgttctgttcataaacggcattccggtagtagtcggcgaagcgaaaacgccagtacgaccggcagtaacatgggtcgatggtgcgcacgaaatccatgcggtttacgagaatactgtcccgaatctgtttgtacccaacatcctcagtttcgctaccgacggtcgcgatttcttctatggtgccgttcgcacaccacttgaattttggtgcccatggcgattggatgaatccaatagtactcttgcacttttttccggactgaatgaagtcggtaaacaactcaacagtttgttacgaccggaaactttgctcgatatcctgcgtcatttttcaatttatgcgaccaatccgcaaaaacgcaagatcaaagttgtctgtcgctaccagcaatatgaaggtgcaaatgcaatcgtacagcgggtttccgaaggacatatcaagaaggggttgatttggcacttccaaggttctggtaaatcgctactcatgctatttgctgcgcagaaactgcgaaagaaagccgacctcaagagtcctactatcatcattgtcgtggatcgggtcgatctcgatacacagataaccaatactcttggtgctgccgaagttcctaatatggtcaatgctgatagtatccaagcgttacacgacctgctcgaacgcgacatccgtaagattattgttacgacgattcacaaattcaaggatgcctatcccgacatgaatctgcgggataatatcattcttatggtcgatgaagcccaccgcacacaggaaggtgatctcggtcgtaaaatgcgtgcagcactcccgaatgcgtttctcttcggtatgaccggtactccgatcaatcgttccgacaagaacactttttgggcatttggtgcaccggaggatgagggtggatacctcagccgctatacatttcaggaaagtatccgcgatttacaaacgcttccacttcacttcgaaccgcgactccccaatgttcacattgacaaggaagggctcgatattgctttccgcgaaatggctaatgatctaacggaagaagatcgcaacaaattgagtcaaaaagctgcgaagatgctgctcttcctcaaatcgccagagcggatcagaacgattgtcgaagacattgcgaaccattatcgcacacatgtcgaaccgcacagttttaaagcgatgattgtgactccggatcgtctcgcttgtgttgcttacaaagaagcactcgatgaacaactcggtgtggatgccagtcgagtggtcatttcaacgaccgcaaacgacccactcgaattcaaacaaaaatggggattggataaagaccagcaagagaaagttattgagcagttcaacaatccggattctcaactaaagttcttgattgtgaccgctaaattacttgccggattcgatgctcaactcttgcagacgatgtacctcgataaatcgctgaaagatcacacattattacaagcgatctgtcgcaccaaccgcgtctatccaaataaaacttacggtcgcattgtcgattactttggggttttcgatgatactgcgaaggcgttagagtttgacgaagcgactgtgcgtgctgtaataacgaacctgcaggaattgagagacaaacttccagaattgatcgagaaagcgtgttcccattttcccggagttgatcgtacgattgaaggattcgaaggtctgagtcgggcgcaggattgtatcaactcgaatgaaatgcgcgatgcgtttgctaaggactacgtcactctatcaaaagtgtgggaagcactgagtcccgattcaattctcaatcgttttcagcgtgactacaaatggttatcgcaagtctatacctctgttcgaccagcttcggatgacaacggacgattactctggcatgcgtttggaccgcagacggaaaaattgattcacgagcatgttcatgtctccggcattcacgatgacatggaagagatggtgctcgatgccgagttaatcgacggattgatgaatagtaaggacactaagcgagccaaacagatcgttcttattcttgtcggtcgattagggaaacatccaggtaatcctaagtttaagaaacttagcgagcggttagaggaattgcggaatcgtgctgagcaagggttgattagcagtatcgattttatcaagcacctctgccaaatcgcgcgcgatacgttagagaccgagcgtgagttattttctgcagacgaacggagaactgccaagacagcacttacagaactttttcttgaaatgcgcacagataagacaccgtcagtagtcgaacgcattgtcaacgatatcgatgagatcgtgaaaattgttcggtttgacggttggcagactacgattgcaggagagcgcgaagtccagaaatcgctacgcaagactcttctaaagtatcagcttcataaagaggaagaactgtttgagaaggcgtatgcatatatcaaggaatactactgagcgaatttgtagttgagtacattcatgatctgatgagtttcagtcattgagagcgatttatgcctagtaaaaaacgacaaatagttgaacccaatgagaaacgtcgtgctttaggtcggactcgagccgaggcaacttttcctgtcgcagcacccctatcagggatgccaaaaggttacaacgaatttttccagcagatcaaacaacatattcaacgggaacgattgaaaacggttcttgctgcgaatgccgctatggttttactttactgggatatcggtcggacgattctcgaacgtcaggaacaggagggttggggagcacaagtaattgatcgattgtctgtcgatctacaaaaatcgtttccagaaatgcgcggcttctcgccacgcaacctgaaatacatgcgggcatttgcctctgcatggactgaccggacaattgtgcaagaggcacttgcacaaatcacatggtatcataacctcaccttattggaaaaattagacgatcctgaaacacgcttgtggtacattaacaaaaccgttgagcatgggtggtcccgcaacattctcgcattacagattgactcacaacttcacaaacgccaaggcaaagcaattacgaattttccggtaacgctccctccaactgaatcggatatggctgcacaggtgttcaaagacccatatttgttcgactttttgggtactgccgatccccggcgtgagcatgaaatcgagcaggcattggttgaccatattcagagttttctactggagctgggagcgggatttgcctttgttggcaggcaggttcgattggaagttggggatcaagaattcttagtggacttattattctaccatctcaaattgcgttgttttgtcgtaatcgagctaaaagctgtaccattcgatcctgctttcattggacaaataaatctttacctatctgctgtcgacgatctactacgtcatcccgacgataagccgacaatcggattgctactatgtaggacgaaaaacgagttggtagtggagtatgcactacgcagtttgaagaaaccaattggtgttgccggttgggagactaaaatcgttaaaacacttccaaaggagctgaagggaagcctgccgtcgattaaagaaattgaggatgaacttggcaaccacgaataatgaactacgttatatctttcaactacgggagcgcttatgtgctataacctgttagagaaaaaatggattccggtactctatcgaaacggacaattcgaccgggtcgggatcaaagacgcgctaattaaagccggtcaaatccgagagatcgccgcatcgaatccgatggacaggtttgcagtgatgcgttttttgctcgccattttgtattggtgcaaggggaatccccctgatgaaacaaatatcgattcgtttccagcagagtggttttccaaacttgaagagacagagaatcgggattgcttcaatttacttggaaacggaaagcggttttatcaggatgctgatgcaagacgttctcgtcccacgacagatttgtatcaagagataccaactggacacaatttttggcattttaaacacacaaccgattttcaagaggggttgtgcgcttcctgttgtgcaataggactacttcggctcccattatttatgacttttggtggcaatactaaaccatacctttatccgggaataaatggagttccgcctgtttacataatgtcggtgggcaattcgttgttcgagactctccacaaaaactggatacctcgcgccattcctttcggtgaaccatcttggatcgacctcaattttaatgtgggcgacactgccgaaattccactactcaaagggctaacgatgctcgcccgtaaagtttggttggcagaaacggagagccatcaaacttgctacaactgtggagtaaaatccgatacgattatccgcagttgtgaatttcaatcgccaggtaagcaggaaactgccctttggagagacccacacgcactttatctcagtagcacttctcaaaaatcgataaaagcacctgatccggtttcggctggaaaatttaagatggatcgacccttatggaaattacttgcacctgttatcgaagccgctaaaacgatttatccaacttcgaccacttttgctatcatcggtctcggtacagataatgcgaagtatgtcgatgtttgggaacgaattgttgagttaccatcaaataattcagtacccgaagcagcggtgtctacggttgagcaatggcagaaagagacatcgaacaacgaattcgtaaagcgtctgcctaagacgatgcgagtgaaacggaaactcgatcacctgaaagcaacctacgattccaatcgtcctcatgtcgagcatgccgtctcaacagctgttgggaatcttctatccgggggtgaaacggaatggcaaaacgcagcatcggaatatcgtccaatgcaggagatgatcgcgaaatcactcgcacccggcgctacactaacagcgacgatacggcgaaagagtatcgcgaacgcattacccgatatgcgagcaaaacatgacccaccggagaaaacgaaacgtagaaagtcggctacagaatgagttcaaccaatgattttatcatggtcttacaaacattaaaagcaggtgacctaggactcttgcgaacccatgctaataaaggacttgaccagactgttgatgggttcgatctgtttaccggtttgtggtggccgctacggcaaaagaaccagtttgcaccgcgacgggaagtcgcgtggttgatcgctaaactatatgcaaagtgtcccattgaacatcagtctgattgtttgtttgcacaccaactacagcgatgcgaaccaagagaagaacgtgcgcgaaaccggtttcgacagaaattcgatgaactgataaccactcccttggagcaaatcgagcccacattgcgaagagcgcttcaagaaatttcttcccatgaattgaaactcgactgggtaaaactgaccgatgatctctccttttgggaacaggagaccaagcatcaggaatggataaaccaatatctcagcatcaacgaaagggtacaaccatgttgatcgaaattcacatgatccagaaccacagcccggcgaatcttaatagggacgacctcggcgcaccaaaaacctgttatttcggtggtgtattacgctcgcgcatctcgagtcaatgcatcaagcgaagtattcggatgagtccagagtttgcgaaactgttaggaggagtaagaacgcgcgatctcgctaagaggattcttgacaagatcgaaggtgatgcaaacgacaaaaaacgagtcgaaggcattctcaaagtttgcggtttcaaaccaaagactgaatcaaaagcgaagaaaccgcgcaccactgcaggcgaagaaggagagaccgatgaatccgatgaaaccagtcagagaagcaaggcaccgctcttcgtgacccaacaagccattgagaagattgtgaatctcttccaatcaaggaacagcaaatctgatgatgagttagcaaaagaatttgcgaaagcaatcgctctttacacacaagcgcccgatatggcactaagtggacgtatgcttgaacccgacaaatctgcgaagaaaatttgggaaaaactagaaaagaatgtcgaggcatcgttgcaaacggctcacgctatatcgacccacgccgcctttcctgaaactgattacttcgtggcaatgggagacgaaacacgcgaggaaaaagaagaagctggtgccgatttaatcggtgaacaactatttgcttccgcgtgtttctacaaatatttctccattaattttgagcaacttgtagagaatctcggcgataacaaacaattagccgctcatacagtaggcacatttattcgcactgccgcagtagtaaatccgagtgggaagcaaaacagtttcgccgcgaacaatcctcccgatgggatactcatcgagatcaaaggcacgccaatcagctatgccaacgcctttgcgaatccagtgccagccaaaggggaacgggaaatcatttcacaaagtatcgctcaattaggtcaatatatgcatgaccttgatactgggtttggcatccctaaacagcgcttctggttttcacccaatcttcgctatcccctctacgtggttgaaaacaaacaagagatcgcactaaccgaccataatatcaagtcacttgatgaactgataccaatggttatagctgcaatcggtttcgactggaacgaggtacaacaggcaatcgttaacaacgaggcatagcatgagcgatctgcccaatacgctctttctccgcctagaaagttccatgcaatcatggggtgtacacgaatcgaaattcgtagttcgacgaactgccgaagcgccgacgaaatcgggagtcatcggattgttctgtgctgcgctaggtattacccgtcaacaagcgccggacgagtggttaccgaaactaagtgaacttcgaattggtgtacgaattgatgtaccgggaattcgctggtgggattaccacaccgtcggtgccgaaatgcaaatgcgaaccgcaaagggagaatgtaagtcgggagcaatgctcacccgacgcgagtacctttgcgatgccagttttttggtagtattgcagggcgacccatctctcattcaagagttagaaaaagcggtcaaatacccacagtggacactctaccttggtcgcaaatgctgtgttccgtcgcgaccattgttggaacatccggctgggttctttcccgatccgctctctgcgttaagttcgattccgtggcggaaacgactcaaacgtgataacgaacccaaaaagaacctcgtctgcctgatcgactggcaacccacttcggaacaacccgacgcccctgacgatgcacaggtctggtacgatataccggttagtttcgatccgccctcgcatcgacctcgattcgtcattcgtgaagagttgactgttggcgaacatgggcagataagcattgcaaatgaaccattgcagcacgaaacaccgcgaccaccaagaccccgcgccgattacactaatacgaaatacaaagcgaaaagacgcgaacggctatctcaggatcagcatctctgcgtcttctgcaaatctccggcaaccaccgtgcaacatattacctatcgacacgcgggaggcgaagaaaagcccgacgaattgcgttcgctttgtcgactttgccatgatgccgtgacgatgatcgagtatggggtcgggatgggattagatcgcatcaatcccgaagaggaacgttggcgtgaacttatcatcgaaaaacgctctgaaattgtcgcattccgttcattggaaacccgtcgtcgtcggctatccatcgaggaggtagagtgatgtatcattccaatctcatgatcgatgtcggcgataatccagaccgacctcgccccggtcgtttatggttgcgtaacatctatcacgttcatcaacgattgtcgatggcatttcccatgtccacgacgcaaaaagtcgatccgaattttcttctcccattcgatccaaacgggtttgaccgctctcgttttctcttccgtatcgatcaaatcgttcgagataattatcaacagacgatcatcattgtccaatcggaaacggagccagattggaagtatgcgttccacaacttagatatggttctagcagcaccaataaagccatacgagtacactcctgcatttcagaatggggacattcgtagatttcggattcgtgtcaatccgacgaaaaagagtgctacctacggatcgaatggtgcagatagaaacccttcttccaagtcgcaagggaaacgtgttactctttgggacaaagagacaaaaccaacagatgcgatccttgattggtttgctcgcaaaggatcgcagaaaggtttttctgtcggtagttgcgatgtcgtgaacttgggatgggtagttggtaaaaaaccgaacggaaagggtgacgaacacgtcatgcgctttcgttctgcattgttggaaggaaaactgactgtcaccgatgctatggaatttcatgctgcgataaatgcaggaattggatcggcgaagggattcggatttggtctactttctgtcttcccaattggagatcaccaatgaacgatctccgtgccctacctaaattacgtgatggtttatcgtatgcatacttcgaacattgccgggtcgaacaagacgaaatgtcgattgcggtttggacgaaagaaggaatcatacccgtacctgctgcttcacttggtgtattgttgttgggtcccggctcaacgattacccacgcggcagtgaaagcgcttgctgacaatggttgtatggtattgtggacgggtgaaggcgcgatccggttttatgcgaccggtatcggtgaaacccggaaaggagggcacctcgaacgacaagcggcactgtgggctgaccctgagtcacacgaacgaatcgtgcttcgaatgtaccggatgcgtttccgaaaacgattaccgaagggtttatcattggaacaaattcggggaatggaaggtgttcgtgtacgcgaagcgtatgcgattgcctcgaacgaaaccggtgtggagtgggtcggtcgaagctatgaccggaaccattgggagaattccgatccagtcaatcgcgcactttcggcagcaaatgcctgcctttattcgttgtgccatactgccatcgtgagtggcggctatactcccggtcttggtttcgtccatgtcggtaaagcgctctcattcgtgtacgatattggcgatctatacaaggttgagacgacgatcccactctcgtttcgcgtcgtacaggaatccactgacaacttggaaagtcgggtgcggcatctctgtcgagattacttccacgagtacaaattattagaacgtattttacctgatatcgaccgtttgtttgatttcaacttggacgacgaatctttcggttgggatatcgatgaagacccggcacgtccaactccgtattggaacccaccggaagtggaaaaggaattgacaaatggtagtgatgattcttgagaaggttcctgcgtcattgcgcggtgaattgacacgatggctgttcgaagcaaagaccggtgtctttatcggaaaggtttccgcgatagtccgcgataagctttgggatctttgtgtgggtcgtcgtggaacaccagcggtcattcaaatctggaacgacaacaatgagcaagggttttcgttgcggtcgaatggcgatacatcaaggaattttcaggaaaaagaaggattgtggtttgctgtaaagcatcttcctaaagaggatgcagttgccactgatacttaacacccttttcgtgatctaacttcaatgattacgaagggtaatccccacgcgcgtggggatgaaccgttgaacactccaattttatcaaaactgttgaggtaatccccacgcgcgtggggatgaaccggcgttaaaattccgcgc

SEQ ID NO: 636 - DNA, 10213 bp, Artificial Sequence
  Synthetic Oligonucleotide
cacgctcttgctcttggcgcgggcggcacagatacgttcggcgccggtaatctcggtcgtctcgccgaagctcagcgtattgccattggcgtcgaggcgatcgaacacgctgccgaccgtggggcacgaggccagacccgaggtggtgtcggactcgccgcacttggtcgagacccaaaggtccgccactgggcatttctcgcgcttctgctcagtcgcccagagcttgtactcccaggcctgccaggacgcctgcctgacgcattccatctggcctttgagctcgatcgagaagccggcgaccttgctgcgacccagagccttgacgccttcgacgaccttgttggtccattcgtcttcgatgccgatcaccacgcacgcggctgcgttcgggttggcgcacgtgccgatgatcgtccggaagaacagttcgaggtcctcaccgaactgtagacgcccatacgcgtgcgggatcgccatcgttccctgaatatgcgaggcgaccgcctgggccgccgcgttcgaaatgtcgtcgagcggcatgatgactacgtgattgcggacgcccacgcggccgttctcgcggcggtatcccatgaaggctttgtcgagcttcagttcggccatcatctaccacctcgcggtcttgagattctgagtgtgcacgtgctggcccttgttgatggccttcgtggcgttaccgatcgcctcgccgtacttgatcacctggtcgccgttgccgatggcggtcaaagcgatcttgtgtccgaggggaacgttctgctcggctctcatgtggagggtggagtcctcctccatgttccaaccagtcaaatcatcgctcctcttcacatcaacgaccgccacgccgacggtgtctttcttctcgtgcacgatgtagtgcaccatgggcctttctcctttcagcaggttctggcaatatgagaagatcgaggcagttcgccacgccgcgttgcgccgcccggaaacgatgaagatgtctgggctggcgcacagcccgtgggagcgctgagacggggctgtggcgagccacaggtactcgcctacagaaaggcacacgaccaaatcttcgaggcagttcgccatggcccggtggggcacggccgaccttgcccgcaatggctaccggttcgacccgccgggatagaagtggtagtcggtcaggtcgattgttttccccgccttgctccaagatgcgcccaactcgctcgggagtttgctctcgttatagcactcttccagagtctctcgaaggcccgtgacccaggtcaggcggtcgccatcctgctcatccttgttgatgagagcccccgggaactcaacgatatcaggcactgactcctgtatcccgttcatacacagcgtctgggagctggcagcctccggcgggcaggcgatgggtttagcgtcttcgccgcccgcggccgccatcgcgtcccacagcttctggtcgtaatcggcctgtggagagccgtagttcttcgtggagccgtcggcaaacgccgctatgacgtcggcattctggtcttccagcgtcaccgtggccttctcgaactcatagctgaacatcgggccgatccggtccttcaccgcgtgtgcggcgaagtagaggatctccacaccctcgcgggtgtgagcgcgtgcggcggccgtgtcgtagttctggatgtcgttggcgcggtacagctccgccaccacgtcacttacgccggcgctggcctcgcgtgtgtcgcccaggacgtagaagcaattgtgcaggtagtgcgccgtcgcgttgttaaccggactgtccaggatccacttgcccgatgcgtcacgctgcgcccccgcccagtttgcccgaccgtagtagctggctgggcggggccccaggatcagcgtcttcagccgtctcggcttgccgaacgagccgttcattatgtcctttttcagctcctggatagacggtgtgtacgaccactggtagcctatgccgacccacttccccgcctcgtcccgcgcctcgatcatgcgccgggcctcctggattgtggcccccagtggcttctcacaaaggacgttgctgccgttggccagagccagacacgtctggtcgcagtggaagtggatggggcttgatatgatggcaaggtcggcagtgcccgtggcgtagaattcctcgggcgacgcgtgaaaggccacgtccattgcccgcagttcgtcgaggtatctacacctctcgggcgatggatctatccccgcgacgatgcgaaaagaatcccgcggcgcccgccggagcagagcgcgcaggtacgtgttgccgtagccgccgatggcgacgagggcaatcgagacgggcttttcgatattcagggtcacttctgtcatttcaccatgcctcgcagttgagagcctatcccaaaactccttgacctgtcatgctgagcggagcgaagcatctcgtactgtccactggagcgagattcttcacttcgttcagaatgaccggtttgtgggcgggtgggttttgggataggctccaaagaataagcacgccgcacacccgcgctgcgtcaattccggatttcgctccggcggggcctaatactacaaccgtgcttgtcattctgaggagcaaagcgacgaagaatctcggcgtgcgacaccccttcttgcgtcaaaatcgagattcttcgctgcgttgcactccgctgagaatgacatggctcgacaagcacggttgtaggactaatggaaagcacaacaggccgtgagagagcacattgccttcgtttcgccgcctctcagcgcgccagcatctcccccacctcgtccgccgttaccgcacgatcctgtcgatcttcttgagcacgtcgtcggagagctccacgccgcttgccgcggcgttctcctccacttgctccggccggctggcgccgacgatggcgctggtgacgttcgcctgccgcaggcaccacgctatggccagttgcgccggcgatacgccggcctccttggccaccggcgccagtttgtcggcccgctcgatgttctgaggcgtcaacacgcccttgatgaactgattctgccggtcgtcggcggcgcggctgtccgccgggatctcgcccccactgtacttccccgtcagcaccccctgacccagcgagctgtacaccacctgcccaacccccagatgctcgcacatggggatgacggtgcgttcgatctggcgggcgagcatgttgtaccgtggctggttcgataccatccggtccagcccgagccgctccgcgatccgatgcgcctccacgatccgatccgccggccactcgctcccgcccacgtacagcaccttccccgccctcaccaggtcatcgagcgcccgcagcgtttcatcgaggggggtgttctcgtcgtaccgatggcactggtacagatcgatgtagtccaccccgagccgctgcagcgaccggtcgcactgctccctgatgtgcttgcgggacaggcccgactggttcggcttctcgcccacggggaagtagcacttggtcgccagcacgtactcgtcgcgggggaagtcgggcaggatcttggacaggcagcgctcggcatcgccctcggcgtagttgttggccgtgtcgaagaagttgatgcccaggtcgaacgccttatggaagcacttccgcgcctcctccaactcaacggcgttcccatacgtcagccagctcccgagtccgatctccgagagctgcaccccgctgcgtccgagtcgtcggtattgcattggtgtcagttccctccctcaaggtcccccacatgcgtggggaatacgaatagagctgttcgaggaacttccccttcggcggttcacccccacatgcgtggggaatacgccgttgcgaagaaccctctggtcgagttccgcggttcacccccacatgcgtggggaatacgacatcccgctcaacaagtgcatgctgtggagcggttcacccccacatgcgtggggaatactcaagctcctggacaaacgctcgaaactccgtcggttcacccccacatgcgtggggaataccgcttgatggcactgagccaccgcgatacattcggttcacccccacatgcgtggggaatacagccgacgcaacgcagctttctcgccgacgatcggttcacccccacatgcgtggggaatacgaacacacgaacaccgtctcgcccttcggcaccggttcacccccacatgcgtggggaataccaacatctcggtgagcacctgaacgcggtcctcggttcacccccacatgcgtggggaatactcgtcgcgcttgctcatttgctgcatgttaggcggttcacccccacatgcgtggggaatacattccgccgatagatgcgaatgtaacaatcttcggttcacccccacatgcgtggggaataccagtcggcgacgcggatgcgccgccgtcggtccggttcacccccacatgcgtggggaataccggcgtacgtagaagacgggggacgtcagccgcggttcacccccacatgcgtggggaatacttgtaaccaaacctctggatcttccgggattccggttcacccccacatgcgtggggaatacgtcggcctgctcgccgcgcatgaggacggcgaacggttcacccccacatgcgtggggaatacggaagttcctgggtggccagtccgtgaggggagcggttcacccccacatgcgtggggaatacggatcgatagactcgatctcccaaccggcctccggttcacccccacatgcgtggggaatacttgtaggtggcgtcgtcgagatggaacaccgccggttcacccccacatgcgtggggaatacacaaagcgcacctgaatctcctgccacgtggacggttcacccccacatgcgtggggaatacggcgagtggtgctttttgcgggtgttgggtcgctggttcacccccacatgcgtggggaatacgcgagctcgtccagaacgatgcagctcgcgctgtacgaccgccccggattctggctcgccgcctccgccttgatgctcgcgccgttcctgaaccgcagctcctgcgtgttctcgacggcgagtttcatgccgtcgggcggccgggaacagcgcggttcaccctcacatgcgtggggaataccataccgctagacacagccacgcaggaggcgcacggttcacccccacatgcgtggggaatacgaccgcacgcgccgggtcgccgcgccgtacggcggttcacccccacatgcgtggggaatacgtgttcgccgttgggtcctgtcatgaagctctccggttcacccccacatgcgtggggaatacttatgtgcgcgctccaaggcccgccatgccaacggttcacccccacatgcgtggggaatacacactcctcagccggccctcaagcgactcccgcggttcacccccacatgcgtggggaataccccggcccgcccgagcccggccgcccagccaacggttcacccccacatgcgtggggaatacactacaaaaggccgccaaacttgtacacccaagcccctcagtccgtcgattcggcctcccgcccgcgcttccggtaatgctcctcgtggctctttcccgcggccccgcgccgcaccagagtcaagccctcgaagtccaccggctcacgcgaagtgtctccccacgcccgaatgcggaaccgctgctccgtctgcgccccatggatcaacagcacgccccaggagacccgttcagttgtcaaggtacagtgcagtcgccgcccgtcagcgcagcggcgccaccgacagcagcccgaagccgaaggccttcgccgggccgatgccttccaccaccgcttcttcgaagcgagcggagtcggcgacttcgagcaccccctcgtagcgcacgcttctgagccgctggcccttaccgcggtcgcgcgtcttgttcatgtaggcccatgcgggctcaacggtcgtaagaccctgcacgcgaaagcccccgcgctcgccccgacggctcagccactcttccagcatctcggtcgccaccggcacgcgcttgccgacccattgcttctcaatcggtcccccatcagggccgatggagtccgcccggaggcgcttcgtgggattcgcaagcagccggaaccgcagcatgtcggcgccagcatacgccggtgagaatgagcgaacatcgaaacaccggagcatgtgccgcgcgttgtggaacgcatagtcccagtccggcttccccgccgactgcacgaggatcaccggggagcggcccggccgcgggtcgatgcggaacaggaacccactgcgttcgtcgcgctgagcgtggacttgccgaagcacgtccggtgccacttctcccccgggtttgtcggccaagtgtcgctgttcagggaagtcacgcggatcccatggcttcagaaactgcgcgtcagtttctgtacgttccctggacgggaaccccatgcacagccgctgatgcacccggtagcggttccgcagccaccagcgtgccgggcgtggccggtcggggttcgtgcccacgttgatgagcaagcaggagcgatacatgcttagttcgcctcctcagccctcgggtgtcggcgctcggtgccgagcgaacgaaacgccacgatctcgtcccgcttctggatgatccggtcgcgccaccgcgggtcctccgggttgatgcggtccaggcccatgttctccccgtactcgatcatggtcacggcgtcgtggcagaggtggcacagcaagcgcaggtcgtccaccgtctcgtcgcccccggcccggcggtaggttacgtggtgggcttccaccctctgcgacgacttgcagaacacgcacaggcccttgtccttgcagaggcgctgctggcgctgcgcctcatagctgggccggggccagcgaggggtgggcgtggagtgctgcagggcacaacccaccgtcactgtgacttcatcgcgctgtaaaaggcgtgcctcgtggaccggcggggcgaaggatttcggcgtgtcataccagacctctgcgtcatccggggcagtcgctccctctcgcgacgctcgccattcgattaggcaaggcaaagccacacgcttctctcgcgctcgctcgtcgctgttgtagcgtggccgccagcacttgtgtcgcaacgcggccaacaggccagcgcaaggggcctcccctgcgaggaccggcgtggccggcggacacgatttgcggccgaggaaaaccggccataccggactcgtcaagccgtggcgaatgtggccgatcacctccggatcgccctggagggctaccaggaagctcgcgtcgcagaggtactcccgccgtgtgatgagggtctcaatgggatcgtccttcgcgccgccggtacgcttgataccttcgccgtccgccctaaggacgccgatcttcgcccccaccgtgtggtagtcccaccaacgggtgccgcgacgatctatgcgcacacccatacgaagctcgttgagctcccgcagccggcagggggccgcctgccggggcacgcccatggcgcagcagatcagccccatcacgccggacttgctgggcgcctcgtaggtccggcggatgacgaacttcgagttgtcgccccacgactggagggggccctccagccgcaggaagagcgtgttcggcgtagataggcccacgtcaactcacctccgcctcgccccgcccggcgtccttgactttcgaccaacggaagccgacttctctcagcacggcctccaccagccccgcggccttgccctcccctccgagagcgtcgaaggtctggtccgcgatcggcacggctttgtctttccccttcaccttcttcttctgtccgtcggcctcgcgttcccagccctgcagtgggtagcgccacagctccgggctataccagagcaaggtggagccgatctcgaaggcccggcgcaggctgtagacgtgatcgccgagttgcgcgatgctgcgcccaacaaggctcagagcgtccggcgcgtcatccgggggatcgccgatcctgcgggccggttcggcgaatgcgttggcgtagctcatggggggcttccggttcttcttgacctcgacgaggatgccatccggtcggttgtaggccgcgctgctcttctgcttgccggtgggcgtggtcacggccgcggcgcgcaggaaatgccccagcgtcgcggcggcgaggcgctccgcttcaggcttcagttcctcctgccacttcttgtgagcgtccccttccggatccggctccgacccggcgaggttgtgcacaagctggtcccagtccagagagaaatacttgtagaagcacgcggagttgaacatggcctcgtccgggtgggctgcgccaccgccgggcttgccccggtcgtccaccgcggtgaagtagtccgtctcattgaccacccggtgcgtcgagatcgcgtgggccgcggagagcgacgcgtccacgtgcaggttcagcttcgcgaagaggccttcccggtcgagctcagtcatccgtcccgacagggcgatgtcggggaccgaggcggactcgccaaggatgtccgtgatggcctgcgcaagcgcctcgtgattgggtttcttcttcccgctctccgccgccaccgcatcggccatcctggggatggatgaccgggggacgaacaacaggatgttcgtgttgtccggctcttgagccgtctgcctctttacccgtttcaccccgcccttctcgaacgccttggcgatgagcaccaccagctcctctggcggatcagagccgccatggacctcctcggccagaatggtgatgagtcggcgcgtacgcaccccgccctctctctcgagcactgcctggaacgcagggctgcgacgaatcgaccgtttcaggcactggctggagatgcgggcacgtgggacgccgccgaagaggcaggtcttgggggcgccctggtcgtcccgattcaggttcgacggactgtgattctggatcatatggatctcgatcagcatggtcagctccttccgggctgcttcgcagccttgagatactctttggcccagatgtcgcgcacgtcacgtctccggccctgctcctcgtcgcgttcccagcgcgataggtcatgcagcagccgcacccagtccatgcctttggcccggccggcagccacagcatgcgccgccacggacagcgcccagcccaggtgcggctccaactgcgacaggggcgtttgcagcagcgcatcgaatcggtcgcgccagcgcttcccggcgtcctcgtccccgggctcacatgtgccgacgatcgcgggcagggactcaccccggacaggcggcaacggaaacgccccgaacagcttcgcgaccagccagctcggctgcctcccgcccccttggcgcacgggccgccagagggccgtaaagaggtcgaaacctggcaccgtctggtggagcggttgaccggcgaggctgcgcagtcgggagcgctcgccggcctggagcgccccaagctgtcgaatgaactgctcagtcggagtcatgctgtgcctcgcttccggcgggagcgtttgggcttgtcagcagcgtcaggggttcgcgcctcctgatcgccctgcgccaggttcctcatcacctcacgcaacgcttgctgcgcccgttgagccgcctcgcgccggcggagcggcgagccggcaatggtcgcgtcgacgacgcgcccaacgtggtcgcggagaacttccaaggcctcatctctccattccgtcagtatctgtgcttgcgattcgccgtcgatgtggccgacggtggcgagccctcgcatcagattctggaaggccttctccaaagcgcgttcggccgtcacgctgagggcgcaaaggcccgatcggattgcgtgccccttcgctccccgcgcgcacagcgtctcgacaacccgatgaccctttggcgggtcgcgccaattgcggccccgtgccgaagtcgtggcccatgtgcactggctaagccactccatctcgctcagtaggcgatgggcgatgccagggcccaatccgggcagcgcggccacatgccccccagcctgcttgtagagcgcctggctcgtcgcaagcagcgtggtgtggaactgcgtcgcactggtctgggcaccacccgcacgctgcagaagtcc

SEQ ID NO: 637 - DNA, 10170 bp, Artificial Sequence
  Synthetic Oligonucleotide
tttgccgccccgctggatcacttggacggtggaatgataacccatgcttggcctccccgccggaagtgcggtcagaggctaatatatcatagctgtatagctaagacaagaaaatttcttaatttttcgattttcttgattttttcacagcttctttttgtcgggatgtatgcgccacagggacgatatattgttggggtgggttctacgacatgaacatctggagccccaagaagcgagacgagaaattgaatcacaggcgcgacaatcccgtcaaacgagtgctggtcaagcacccgggcgactggccgtggtcgcgctgcggcgggaggttctatttctggaatgatggttcgatcttgagcatggacaagaggctatgaaggtgtcgacatgccgaggggcgcatacatcccgacaaaaacccgtcgggacgtatgcgccacccgcgaaatcgatcgcaagattccctccgaatcggaacgccgcggaggcatcaaagcttctgcgcttagtcaacggcgcgccttgcagcctgtgaagtgtgggctaagcggacgcgataaccgttgtcgtggtcttcgggccttgcctttgccgcgtcccgggtgtataccttcgccatgattgtcctgtggtagctacgcagcggacggtccggtccccccggggcgcgacgggcctgccacccgcctcttgcccaggcaaggaggaagccgtggagtacaacctgctcgaagaaaagtggattcccgttctgtggaaagatgggcacagcggtcgcgtgggcattagtgaggcccttaggcaagcaggccggattcgccaaatcgcggccagcaacccaatggaccgcctggccatcctgcgtttcctgcttgcgttgctctattggtgcaaagggaatcccccggacgacaagaactcgatttcttcgtttccctctgattggttcaagaaactcgatgacaacaaagactgtttcaaccttcagggcgatgggaagcggttttaccaacgcaagcctaaccgacttgagaagaagctgtccgtcaactatctgatgcaagaagtgccgaccggcacaaacttctggcacttccggcatgggacagatttcagaaacggcttatgtccggcatgctgcgcaatgggcttgttgcgccttccgctctttgctacgtcggccgggcgcggcaagcccccgggcgtcaatcaaaaaccgccgatctacatcgtgccgatgggcgactgcctttccgaaaccctgcgcctctcatggcggaagacgtcggagatgaacctgggcacgcccacatgggaaaatccggacataagcctccctcaacacggcaatgttccattattgataggattaacgtgggtaccgcggcgcgtctggttagacactccggagacaccagagtccaactgcatcgcctgcgggcgcagggaggctctgatacgtcaatgtgtctttgcgggtattgggagcacaaagacaggcgaaggcagtctggcacgaatctggaacgacccgcacaccatcagcgaaggcgacgagattgtgaagcctttcagcgcgcttggcccggccgacgctgcggctgggaagtggacgaaggtcgtggcgggaatcctgtgcggggaaaagccgaaggggaacagtaagttgtgggtcgtcagctttgcgacagtgcagaacgacaaatacctggaagcagccgagcgggagattcaattcttggccgcgctcgacgacgtgaaggttcaggcgagtttgcaagaaatccaggcgtggcagaaggaaggctggaagctcgttggcagagccaaaccgcgagagacttcacgaaacagaggacaccttgaaattctctccgcagtcgccgctgttcgtccccaagccgaggcaacggtttccggaaaaatcgacgagatgatcgcagaaggcggtaaggcatgggaagaggcggcccaggaatatcgtccgttgatggccgccgtcgccaaatcgctttccccgggctacacaaccgcttccctccggaggcgacaagaaattgccgctgtaaagccggacatgcggccaaagagaaacaacaaagacgaagggggggacaagtgactccaacggagcagtacgtcgaagttctgactcgactgaaacccggtgagctcgggctcttgcgcaaccatgccgggcaagggctcgacgaatcggtagagggctttgaccttttcgcaggcctttggtggccgctgcgggcgcaaacccaacgggcgcctcgccgtgaggtggcctggcttgtcgccaaactctacgccctccggcccctcgagcattcaccccgcgagaccctcgctcgccagctcgggcgatcccggccgggcgagaaaacagcgcggcagcgtttcgagcaacgcttcgacaggatgctcacgctgccgcttgctgaaatcgaacccgccctacagtgggcaatcgacctcatagcttccaagcacctcgaactcgactgggtgcggctgacgaacgatctttccatctgggaacgcgaatccacccggctcaaatgggccgaggaatttttgaactgtccaagaggaggagagtcatgttgatccagattcacgccattcagaatcacagcccggccaacctgaaccgggatgacctgggcgcgcccaagacttgcttttttggcggagtcttgcgctcccgtatttccagccagtgccttaagcgcagcatccgcatgagtgaggagttcagacaattgctgggcggagttcgcacccgccagttggcgaaagagattgcggaaaaggtgacgggcaaagacgtcaggaagcgagcggagaacattctcaaagcctgcgggctggagcctaagaaagcaaaaaaacaggaaggagaagacgaacaggaaagtgctgagaggagcaagatgctggtttacaccacccaagaggcgattacacgcatggccgaactcctccagcagggcgacggaaaaacggacgaggccttggcagcggagttcggcaagctcatcagtgaatccgtcgccgtgccggacatggcgctgagcggcaggatgcttgaaacgggagtcctcaaagacacgacggttgaggcatcgcttcaagtcgcccatgccatttccacccatgaggcccggcccgaggtggactactatgtcgccgccgatgatgtccccggcgaggacgcgggcgcaggttacgtggatgaagccatgttcggttcggcatgtttctacaagtatttctccattcattgggaaacgctggtcaaaaacctgaagcccttcgggacgaatcacgaaaaactggcggcccataccgtcggcgccttcattcgcgccgcggccttggccaaccccacgggaaaacaaaatagttttgccgcgcacaaccctcctgacgggatgttggtggaagtcagaaacactcccatcagctacgccaacgccttcgccaaaccggcggctcctcagggcgaacgggacatcatctcgcagagcgtggcgcagcttgcccattatgtgaacgacatagatacgggatacggcaagccgacgaagcggttctggttctctccaaatctccgctatccgttgacggctaccaccacggagagcgaagacggaaaacagaaacagcgtgaggtcccgcttgccgacaaagatgttaagtctcttgacgaactgatagcggctgtactcaaggaaatcggttacgactggcaggaggccaagaaagtggtcctgaatccggaggtgccccatgagcgcaaagacgctgctacttcggcttgaaggtcctcttcaggcatggggcgatcagcaatccaagttcgtcattcggcgcacggccgaggcgccgaccaagtccggcgtcatcgggatgctttgcgcggcattgggcgtttcccggccagaggcccgcgaaggctggcttccaaggctggcccggctgcgcatgggcgtacgcgtcgatgcgccaggggtccgctggtgggattatcacacggtgggtgcggggatgccgatgcgtaccgccgaggggggaaccaagtccggagccatgctcacccgccgcgaatacctttgcgacgcctcgtttctcgtcgctcttcagggcgaaccggacctcattgaggaactggaggcggcaatcaaagcgcccaagtggacactctacctcggcagaaagtgctgccccccttgccgccctctgctggagcatccgggaggtgaattccccgacttgctttctgccctcgaatcggtcccctggcgtcggcggctgaaggacgatccccagccgcgacccgtcgattgcctgcttgattgggaacccaccaacgagcagcccgaggcgcccgatgatgcgctcgtctggtacgacgtgccgttgacattcgagccgccgtcgcaccaaccccgattcgtcatccgcaggcagttgcgcgtcggagcggacggcgacgtaacacttgcggtgcagccaccgcagagcgacacgccaccgcctccgcgcccaagagcggattacacgaacacagagtacaaaaaccgacgcaaggagcggctcgacgacgactatcacttgtgcgttttttgcaagtctcccgccagcaccgtgcagcacatcacgtaccgccgcgcgggcggcggcgaactccgggacgatttgcgctccctctgccgcctctgccacgacgccgtgaccatgatcgagtacgggctcggaatgggcttggaccgcatcaaccccgaagagccccgttggcgcgacaagatcatcgagaagcgggaagagattatcaggttccgctctctggagactcgccgcagacgccttgccgctgaggaggtggaatagccatgtacctctcctgcctcttgattgacgtcggcaccaaccccgaccgccccaggcccgggcggctctggctgcgaaacctccatcacgtccaccagcgcctttgcatggcgtttccatccaaagaccgaatatcccacgatccccacttcctcaagcctttcaaacccgcggactttgccaacaaccaggtccatgtaagacgtgacggcgactccggctttctcttccgcatcgacccgcaaccgggcgggcgggtcgtgatcctcgtccagtctaactctgccgtaaagcctgactggggctacgccttccacaacgcccgttttcttctgaatcctctagccgctccccctcaggtgcaggaattcgacccccgctttgagaagggtcagcggcttcgcttccgtatccgcgccaatctgagtaagaagataaaaaccagcacagagggcgttgatcttacgaggacgcgagaggggacagataagcggggccgcccgaaggcccaaggcaaacgcgtggcgctgacctgggacaaggaccagaaccgcgacgatgtgatacgaaaatggttcgccggcaagggcggccaaggtggattccaagtggaaactttccgggtcttgcagatcgggtggggcgcaggagaccgatccgacccgaggccgacgggcggccgcatgaaatttcgctcggcgttattggaggggacgcttacggttgaggacgcggacagcttcagagaaaccatcgtgggcggcgttgggcacggcaaagccttcggcttcggcctgctttccgtggcgccgctctcgctgtagcggcggtctccgaccgccggtacgtcgatcggagatcgacgctacaatcccttgtcgatcggggatccgtgcaacatttcttgagcggagatcgagccaatatgaaattcaaaccccgcttgcggcgactggactggctctatacgggcagcccaatctactatctcacgctgtgtacgcaggaccgcaaacgctcgttggcaaatcctgcgattcaccgggaattcacgagattctccgaacgggcgagcgattttcttgtttgggtcgggttcttcatgatcatgcctgatcacatccatcttttcgccggcttttgtcgtgagtccccacctttagggaaatggatcaaggcgctgcgcggggatttatccaaagtcctccgggaagatgagggcgagggcacacattgggagaaagactttttcgatcacgtcctgagatcgcaagaatcctatcgggagaaatatgaatatgtccggcagaatccggtccgggccggtttagtcaagcgcccggaagattggccgtaccagggtgagatccatcgcctggttttgtagcggcggtctccgaccgccgtaacgtcgatcggagatcgactacaaccccggtcgatcggagatcgacgctacaaccgccgtcgatcggagatcgacgctacagcacgggctggaggctctgtgagaattcaagatctccacgttctacccaagttcagtgacgggtggagttatctgtacgtcgagcattgccacgtcgatcaggaagagcgggccattgccgtccacgatcaagccgggaaggtgccggtcccctgtgccaatctggctctcctgatgttgggtccgggcgtctcgattactcacgccgccatctccgtgttggcggaccatgggtgcctggtggcttggtgcggggaggagggagtccgcttctacgccgtgggcatgggcgagacgcgcaacgcggccaacttcctgcatcaggcgaggctgtgggcggaccagggtttccatatgcaggtggtgcgccgcctctatcagttgcgattttcggagaagttcgaccctgccctgaccctccagcaaatccgcggcatggagggcgtgcgggtgcgcgatgcctacgccaaggccgcccaggaagccggcatcacgtggtcgggccgcagctataaacgcgatgagtggagcaaggcggaccctgccaaccgagccttgtccgccgctaactcctgcctatatggaatctgccatgctgccatcgtgtcagcaggtttttcgcccgcactcgggtttatccacaccggcaagatgctgtccttcgtctacgatctcgccgacctgtacaaggctgaaattaccgttccagtggcatttcgcgccgccgccgaggggacgggacagttggaacgccgggtgcgcatcacctgccgcgatcagttcgtatccacgcggcttctggagagaatcatcccggatgtccaaagggcgttgatgctggcaaaagcgacggcctgggacactaccttcgacctggatgccgccgcccccggcttcctctgggacaatctggaaggagaggtcgaaggcggccgcctgctagcccccgaaatcggtgaaacggagcccggcgatggtggtcctgattcttgagcgcgtccccccagggttgcgaggcgagctgactcgctggtttttggaacctcaggcgggagtgttcgtgggacgcgtctccgccatggtccgtgatcggctctgggaaaaagcctgcagccaggccaagggaggcgggtgcttgattatctattcaagcgacaatgaacagggctttcgagtccgaacctggggccaaacagctcgggtcatcgatgacttcgagggcctttttctcgttcgcatgccgcagaatcaataatttagtaagtgttgtccccacgcgcgtgggggtgaaccgccggggctgaaggtttcatgggctggaaagaagttgtccccacgcgcgtgggggtgaaccgatatgctgcatgtgccggggctggcgcttgatgttgtccccacgcgcgtgggggtgaaccggtatcggcgagtggcaaggcgaatccacttaggttgtccccacgcgcgtgggggtgaaccgacctccgagggcgcggggcgcgtgctggcgatgttgtccccacgcgcgtgggggtgaaccggctggggccgacgcgcgcttgtgagactgcgggttgtccccacgcgcgtgggggtgaaccgcgggagaactttgaaggcacggtcctcgatcacgttgtccccacgcgcgtgggggtgaaccggcgcaggttaaggctgaggccaaggccgatgcgttgtccccacgcgcgtgggggtgaaccgtaatggtggcttgcaccttctgctcgaccgatgttgtccccacgcgcgtgggggtgaaccgcagcgggccgtgttggaggagaaggtcgcggagttgtccccacgcgcgtgggggtgaaccgttcccagccgcaggcaggatcaccgtaccccagttgtccccacgcgcgtgggggtgaaccgcaaaacaatatcaagaccaagcacttggatgtgttgtccccacgcgcgtgggggtgaaccgcatcgggcagcacagcggccttataccccaaagttgtccccacgcgcgtgggggtgaaccggcagctcgcggcgattcgcattgccgctgaaagttgtccccacgcgcgtgggggtgaaccggggagtcgtgagtgtagttacaggcagggttcgttgtccccacgcgcgtgggggtgaaccgcttctgcatcttataaagaacgccagtttgaagttgtccccacgcgcgtgggggtgaaccggtacggttcccaggggaattatttcttggggtgttgtccccacgcgcgtgggggtgaaccgatgtagcttgatatgggtgtggtgtcgcagaagttgtccccacgcgcgtgggggtgaaccggcggcgcgcacattccaacctcgtccgtatccgttgtccccacgcgcgtgggggtgaaccggcggacacggcggatgtgacgaatatggagtcgttgtccccacgcgcgtgggggtgaaccggtctctcgaaaaggaaagccaactttcagcttgttgtccccacgcgcgtgggggtgaaccgctcttggcatagagcttagtgagtttgatgaagttgtccccacgcgcgtgggggtgaaccgcctttgccctccgagacgcaacagctccattcgttgtccccacgcgcgtgggggtgaaccggcgagcgcaggtctaagcgaccgcgacaaagagttgtccccacgcgcgtgggggtgaaccggtgatggacacttcctaaaatggcattaagtcgttgtccccacgcgcgtgggggtgaaccgcagcgggtagcgcagacttcgtgcatatcgaagtctgcggcttttgccgccgtgaatcttgaaaagccgcagacctgcaaaaagcgcaggtctgcgctacccactgcctggccatcctggagaattgaaagtccctccagtaaagcggcgaagcgcaggatttccggctgcttcaatcgcttgcgacgctcaccggtcagtagcgcgttggtaatttcgagcccccatacggctggaacaacgagcgtctgcccttcagtgccaccaggaccccgtccgcgtattcgctcgcttcatccggggagcaccaggcaagcgccaccgacgcatgcaccacaacgccgctcaaaatcgccgtccctcaattatcatttcgcggacgctcatggtgtggggctttacgcgcttgcgcaacgcgcgcatgccctcgacaatctcctcgtgcgtcagctttcgatccgagtctcgaaccggcaccagcattgccgccggaacgccgtgtcttgtaatcgtgatcctttcgcaacccatcttgtccagctaaagctccgcatcagctatagtctccctctggccgtgcggcccgccccttgcggcgcaaccaaaccgaagctcaaaacgcgacatcgtcctcgtagcgcgaccggacactgaaggtaaaggttcgccacccgtctcccctgcaaaaccgggtcgcggagtactattgctttgcacagcgggggacgaccgaggcgctacggaagaggttggttcgcgaaactgagcaagagacccctcacccgtcccgctccggctggtggaagcgccggagcgggacacgctcagccccaagggagagggctatggattcagttctacgcgcggtgtccagtcaaagatgtgggacacgctcagccccaagggagagggctatggattcagttctacgcgcggtgtccagtcaaagatgtgggacacgctcagccccaagggagagggctatggattcagttctacgcgcggtgtcca

SEQ ID NO: 638 - DNA, 10116 bp, Artificial Sequence
  Synthetic Oligonucleotide
tggcttggttgaaaagaaatagaccgcggatcacagtatcagcaggatcatcgggatatttggaaggtggaaaggtgaaatggtgaaaaggagcccccaaaccagggcggttcagcgaccgcctgtactgtaccggcgcttgcatagcgcagtttgggggatagccgcccgaggagggggtggcaaagtccgtttgccacagagaccggaggtctcttcctaacaggcaactccgttgcctctgccgaacggacttcggcaacccttatattacaccaatccgcgacaatctgcgccttttatccgcgtatatctgcgtgaaccgtggaacccgggatccagtcttttacaggaaagtttgaagtccgagccggcttcaggactggcataagcatgaaacccatattgccggctcgaactctaaacacagccagcatggagttcaagagccttttcagactgaaaaatgccaccatacaagttggctcttggacttcatgcgtaacatattgctggctcgaactctaaacacaaccagaatatatttcatccgcgaggcaaataatgcttgacatagaatctaaaccacacaaaaatagatttgagagggtaaataaagaaaggagcaggaaagatgagcaagagcttagtttttgtgctggcgttcttatgcctggcggctgcgtgcctggggtcggaagcggccgcgcctgaccctccggagccactccgcgcggtggaactgacgcctccgccttcaccggtaagagcgttgccagggcagaagtccgtgcctccctggaacttcagcgtcaatccaaacccgatcataaacaactattacgactacatgatcggcggctacaacaacctgcctctgaacctcgtccccgagagccagggcggaggctatttcctcacctggacggggcgcaacagccccaccagcgaccgcaagtcctattacggctatctgtactcatccggaatgccaatcttcgttaaccagatcgttacccagggagaaggcgagcacggcatgccggcattggtggtggatcccgttgatggaaatcctttctacgcctggacccagaatgtggacacggacccggtgtccgagattgtgctgacctccgatgccttcatagccggaattgccggattgttcaacaccacccagatcgtgatcgacaaccccgtcaccctcaccgcgccggacgggacggagaccacaaacaacgttttctactggcccagcctggccatcggcccctcccctctggcgggcaagcgcaggctctatctgctgggacggcaaaactgcaacgtctatctggcaatggctgatttctcccgcgatgatgtcgaaaatggaatccccctcaactggcagtactccagcgttccgcaactcaacacctgggaactgaatgccgtgccaaacaaaacctatctggccctggaaactgactccggcgggaatgtcatcctggccggatatcacaacagctactcgattgagaatgatatcatcgtcttcatctgcggcaacttcggacagggggaatggacgttccacagcttcaacagcaggatgcccacctggaaccccacctatcccggcagcaacggcggcttctttatagatgatgaggggcaaccctttcaggatcaagacctgcactggaaactgttgaactccggacatctgaacgccaccctggatagcggtggcaggctgcatatcgtggggatttgggccttggccggcggggacggcgtatttttccctcatttccagttcgtgaaagaagctgtttacgacccgacttggaataatttcgagatccgcgacatctttccccaaaaaaattgtgacgaccttttcaatgcctgtttcaccccctgggacatgctgccgccctacggcgaggttgacgaatggatctacgatgaggaatatggttactatccatacacgttcactgactggcccttcccccactgggaccaggcagcacacgaaaacaccatgatgttccactataacaacgtcaagatcacccgcgccaacgactatggccagatggctgtggtctggcaggattccaaacgcgcctttgactggtgcgtgtatcattatcccggctatgaggcctgggaacacggcacggacatctatatcgcctatacaaactatggcggctcggagtggcaggacccgatcgtgctcaacaatgtcgatactcccgaactggcgggcatcaagccgatgtgggtgtatccggctgaccggatgatatacactggcttcaaccagtacggaattaaagagggaaaactgggcctgatgttttacgatgacttcacctggggctcgaattctctcccgccaccctaccaccccgatcctgacggcggccgggtgatgttcatggaactgcatatcggatacctggacgccaacgatcccagccaggcgccagctccggccatcctggcgcagaattggcccaaccccttcaatcctaacaccaacatcagttttgaactgcctcagcccggccctgcccggctggaaatcttcgacctccgcggaaggctggtaagcaccctactggacaaggagatgggagccggaaaacatagcctgaactgggacggcaccgactccaacggcgcccaactggcaagcggagtctatatctaccgcctcagcacgggaaggacgagcgccagccgcaaaatgatattgctgaagtgacgggcatccgcccttccaagtccgatctttataccgagccgccgcgtgtattgcgcggcggtttgctttccgcagaccaagtattagcagcgggaaaactgcaatgaaatagccgctggtggggctccgtaaaatgggagtggaagccgccgcatggaacaccttgaaagtaacaagagaccgccccaaattgacctttcctgacctaataacccctcaaagcaaatttcttgacaatgatctttggctaaaatataaggttcccatcgagcaaaaggagcatgttatgtacaatcttctttgtgataattgggtaaacgtggtctatctttcgggcaaaccagatagaatatctttagttcaaactcttaaagacgcacactgtctgcaactggcatacagcaatcctatggaccggttcgctgtcttcagattcctgcttgctcttggctactggtgtttcgccaacaccaacgtggagcctgaacctgataagccgcttccggtctcctggataccctggctggaagaaaacaaggagtatttcgagctttttggtgatggaaagagatttttccaagccgatcccagttccaggatcagagccattaccgaccttattcatgagataccaacagctcacaacctatgccatttcaaacatgtcaccgactatatcgatgggctctgcgaagcttgctgcatcaagggactgctgagattacctgtctttaccactgtcggtggcagagggataggcgctggaatcaacaacactcctccattttacctgctctggcatgcaaatgatctcgctggcatgctggctcaaaattggcaaccctgggataatatggggattccggcatggttgggttcttttcaaaaagaaagcagggaagtaggcttacttgctggaatgacctggctgccgcgcaaggtgtatctgcatgatcctgtcccaggtcaggcagcatgttgttcctgcggcttaccctccaaagctctcgtctattcctgcagcataaaacctgaaccagtgccggaaggccttaaatggaaagaccctcatggtgtttacaccgatcagggaaaaagtctccagtccaaaatcaaactgatgtccaatgatagatacactttcgcggaccgggattggtatagcccgttgttcagctatttgcacgcggaaggaaactccagacaaggaaaactatggttggttggatttgccagcgataaagcaaaaagcatagacatctgggacaagatcatcgagcttgagggaactgatacaaatgatgagctactggctcaattggcaaacagggctactgcccttaatgccatgcgcaagaagcctctcagaggtgatttcaaaaagtcagtgggcactccccagattgctgacattatcccccacgccgaaagcagaattgccatcaatgcgggtaaaatgactgagaacaggggctattcctggcaggatgccgatactgaatacggagaactgctcaccaaggttgcatgctctttggagccggctcaaacagtggacgccaggctcaagagaggtaaattcatttcccgcaagccctggccagttataccagaatccaaaacaaaacccgcagaggaggaccagaatgaatagaggaaccgttgacttcattgcaagcctggagaacctcaaagaaggcgatttgggcattcttagaaaactcaggggagcccggcttgatgaaaagcttcccggatttgacctgttttccgccctatggtggcctttgcggcaaaagaatcaacgcgctcccaagcgtgaagtggcttggttgatcgccaaactttttgctgaattccgctttgaacagcgcgagggagccacattgcccattcttatgggaggcatctgccggaagttggaacccaaaaaggaattaccccgggtattggcacgctttgatcaactcgcatcgcttgacattatgcagatggaagagccgctgtcggtcatcatgggtattttgcgcaagcaccagcaggtctgcctggactgggtagggcttactgatgttctgtcattttgggagcaggaacctgtcaaaagagaatggtcggattcatttattaaagcatacaagatcaacaaggaggattcagatgttgattgaaattcatatgattcagaatcacagtccggcaaatcttaaccgggacgacttgggcgcccccaagacctgttatttcggtggagtattacgttctcgcatctccagccagtgcatcaagcgcagcatccgttttgccccggaattcgcggaccttagaggaggtatccgaacaaggcgtctggcagagaaactcgaggaaatgctggaaaacaaagataagaagctggttgccaagtttcttgaagcctgcggaatcaaaaccaaatcttccaagaaagctgcaaaaaagtccgaaaagatacccgcggaagccgatgaagatcaggatgagcagcaggcggctgatacatctgacatgctggtttttaccacttatgatgccctgcgccaaatggcaaagctgctttccgactccaaactaagtgaaagcgaaaaactgctgcagttcaaagatctgctcacaaactgcgtccattctccggatatagcactttgcggcaggatgctggagaccaaagagcttaaaaacactggcgttgaaggcgccctacaggttgcacatgcgatctccacccacattgccagacctgagatagactattttgtggcggccgatgatgttcccggtgaagacgccggagcgggtcatattggcgaatccatgtttgcctcagcctgtttctacaaatacttctccattgattgggaacagttggtcaagaacctgaaaggggacacgaatctggcagcccacaccgtgggtgcctttctcctcgccgctgccaaaaccaaccccagtggcaaacagaacagcttcgccgctcataactatcccgatggcatccttgttgagttcaagaattcccctattagctacgccaacgcattcgtcaggccagtttccgtggtcaaggaatcggacctggtggaacaaagcatcggccagctttccaactacgtgaacgacatcaggcttggctattatgatgagcaatccccagttatcagcttctggttttctccaaacaatcgctattcccttggcaatgagcattccaaactggcttccagaaacattggcaacctcaatgagcttgtaggcgctgtgttggattatattggcggcttcaagtgggaagaagttcagaaaagcaaggcttatgttggcggctgacatgagtgcgccacccaacaccttattcttgcgcttggagggggctttgcagtcttggggcagcaacgaggctaagtttgctttgcgcaggactaccgacgctcccacaaaatcaggtgtcctggggctgctttgcgcggccatgggaattgggcgcgcggaggctgctgattcatggctcccaaaactcgccaacctgcgcatgggcgtgcggatagaccgccccggcatacgctggtgggacttccatactgttggagcgggacaaagaatgcgcatggcagagctgaaggcacccaaaaaaccttccatggttggagctgccctggctgataccctgacaccaagcaaagtaaaaaccagggcagagaccttgctctcacgccgcgaatatcttgccgacgccagttttctggtcgccttgcagggtgagccggaacttgtggaaaagctctccgccgctctggccaagccggtctgggcaatttatctggggcgcaaatcctgtcccccttcacgtcccgtgggcgagcatgctccgggcttttataacactttggaggaggcgctgtccgcggttcccctgcaaaagcgctggcacaatgaacccctgccgcaaatactgccttgcgtcatggactggatccccagccaggacggagaacatgcgcctgatgacgcggagattcattacgatctgccggtttcttttcagccgccccgccatttgccgcgcttcgtgatcaggcgtgagctggttgtgggagaggatgtgcaagtgagcagggaaaccggaaccagcgtttggaggcccaaaggaacccgggcggattataacaattccgagtataagaaggtcagggcggagcggcttgtgatggaccatgccgcgtgcatggtatgcaaagctcccgccacgactgttcaacacgtgaattaccgcagggcgggaggcaaggaaataccggaagacctgcgggcgctgtgccgcctctgccacgacgcctgcaccatgctggaatacggttccggcatgaccaccgaccgcatcgacccctgcgaccccatatggcgggagcgaatactggcaaagcgcaaagatatagtcgagttccgttcgcgcgggcagcgtttccgcaaaatgaagccagaggaggaaaacggatgatctacttgtccaagctattgatcgatactggaggcaatccagaccgtccccgccccggcagaaagtggctggacaatatctataacgtccaccgccgcctttccatggcgttcccttcaggtttgcgccgggagcaggatccgcatttcctgaagcccttttcgccaaacgacttccaaaaaactcccttccttttccgggtcgataacaacatcgacggaaacgataaaagggcgattattatcgtccagtccgttcttgagccggattgggattattgcttccaaaacgcgcttgatttcctggcagcgccaccggaaacaaaggagtataatccagagtttcaagcgggacaactgctccggttcaggctgcgggtaaacgccagcgtacgccgtcatattcctgagaaggtgcaacaggacggtcaaaccatagaaactggcaacatcctgcacaaaagggtttctctcacctgggatccctcttccaccccggatcaggcccttgccgactggctggctgccaaaagcccaaagctgggcttcacccttcagcgctgtgagcttcttcaactgggttgggtttatggctccaagcctgaacctaaaaatgtcaaagcaaaggaacagggacagggctactggcgtgaacacacatacaatcctctgcgcttccgttcggctctactggagggaattctcaaagtggatgacccgaaactgttcctggaaacgcttagaagcggcattggaaaagcgaaaagcttcggctttggcctgctgtccgttctgccaatcaggaatgatgaataaagacctgcactctatcccccggatcagagatcggcttagctatctctatgtggagcatgccaaaattgatcagaacgggcaagccatcgccattcacgatgccctgggagaaaccccggttccttgtgccggcttggctatgctgatgctgggaccgggcataaccatcacccatgcggcaatactttcactggctgcctgtggctgtctggtagcctgggtgggggaacatggcgtcaggttctatgccgcaggcacaggtacaacccgtagcgccgtcaatcttatgaaacaggcaaagtactgggcagacccggttttgcatttacgggttgtgcgctccatgtatcagttgaggttccaggatgagctttctcctgatttaactttgaaccagatcaggggcaaggaaggtgcccgggtgcgcgatacatatttccaactctcccaaaagtatggtgtgcccatgcagggcagaaactatcaaagagacaactggaataaagcggatcccataaaccgggcattatctgtggcaaactcctgcctctacggcatatcgcacgctgccattgttgctgcaggattctctcccggattgggctttgtccacactggcaagcaactgtcatttgtctatgatatcgcggatctatacaaaatggaaatggctgctcccgccgcattccgggcgaccgctgaagggatcggcgaactcgaccgcagagtcaggcttgcctgccgtgatgaattccacaggcagaatctactcaaacgcattgtcgcggatattagttctctcttcggtgatattatgccagaggatagcccggatgactgttttgccgaagaaccagccttgcctggaggactctggtctccagatggagaagtttccccaggcggcatatcttacgggcaggatgatctgccaaaggaagattgatggtggttttagtattggaaaatgtgccaagctccctgaggggtaagatcacacgttggctgctggaagtaaaagccggggtgtttgtgggtaaagtctcagcaatggttagagataaactgtgggataaggttagaagcaattgcagcggtggaacttgcctgatgatctggagtagtcagaccgagcaagggtttgatatcgaattctggggtgccgcatcaagagtcgttacggaatgggagggtatcaaacttatgaccaagcatccttaaactaaggcttgaaggtgttcaatgacctcttagacctctattgatcaagtgtattccccatgcatgtgggggtgaaccgtagatggcacaagtgcaagcgccgcaaccacagtattccccatgcatgtgggggtgaaccgtgatggcgtaagcaatgtgccagaagttaatagtattccccatgcatgtgggggtgaaccggaattgccattgatgcggcaaataatgatcttgtattccccatgcatgtgggggtgaaccgggagagtagctctcttcggaaaaaacagcgaagtattccccatgcatgtgggggtgaaccgagtcacgctgttattgcgtataggcagggtgggtattccccatgcatgtgggggtgaaccggtcaaacgcggtttcaaggaggctgagtatgtgtattccccatgcatgtgggggtgaaccgggcggctggagccattgagccataaggagatagtattccccatgcatgtgggggtgaaccggcatccaatatctattggggcgtttcaggatagtattccccatgcatgtgggggtgaaccggttacctcttaaggtttaatgagattgtggcgtattccccatgcatgtgggggtgaaccgaaatgagagatgttaaacaggagaatacataagtattccccatgcatgtgggggtgaaccgcggtttatagaccgatgcaagccgatattagggtattccccatgcatgtgggggtgaaccgaggttcccgccataactgcccaacaccagtacgtattccccatgcatgtgg

SEQ ID NO: 639 - DNA, 10091 bp, Artificial Sequence
  Synthetic Oligonucleotide
tttgccgccccgctggatcacttggacggtggaatgataacccatgcttggcctccccgccggaagtgcggtcagaggctaatatatcatagctgtatagctaagacaagaaaatttcttaatttttcgattttcttgattttttcacagcttctttttgtcgggatgtatgcgccacagggacgatatattgttggggtgggttctacgacatgaacatctggagccccaagaagcgagacgagaaattgaatcacaggcgcgacaatcccgtcaaacgagtgctggtcaagcacccgggcgactggccgtggtcgcgctgcggcgggaggttctatttctggaatgatggttcgatcttgagcatggacaagaggctatgaaggtgtcgacatgccgaggggcgcatacatcccgacaaaaacccgtcgggacgtatgcgccacccgcgaaatcgatcgcaagattccctccgaatcggaacgccgcggaggcatcaaagcttctgcgcttagtcaacggcgcgccttgcagcctgtgaagtgtgggctaagcggacgcgataaccgttgtcgtggtcttcgggccttgcctttgccgcgtcccgggtgtataccttcgccatgattgtcctgtggtagctacgcagcggacggtccggtccccccggggcgcgacgggcctgccacccgcctcttgcccaggcaaggaggaagccgtggagtacaacctgctcgaagaaaagtggattcccgttctgtggaaagatgggcacagcggtcgcgtgggcattagtgaggcccttaggcaagcaggccggattcgccaaatcgcggccagcaacccaatggaccgcctggccatcctgcgtttcctgcttgcgttgctctattggtgcaaagggaatcccccggacgacaagaactcgatttcttcgtttccctctgattggttcaagaaactcgatgacaacaaagactgtttcaaccttcagggcgatgggaagcggttttaccaacgcaagcctaaccgacttgagaagaagctgtccgtcaactatctgatgcaagaagtgccgaccggcacaaacttctggcacttccggcatgggacagatttcagaaacggcttatgtccggcatgctgcgcaatgggcttgttgcgccttccgctctttgctacgtcggccgggcgcggcaagcccccgggcgtcaatcaaaaaccgccgatctacatcgtgccgatgggcgactgcctttccgaaaccctgcgcctctcatggcggaagacgtcggagatgaacctgggcacgcccacatgggaaaatccggacataagcctccctcaacacggcaatgttccattattgataggattaacgtgggtaccgcggcgcgtctggttagacactccggagacaccagagtccaactgcatcgcctgcgggcgcagggaggctctgatacgtcaatgtgtctttgcgggtattgggagcacaaagacaggcgaaggcagtctggcacgaatctggaacgacccgcacaccatcagcgaaggcgacgagattgtgaagcctttcagcgcgcttggcccggccgacgctgcggctgggaagtggacgaaggtcgtggcgggaatcctgtgcggggaaaagccgaaggggaacagtaagttgtgggtcgtcagctttgcgacagtgcagaacgacaaatacctggaagcagccgagcgggagattcaattcttggccgcgctcgacgacgtgaaggttcaggcgagtttgcaagaaatccaggcgtggcagaaggaaggctggaagctcgttggcagagccaaaccgcgagagacttcacgaaacagaggacaccttgaaattctctccgcagtcgccgctgttcgtccccaagccgaggcaacggtttccggaaaaatcgacgagatgatcgcagaaggcggtaaggcatgggaagaggcggcccaggaatatcgtccgttgatggccgccgtcgccaaatcgctttccccgggctacacaaccgcttccctccggaggcgacaagaaattgccgctgtaaagccggacatgcggccaaagagaaacaacaaagacgaagggggggacaagtgactccaacggagcagtacgtcgaagttctgactcgactgaaacccggtgagctcgggctcttgcgcaaccatgccgggcaagggctcgacgaatcggtagagggctttgaccttttcgcaggcctttggtggccgctgcgggcgcaaacccaacgggcgcctcgccgtgaggtggcctggcttgtcgccaaactctacgccctccggcccctcgagcattcaccccgcgagaccctcgctcgccagctcgggcgatcccggccgggcgagaaaacagcgcggcagcgtttcgagcaacgcttcgacaggatgctcacgctgccgcttgctgaaatcgaacccgccctacagtgggcaatcgacctcatagcttccaagcacctcgaactcgactgggtgcggctgacgaacgatctttccatctgggaacgcgaatccacccggctcaaatgggccgaggaatttttgaactgtccaagaggaggagagtcatgttgatccagattcacgccattcagaatcacagcccggccaacctgaaccgggatgacctgggcgcgcccaagacttgcttttttggcggagtcttgcgctcccgtatttccagccagtgccttaagcgcagcatccgcatgagtgaggagttcagacaattgctgggcggagttcgcacccgccagttggcgaaagagattgcggaaaaggtgacgggcaaagacgtcaggaagcgagcggagaacattctcaaagcctgcgggctggagcctaagaaagcaaaaaaacaggaaggagaagacgaacaggaaagtgctgagaggagcaagatgctggtttacaccacccaagaggcgattacacgcatggccgaactcctccagcagggcgacggaaaaacggacgaggccttggcagcggagttcggcaagctcatcagtgaatccgtcgccgtgccggacatggcgctgagcggcaggatgcttgaaacgggagtcctcaaagacacgacggttgaggcatcgcttcaagtcgcccatgccatttccacccatgaggcccggcccgaggtggactactatgtcgccgccgatgatgtccccggcgaggacgcgggcgcaggttacgtggatgaagccatgttcggttcggcatgtttctacaagtatttctccattcattgggaaacgctggtcaaaaacctgaagcccttcgggacgaatcacgaaaaactggcggcccataccgtcggcgccttcattcgcgccgcggccttggccaaccccacgggaaaacaaaatagttttgccgcgcacaaccctcctgacgggatgttggtggaagtcagaaacactcccatcagctacgccaacgccttcgccaaaccggcggctcctcagggcgaacgggacatcatctcgcagagcgtggcgcagcttgcccattatgtgaacgacatagatacgggatacggcaagccgacgaagcggttctggttctctccaaatctccgctatccgttgacggctaccaccacggagagcgaagacggaaaacagaaacagcgtgaggtcccgcttgccgacaaagatgttaagtctcttgacgaactgatagcggctgtactcaaggaaatcggttacgactggcaggaggccaagaaagtggtcctgaatccggaggtgccccatgagcgcaaagacgctgctacttcggcttgaaggtcctcttcaggcatggggcgatcagcaatccaagttcgtcattcggcgcacggccgaggcgccgaccaagtccggcgtcatcgggatgctttgcgcggcattgggcgtttcccggccagaggcccgcgaaggctggcttccaaggctggcccggctgcgcatgggcgtacgcgtcgatgcgccaggggtccgctggtgggattatcacacggtgggtgcggggatgccgatgcgtaccgccgaggggggaaccaagtccggagccatgctcacccgccgcgaatacctttgcgacgcctcgtttctcgtcgctcttcagggcgaaccggacctcattgaggaactggaggcggcaatcaaagcgcccaagtggacactctacctcggcagaaagtgctgccccccttgccgccctctgctggagcatccgggaggtgaattccccgacttgctttctgccctcgaatcggtcccctggcgtcggcggctgaaggacgatccccagccgcgacccgtcgattgcctgcttgattgggaacccaccaacgagcagcccgaggcgcccgatgatgcgctcgtctggtacgacgtgccgttgacattcgagccgccgtcgcaccaaccccgattcgtcatccgcaggcagttgcgcgtcggagcggacggcgacgtaacacttgcggtgcagccaccgcagagcgacacgccaccgcctccgcgcccaagagcggattacacgaacacagagtacaaaaaccgacgcaaggagcggctcgacgacgactatcacttgtgcgttttttgcaagtctcccgccagcaccgtgcagcacatcacgtaccgccgcgcgggcggcggcgaactccgggacgatttgcgctccctctgccgcctctgccacgacgccgtgaccatgatcgagtacgggctcggaatgggcttggaccgcatcaaccccgaagagccccgttggcgcgacaagatcatcgagaagcgggaagagattatcaggttccgctctctggagactcgccgcagacgccttgccgctgaggaggtggaatagccatgtacctctcctgcctcttgattgacgtcggcaccaaccccgaccgccccaggcccgggcggctctggctgcgaaacctccatcacgtccaccagcgcctttgcatggcgtttccatccaaagaccgaatatcccacgatccccacttcctcaagcctttcaaacccgcggactttgccaacaaccaggtccatgtaagacgtgacggcgactccggctttctcttccgcatcgacccgcaaccgggcgggcgggtcgtgatcctcgtccagtctaactctgccgtaaagcctgactggggctacgccttccacaacgcccgttttcttctgaatcctctagccgctccccctcaggtgcaggaattcgacccccgctttgagaagggtcagcggcttcgcttccgtatccgcgccaatctgagtaagaagataaaaaccagcacagagggcgttgatcttacgaggacgcgagaggggacagataagcggggccgcccgaaggcccaaggcaaacgcgtggcgctgacctgggacaaggaccagaaccgcgacgatgtgatacgaaaatggttcgccggcaagggcggccaaggtggattccaagtggaaactttccgggtcttgcagatcgggtggggcgcaggagaccgatccgacccgaggccgacgggcggccgcatgaaatttcgctcggcgttattggaggggacgcttacggttgaggacgcggacagcttcagagaaaccatcgtgggcggcgttgggcacggcaaagccttcggcttcggcctgctttccgtggcgccgctctcgctgtagcggcggtctccgaccgccggtacgtcgatcggagatcgacgctacaatcccttgtcgatcggggatccgtgcaacatttcttgagcggagatcgagccaatatgaaattcaaaccccgcttgcggcgactggactggctctatacgggcagcccaatctactatctcacgctgtgtacgcaggaccgcaaacgctcgttggcaaatcctgcgattcaccgggaattcacgagattctccgaacgggcgagcgattttcttgtttgggtcgggttcttcatgatcatgcctgatcacatccatcttttcgccggcttttgtcgtgagtccccacctttagggaaatggatcaaggcgctgcgcggggatttatccaaagtcctccgggaagatgagggcgagggcacacattgggagaaagactttttcgatcacgtcctgagatcgcaagaatcctatcgggagaaatatgaatatgtccggcagaatccggtccgggccggtttagtcaagcgcccggaagattggccgtaccagggtgagatccatcgcctggttttgtagcggcggtctccgaccgccgtaacgtcgatcggagatcgactacaaccccggtcgatcggagatcgacgctacaaccgccgtcgatcggagatcgacgctacagcacgggctggaggctctgtgagaattcaagatctccacgttctacccaagttcagtgacgggtggagttatctgtacgtcgagcattgccacgtcgatcaggaagagcgggccattgccgtccacgatcaagccgggaaggtgccggtcccctgtgccaatctggctctcctgatgttgggtccgggcgtctcgattactcacgccgccatctccgtgttggcggaccatgggtgcctggtggcttggtgcggggaggagggagtccgcttctacgccgtgggcatgggcgagacgcgcaacgcggccaacttcctgcatcaggcgaggctgtgggcggaccagggtttccatatgcaggtggtgcgccgcctctatcagttgcgattttcggagaagttcgaccctgccctgaccctccagcaaatccgcggcatggagggcgtgcgggtgcgcgatgcctacgccaaggccgcccaggaagccggcatcacgtggtcgggccgcagctataaacgcgatgagtggagcaaggcggaccctgccaaccgagccttgtccgccgctaactcctgcctatatggaatctgccatgctgccatcgtgtcagcaggtttttcgcccgcactcgggtttatccacaccggcaagatgctgtccttcgtctacgatctcgccgacctgtacaaggctgaaattaccgttccagtggcatttcgcgccgccgccgaggggacgggacagttggaacgccgggtgcgcatcacctgccgcgatcagttcgtatccacgcggcttctggagagaatcatcccggatgtccaaagggcgttgatgctggcaaaagcgacggcctgggacactaccttcgacctggatgccgccgcccccggcttcctctgggacaatctggaaggagaggtcgaaggcggccgcctgctagcccccgaaatcggtgaaacggagcccggcgatggtggtcctgattcttgagcgcgtccccccagggttgcgaggcgagctgactcgctggtttttggaacctcaggcgggagtgttcgtgggacgcgtctccgccatggtccgtgatcggctctgggaaaaagcctgcagccaggccaagggaggcgggtgcttgattatctattcaagcgacaatgaacagggctttcgagtccgaacctggggccaaacagctcgggtcatcgatgacttcgagggcctttttctcgttcgcatgccgcagaatcaataatttagtaagtgttgtccccacgcgcgtgggggtgaaccgccggggctgaaggtttcatgggctggaaagaagttgtccccacgcgcgtgggggtgaaccgatatgctgcatgtgccggggctggcgcttgatgttgtccccacgcgcgtgggggtgaaccggtatcggcgagtggcaaggcgaatccacttaggttgtccccacgcgcgtgggggtgaaccgacctccgagggcgcggggcgcgtgctggcgatgttgtccccacgcgcgtgggggtgaaccggctggggccgacgcgcgcttgtgagactgcgggttgtccccacgcgcgtgggggtgaaccgcgggagaactttgaaggcacggtcctcgatcacgttgtccccacgcgcgtgggggtgaaccggcgcaggttaaggctgaggccaaggccgatgcgttgtccccacgcgcgtgggggtgaaccgtaatggtggcttgcaccttctgctcgaccgatgttgtccccacgcgcgtgggggtgaaccgcagcgggccgtgttggaggagaaggtcgcggagttgtccccacgcgcgtgggggtgaaccgttcccagccgcaggcaggatcaccgtaccccagttgtccccacgcgcgtgggggtgaaccgcaaaacaatatcaagaccaagcacttggatgtgttgtccccacgcgcgtgggggtgaaccgcatcgggcagcacagcggccttataccccaaagttgtccccacgcgcgtgggggtgaaccggcagctcgcggcgattcgcattgccgctgaaagttgtccccacgcgcgtgggggtgaaccggggagtcgtgagtgtagttacaggcagggttcgttgtccccacgcgcgtgggggtgaaccgcttctgcatcttataaagaacgccagtttgaagttgtccccacgcgcgtgggggtgaaccggtacggttcccaggggaattatttcttggggtgttgtccccacgcgcgtgggggtgaaccgatgtagcttgatatgggtgtggtgtcgcagaagttgtccccacgcgcgtgggggtgaaccggcggcgcgcacattccaacctcgtccgtatccgttgtccccacgcgcgtgggggtgaaccggcggacacggcggatgtgacgaatatggagtcgttgtccccacgcgcgtgggggtgaaccggtctctcgaaaaggaaagccaactttcagcttgttgtccccacgcgcgtgggggtgaaccgctcttggcatagagcttagtgagtttgatgaagttgtccccacgcgcgtgggggtgaaccgcctttgccctccgagacgcaacagctccattcgttgtccccacgcgcgtgggggtgaaccggcgagcgcaggtctaagcgaccgcgacaaagagttgtccccacgcgcgtgggggtgaaccggtgatggacacttcctaaaatggcattaagtcgttgtccccacgcgcgtgggggtgaaccgcagcgggtagcgcagacttcgtgcatatcgaagtctgcggcttttgccgccgtgaatcttgaaaagccgcagacctgcaaaaagcgcaggtctgcgctacccactgcctggccatcctggagaattgaaagtccctccagtaaagcggcgaagcgcaggatttccggctgcttcaatcgcttgcgacgctcaccggtcagtagcgcgttggtaatttcgagcccccatacggctggaacaacgagcgtctgcccttcagtgccaccaggaccccgtccgcgtattcgctcgcttcatccggggagcaccaggcaagcgccaccgacgcatgcaccacaacgccgctcaaaatcgccgtccctcaattatcatttcgcggacgctcatggtgtggggctttacgcgcttgcgcaacgcgcgcatgccctcgacaatctcctcgtgcgtcagctttcgatccgagtctcgaaccggcaccagcattgccgccggaacgccgtgtcttgtaatcgtgatcctttcgcaacccatcttgtccagctaaagctccgcatcagctatagtctccctctggccgtgcggcccgccccttgcggcgcaaccaaaccgaagctcaaaacgcgacatcgtcctcgtagcgcgaccggacactgaaggtaaaggttcgccacccgtctcccctgcaaaaccgggtcgcggagtactattgctttgcacagcgggggacgaccgaggcgctacggaagaggttggttcgcgaaactgagcaagagacccctcacccgtcccgctccggctggtggaagcgccggagcgggacacgctcagccccaagggagagggctatggattcagttctacgcgcggtgtccagtcaaagatgtgggacacgctcagccccaagggagagggctatggattcagttctacgc

SEQ ID NO: 640 - DNA, 10044 bp, Artificial Sequence
  Synthetic Oligonucleotide
ccgcgcgtagaactgaatccatagccctctcccttggggctgagcgtgtcccacatctttgactggacaccgcgcgtagaactgaatccatagccctctcccttggggctgagcgtgtcccgctccggcgcttccaccagccggagcgggacgggtgaggggtctcttgctcagtttcgcgaaccaacctcttccgtagcgcctcggtcgtcccccgctgtgcaaagcaatagtactccgcgacccggttttgcaggggagacgggtggcgaacctttaccttcagtgtccggtcgcgctacgaggacgatgtcgcgttttgagcttcggtttggttgcgccgcaaggggcgggccgcacggccagagggagactatagctgatgcggagctttagctggacaagatgggttgcgaaaggatcacgattacaagacacggcgttccggcggcaatgctggtgccggttcgagactcggatcgaaagctgacgcacgaggagattgtcgagggcatgcgcgcgttgcgcaagcgcgtaaagccccacaccatgagcgtccgcgaaatgataattgagggacggcgattttgagcggcgttgtggtgcatgcgtcggtggcgcttgcctggtgctccccggatgaagcgagcgaatacgcggacggggtcctggtggcactgaagggcagacgctcgttgttccagccgtatgggggctcgaaattaccaacgcgctactgaccggtgagcgtcgcaagcgattgaagcagccggaaatcctgcgcttcgccgctttactggagggactttcaattctccaggatggccaggcagtgggtagcgcagacctgcgctttttgcaggtctgcggcttttcaagattcacggcggcaaaagccgcagacttcgatatgcacgaagtctgcgctacccgctgcggttcacccccacgcgcgtggggacaacgacttaatgccattttaggaagtgtccatcaccggttcacccccacgcgcgtggggacaactctttgtcgcggtcgcttagacctgcgctcgccggttcacccccacgcgcgtggggacaacgaatggagctgttgcgtctcggagggcaaaggcggttcacccccacgcgcgtggggacaacttcatcaaactcactaagctctatgccaagagcggttcacccccacgcgcgtggggacaacaagctgaaagttggctttccttttcgagagaccggttcacccccacgcgcgtggggacaacgactccatattcgtcacatccgccgtgtccgccggttcacccccacgcgcgtggggacaacggatacggacgaggttggaatgtgcgcgccgccggttcacccccacgcgcgtggggacaacttctgcgacaccacacccatatcaagctacatcggttcacccccacgcgcgtggggacaacaccccaagaaataattcccctgggaaccgtaccggttcacccccacgcgcgtggggacaacttcaaactggcgttctttataagatgcagaagcggttcacccccacgcgcgtggggacaacgaaccctgcctgtaactacactcacgactccccggttcacccccacgcgcgtggggacaactttcagcggcaatgcgaatcgccgcgagctgccggttcacccccacgcgcgtggggacaactttggggtataaggccgctgtgctgcccgatgcggttcacccccacgcgcgtggggacaacacatccaagtgcttggtcttgatattgttttgcggttcacccccacgcgcgtggggacaactggggtacggtgatcctgcctgcggctgggaacggttcacccccacgcgcgtggggacaactccgcgaccttctcctccaacacggcccgctgcggttcacccccacgcgcgtggggacaacatcggtcgagcagaaggtgcaagccaccattacggttcacccccacgcgcgtggggacaacgcatcggccttggcctcagccttaacctgcgccggttcacccccacgcgcgtggggacaacgtgatcgaggaccgtgccttcaaagttctcccgcggttcacccccacgcgcgtggggacaacccgcagtctcacaagcgcgcgtcggccccagccggttcacccccacgcgcgtggggacaacatcgccagcacgcgccccgcgccctcggaggtcggttcacccccacgcgcgtggggacaacctaagtggattcgccttgccactcgccgataccggttcacccccacgcgcgtggggacaacatcaagcgccagccccggcacatgcagcatatcggttcacccccacgcgcgtggggacaacttctttccagcccatgaaaccttcagccccggcggttcacccccacgcgcgtggggacaacacttactaaattattgattctgcggcatgcgaacgagaaaaaggccctcgaagtcatcgatgacccgagctgtttggccccaggttcggactcgaaagccctgttcattgtcgcttgaatagataatcaagcacccgcctcccttggcctggctgcaggctttttcccagagccgatcacggaccatggcggagacgcgtcccacgaacactcccgcctgaggttccaaaaaccagcgagtcagctcgcctcgcaaccctggggggacgcgctcaagaatcaggaccaccatcgccgggctccgtttcaccgatttcgggggctagcaggcggccgccttcgacctctccttccagattgtcccagaggaagccgggggcggcggcatccaggtcgaaggtagtgtcccaggccgtcgcttttgccagcatcaacgccctttggacatccgggatgattctctccagaagccgcgtggatacgaactgatcgcggcaggtgatgcgcacccggcgttccaactgtcccgtcccctcggcggcggcgcgaaatgccactggaacggtaatttcagccttgtacaggtcggcgagatcgtagacgaaggacagcatcttgccggtgtggataaacccgagtgcgggcgaaaaacctgctgacacgatggcagcatggcagattccatataggcaggagttagcggcggacaaggctcggttggcagggtccgccttgctccactcatcgcgtttatagctgcggcccgaccacgtgatgccggcttcctgggcggccttggcgtaggcatcgcgcacccgcacgccctccatgccgcggatttgctggagggtcagggcagggtcgaacttctccgaaaatcgcaactgatagaggcggcgcaccacctgcatatggaaaccctggtccgcccacagcctcgcctgatgcaggaagttggccgcgttgcgcgtctcgcccatgcccacggcgtagaagcggactccctcctccccgcaccaagccaccaggcacccatggtccgccaacacggagatggcggcgtgagtaatcgagacgcccggacccaacatcaggagagccagattggcacaggggaccggcaccttcccggcttgatcgtggacggcaatggcccgctcttcctgatcgacgtggcaatgctcgacgtacagataactccacccgtcactgaacttgggtagaacgtggagatcttgaattctcacagagcctccagcccgtgctgtagcgtcgatctccgatcgacggcggttgtagcgtcgatctccgatcgaccggggttgtagtcgatctccgatcgacgttacggcggtcggagaccgccgctacaaaaccaggcgatggatctcaccctggtacggccaatcttccgggcgcttgactaaaccggcccggaccggattctgccggacatattcatatttctcccgataggattcttgcgatctcaggacgtgatcgaaaaagtctttctcccaatgtgtgccctcgccctcatcttcccggaggactttggataaatccccgcgcagcgccttgatccatttccctaaaggtggggactcacgacaaaagccggcgaaaagatggatgtgatcaggcatgatcatgaagaacccgacccaaacaagaaaatcgctcgcccgttcggagaatctcgtgaattcccggtgaatcgcaggatttgccaacgagcgtttgcggtcctgcgtacacagcgtgagatagtagattgggctgcccgtatagagccagtccagtcgccgcaagcggggtttgaatttcatattggctcgatctccgctcaagaaatgttgcacggatccccgatcgacaagggattgtagcgtcgatctccgatcgacgtaccggcggtcggagaccgccgctacagcgagagcggcgccacggaaagcaggccgaagccgaaggctttgccgtgcccaacgccgcccacgatggtttctctgaagctgtccgcgtcctcaaccgtaagcgtcccctccaataacgccgagcgaaatttcatgcggccgcccgtcggcctcgggtcggatcggtctcctgcgccccacccgatctgcaagacccggaaagtttccacttggaatccaccttggccgcccttgccggcgaaccattttcgtatcacatcgtcgcggttctggtccttgtcccaggtcagcgccacgcgtttgccttgggccttcgggcggccccgcttatctgtcccctctcgcgtcctcgtaagatcaacgccctctgtgctggtttttatcttcttactcagattggcgcggatacggaagcgaagccgctgacccttctcaaagcgggggtcgaattcctgcacctgagggggagcggctagaggattcagaagaaaacgggcgttgtggaaggcgtagccccagtcaggctttacggcagagttagactggacgaggatcacgacccgcccgcccggttgcgggtcgatgcggaagagaaagccggagtcgccgtcacgtcttacatggacctggttgttggcaaagtccgcgggtttgaaaggcttgaggaagtggggatcgtgggatattcggtctttggatggaaacgccatgcaaaggcgctggtggacgtgatggaggtttcgcagccagagccgcccgggcctggggcggtcggggttggtgccgacgtcaatcaagaggcaggagaggtacatggctattccacctcctcagcggcaaggcgtctgcggcgagtctccagagagcggaacctgataatctcttcccgcttctcgatgatcttgtcgcgccaacggggctcttcggggttgatgcggtccaagcccattccgagcccgtactcgatcatggtcacggcgtcgtggcagaggcggcagagggagcgcaaatcgtcccggagttcgccgccgcccgcgcggcggtacgtgatgtgctgcacggtgctggcgggagacttgcaaaaaacgcacaagtgatagtcgtcgtcgagccgctccttgcgtcggtttttgtactctgtgttcgtgtaatccgctcttgggcgcggaggcggtggcgtgtcgctctgcggtggctgcaccgcaagtgttacgtcgccgtccgctccgacgcgcaactgcctgcggatgacgaatcggggttggtgcgacggcggctcgaatgtcaacggcacgtcgtaccagacgagcgcatcatcgggcgcctcgggctgctcgttggtgggttcccaatcaagcaggcaatcgacgggtcgcggctggggatcgtccttcagccgccgacgccaggggaccgattcgagggcagaaagcaagtcggggaattcacctcccggatgctccagcagagggcggcaaggggggcagcactttctgccgaggtagagtgtccacttgggcgctttgattgccgcctccagttcctcaatgaggtccggttcgccctgaagagcgacgagaaacgaggcgtcgcaaaggtattcgcggcgggtgagcatggctccggacttggttcccccctcggcggtacgcatcggcatccccgcacccaccgtgtgataatcccaccagcggacccctggcgcatcgacgcgtacgcccatgcgcagccgggccagccttggaagccagccttcgcgggcctctggccgggaaacgcccaatgccgcgcaaagcatcccgatgacgccggacttggtcggcgcctcggccgtgcgccgaatgacgaacttggattgctgatcgccccatgcctgaagaggaccttcaagccgaagtagcagcgtctttgcgctcatggggcacctccggattcaggaccactttcttggcctcctgccagtcgtaaccgatttccttgagtacagccgctatcagttcgtcaagagacttaacatctttgtcggcaagcgggacctcacgctgtttctgttttccgtcttcgctctccgtggtggtagccgtcaacggatagcggagatttggagagaaccagaaccgcttcgtcggcttgccgtatcccgtatctatgtcgttcacataatgggcaagctgcgccacgctctgcgagatgatgtcccgttcgccctgaggagccgccggtttggcgaaggcgttggcgtagctgatgggagtgtttctgacttccaccaacatcccgtcaggagggttgtgcgcggcaaaactattttgttttcccgtggggttggccaaggccgcggcgcgaatgaaggcgccgacggtatgggccgccagtttttcgtgattcgtcccgaagggcttcaggtttttgaccagcgtttcccaatgaatggagaaatacttgtagaaacatgccgaaccgaacatggcttcatccacgtaacctgcgcccgcgtcctcgccggggacatcatcggcggcgacatagtagtccacctcgggccgggcctcatgggtggaaatggcatgggcgacttgaagcgatgcctcaaccgtcgtgtctttgaggactcccgtttcaagcatcctgccgctcagcgccatgtccggcacggcgacggattcactgatgagcttgccgaactccgctgccaaggcctcgtccgtttttccgtcgccctgctggaggagttcggccatgcgtgtaatcgcctcttgggtggtgtaaaccagcatcttgctcctctcagcactttcctgttcgtcttctccttcctgtttttttgctttcttaggctccagcccgcaggctttgagaatgttctccgctcgcttcctgacgtctttgcccgtcaccttttccgcaatctctttcgccaactggcgggtgcgaactccgcccagcaattgtctgaactcctcactcatgcggatgctgcgcttaaggcactggctggaaatacgggagcgcaagactccgccaaaaaagcaagtcttgggcgcgcccaggtcatcccggttcaggttggccgggctgtgattctgaatggcgtgaatctggatcaacatgactctcctcctcttggacagttcaaaaattcctcggcccatttgagccgggtggattcgcgttcccagatggaaagatcgttcgtcagccgcacccagtcgagttcgaggtgcttggaagctatgaggtcgattgcccactgtagggcgggttcgatttcagcaagcggcagcgtgagcatcctgtcgaagcgttgctcgaaacgctgccgcgctgttttctcgcccggccgggatcgcccgagctggcgagcgagggtctcgcggggtgaatgctcgaggggccggagggcgtagagtttggcgacaagccaggccacctcacggcgaggcgcccgttgggtttgcgcccgcagcggccaccaaaggcctgcgaaaaggtcaaagccctctaccgattcgtcgagcccttgcccggcatggttgcgcaagagcccgagctcaccgggtttcagtcgagtcagaacttcgacgtactgctccgttggagtcacttgtcccccccttcgtctttgttgtttctctttggccgcatgtccggctttacagcggcaatttcttgtcgcctccggagggaagcggttgtgtagcccggggaaagcgatttggcgacggcggccatcaacggacgatattcctgggccgcctcttcccatgccttaccgccttctgcgatcatctcgtcgatttttccggaaaccgttgcctcggcttggggacgaacagcggcgactgcggagagaatttcaaggtgtcctctgtttcgtgaagtctctcgcggtttggctctgccaacgagcttccagccttccttctgccacgcctggatttcttgcaaactcgcctgaaccttcacgtcgtcgagcgcggccaagaattgaatctcccgctcggctgcttccaggtatttgtcgttctgcactgtcgcaaagctgacgacccacaacttactgttccccttcggcttttccccgcacaggattcccgccacgaccttcgtccacttcccagccgcagcgtcggccgggccaagcgcgctgaaaggcttcacaatctcgtcgccttcgctgatggtgtgcgggtcgttccagattcgtgccagactgccttcgcctgtctttgtgctcccaatacccgcaaagacacattgacgtatcagagcctccctgcgcccgcaggcgatgcagttggactctggtgtctccggagtgtctaaccagacgcgccgcggtacccacgttaatcctatcaataatggaacattgccgtgttgagggaggcttatgtccggattttcccatgtgggcgtgcccaggttcatctccgacgtcttccgccatgagaggcgcagggtttcggaaaggcagtcgcccatcggcacgatgtagatcggcggtttttgattgacgcccgggggcttgccgcgcccggccgacgtagcaaagagcggaaggcgcaacaagcccattgcgcagcatgccggacataagccgtttctgaaatctgtcccatgccggaagtgccagaagtttgtgccggtcggcacttcttgcatcagatagttgacggacagcttcttctcaagtcggttaggcttgcgttggtaaaaccgcttcccatcgccctgaaggttgaaacagtctttgttgtcatcgagtttcttgaaccaatcagagggaaacgaagaaatcgagttcttgtcgtccgggggattccctttgcaccaatagagcaacgcaagcaggaaacgcaggatggccaggcggtccattgggttgctggccgcgatttggcgaatccggcctgcttgcctaagggcctcactaatgcccacgcgaccgctgtgcccatctttccacagaacgggaatccacttttcttcgagcaggttgtactccacggcttcctccttgcctgggcaagaggcgggtggcaggcccgtcgcgccccggggggaccggaccgtccgctgcgtagctaccacaggacaatcatggcgaaggtatacacccgggacgcggcaaaggcaaggcccgaagaccacgacaacggttatcgcgtccgcttagcccacacttcacaggctgcaaggcgcgccgttgactaagcgcagaagctttgatgcctccgcggcgttccgattcggagggaatcttgcgatcgatttcgcgggtggcgcatacgtcccgacgggtttttgtcgggatgtatgcgcccctcggcatgtcgacaccttcatagcctcttgtccatgctcaagatcgaaccatcattccagaaatagaacctcccgccgcagcgcgaccacggccagtcgcccgggtgcttgaccagcactcgtttgacgggattgtcgcgcctgtgattcaatttctcgtctcgcttcttggggctccagatgttcatgtcgtagaacccaccccaacaatatatcgtccctgtggcgcatacatcccgacaaaaagaagctgtgacaaaatcaagaaaatcgaaaaattaagaaattttcttgtcttatctatacagctatgatatattagcctctgaccgcacttccggcggggagg

SEQ ID NO: 641 - DNA, 10044 bp, Artificial Sequence
  Synthetic Oligonucleotide
caccgcgcgtagaactgaatccatagccctctcccttggggctgagcgtgtcccacatctttgactggacaccgcgcgtagaactgaatccatagccctctcccttggggctgagcgtgtcccgctccggcgcttccaccagccggagcgggacgggtgaggggtctcttgctcagtttcgcgaaccaacctcttccgtagcgcctcggtcgtcccccgctgtgcaaagcaatagtactccgcgacccggttttgcaggggagacgggtggcgaacctttaccttcagtgtccggtcgcgctacgaggacgatgtcgcgttttgagcttcggtttggttgcgccgcaaggggcgggccgcacggccagagggagactatagctgatgcggagctttagctggacaagatgggttgcgaaaggatcacgattacaagacacggcgttccggcggcaatgctggtgccggttcgagactcggatcgaaagctgacgcacgaggagattgtcgagggcatgcgcgcgttgcgcaagcgcgtaaagccccacaccatgagcgtccgcgaaatgataattgagggacggcgattttgagcggcgttgtggtgcatgcgtcggtggcgcttgcctggtgctccccggatgaagcgagcgaatacgcggacggggtcctggtggcactgaagggcagacgctcgttgttccagccgtatgggggctcgaaattaccaacgcgctactgaccggtgagcgtcgcaagcgattgaagcagccggaaatcctgcgcttcgccgctttactggagggactttcaattctccaggatggccaggcagtgggtagcgcagacctgcgctttttgcaggtctgcggcttttcaagattcacggcggcaaaagccgcagacttcgatatgcacgaagtctgcgctacccgctgcggttcacccccacgcgcgtggggacaacgacttaatgccattttaggaagtgtccatcaccggttcacccccacgcgcgtggggacaactctttgtcgcggtcgcttagacctgcgctcgccggttcacccccacgcgcgtggggacaacgaatggagctgttgcgtctcggagggcaaaggcggttcacccccacgcgcgtggggacaacttcatcaaactcactaagctctatgccaagagcggttcacccccacgcgcgtggggacaacaagctgaaagttggctttccttttcgagagaccggttcacccccacgcgcgtggggacaacgactccatattcgtcacatccgccgtgtccgccggttcacccccacgcgcgtggggacaacggatacggacgaggttggaatgtgcgcgccgccggttcacccccacgcgcgtggggacaacttctgcgacaccacacccatatcaagctacatcggttcacccccacgcgcgtggggacaacaccccaagaaataattcccctgggaaccgtaccggttcacccccacgcgcgtggggacaacttcaaactggcgttctttataagatgcagaagcggttcacccccacgcgcgtggggacaacgaaccctgcctgtaactacactcacgactccccggttcacccccacgcgcgtggggacaactttcagcggcaatgcgaatcgccgcgagctgccggttcacccccacgcgcgtggggacaactttggggtataaggccgctgtgctgcccgatgcggttcacccccacgcgcgtggggacaacacatccaagtgcttggtcttgatattgttttgcggttcacccccacgcgcgtggggacaactggggtacggtgatcctgcctgcggctgggaacggttcacccccacgcgcgtggggacaactccgcgaccttctcctccaacacggcccgctgcggttcacccccacgcgcgtggggacaacatcggtcgagcagaaggtgcaagccaccattacggttcacccccacgcgcgtggggacaacgcatcggccttggcctcagccttaacctgcgccggttcacccccacgcgcgtggggacaacgtgatcgaggaccgtgccttcaaagttctcccgcggttcacccccacgcgcgtggggacaacccgcagtctcacaagcgcgcgtcggccccagccggttcacccccacgcgcgtggggacaacatcgccagcacgcgccccgcgccctcggaggtcggttcacccccacgcgcgtggggacaacctaagtggattcgccttgccactcgccgataccggttcacccccacgcgcgtggggacaacatcaagcgccagccccggcacatgcagcatatcggttcacccccacgcgcgtggggacaacttctttccagcccatgaaaccttcagccccggcggttcacccccacgcgcgtggggacaacacttactaaattattgattctgcggcatgcgaacgagaaaaaggccctcgaagtcatcgatgacccgagctgtttggccccaggttcggactcgaaagccctgttcattgtcgcttgaatagataatcaagcacccgcctcccttggcctggctgcaggctttttcccagagccgatcacggaccatggcggagacgcgtcccacgaacactcccgcctgaggttccaaaaaccagcgagtcagctcgcctcgcaaccctggggggacgcgctcaagaatcaggaccaccatcgccgggctccgtttcaccgatttcgggggctagcaggcggccgccttcgacctctccttccagattgtcccagaggaagccgggggcggcggcatccaggtcgaaggtagtgtcccaggccgtcgcttttgccagcatcaacgccctttggacatccgggatgattctctccagaagccgcgtggatacgaactgatcgcggcaggtgatgcgcacccggcgttccaactgtcccgtcccctcggcggcggcgcgaaatgccactggaacggtaatttcagccttgtacaggtcggcgagatcgtagacgaaggacagcatcttgccggtgtggataaacccgagtgcgggcgaaaaacctgctgacacgatggcagcatggcagattccatataggcaggagttagcggcggacaaggctcggttggcagggtccgccttgctccactcatcgcgtttatagctgcggcccgaccacgtgatgccggcttcctgggcggccttggcgtaggcatcgcgcacccgcacgccctccatgccgcggatttgctggagggtcagggcagggtcgaacttctccgaaaatcgcaactgatagaggcggcgcaccacctgcatatggaaaccctggtccgcccacagcctcgcctgatgcaggaagttggccgcgttgcgcgtctcgcccatgcccacggcgtagaagcggactccctcctccccgcaccaagccaccaggcacccatggtccgccaacacggagatggcggcgtgagtaatcgagacgcccggacccaacatcaggagagccagattggcacaggggaccggcaccttcccggcttgatcgtggacggcaatggcccgctcttcctgatcgacgtggcaatgctcgacgtacagataactccacccgtcactgaacttgggtagaacgtggagatcttgaattctcacagagcctccagcccgtgctgtagcgtcgatctccgatcgacggcggttgtagcgtcgatctccgatcgaccggggttgtagtcgatctccgatcgacgttacggcggtcggagaccgccgctacaaaaccaggcgatggatctcaccctggtacggccaatcttccgggcgcttgactaaaccggcccggaccggattctgccggacatattcatatttctcccgataggattcttgcgatctcaggacgtgatcgaaaaagtctttctcccaatgtgtgccctcgccctcatcttcccggaggactttggataaatccccgcgcagcgccttgatccatttccctaaaggtggggactcacgacaaaagccggcgaaaagatggatgtgatcaggcatgatcatgaagaacccgacccaaacaagaaaatcgctcgcccgttcggagaatctcgtgaattcccggtgaatcgcaggatttgccaacgagcgtttgcggtcctgcgtacacagcgtgagatagtagattgggctgcccgtatagagccagtccagtcgccgcaagcggggtttgaatttcatattggctcgatctccgctcaagaaatgttgcacggatccccgatcgacaagggattgtagcgtcgatctccgatcgacgtaccggcggtcggagaccgccgctacagcgagagcggcgccacggaaagcaggccgaagccgaaggctttgccgtgcccaacgccgcccacgatggtttctctgaagctgtccgcgtcctcaaccgtaagcgtcccctccaataacgccgagcgaaatttcatgcggccgcccgtcggcctcgggtcggatcggtctcctgcgccccacccgatctgcaagacccggaaagtttccacttggaatccaccttggccgcccttgccggcgaaccattttcgtatcacatcgtcgcggttctggtccttgtcccaggtcagcgccacgcgtttgccttgggccttcgggcggccccgcttatctgtcccctctcgcgtcctcgtaagatcaacgccctctgtgctggtttttatcttcttactcagattggcgcggatacggaagcgaagccgctgacccttctcaaagcgggggtcgaattcctgcacctgagggggagcggctagaggattcagaagaaaacgggcgttgtggaaggcgtagccccagtcaggctttacggcagagttagactggacgaggatcacgacccgcccgcccggttgcgggtcgatgcggaagagaaagccggagtcgccgtcacgtcttacatggacctggttgttggcaaagtccgcgggtttgaaaggcttgaggaagtggggatcgtgggatattcggtctttggatggaaacgccatgcaaaggcgctggtggacgtgatggaggtttcgcagccagagccgcccgggcctggggcggtcggggttggtgccgacgtcaatcaagaggcaggagaggtacatggctattccacctcctcagcggcaaggcgtctgcggcgagtctccagagagcggaacctgataatctcttcccgcttctcgatgatcttgtcgcgccaacggggctcttcggggttgatgcggtccaagcccattccgagcccgtactcgatcatggtcacggcgtcgtggcagaggcggcagagggagcgcaaatcgtcccggagttcgccgccgcccgcgcggcggtacgtgatgtgctgcacggtgctggcgggagacttgcaaaaaacgcacaagtgatagtcgtcgtcgagccgctccttgcgtcggtttttgtactctgtgttcgtgtaatccgctcttgggcgcggaggcggtggcgtgtcgctctgcggtggctgcaccgcaagtgttacgtcgccgtccgctccgacgcgcaactgcctgcggatgacgaatcggggttggtgcgacggcggctcgaatgtcaacggcacgtcgtaccagacgagcgcatcatcgggcgcctcgggctgctcgttggtgggttcccaatcaagcaggcaatcgacgggtcgcggctggggatcgtccttcagccgccgacgccaggggaccgattcgagggcagaaagcaagtcggggaattcacctcccggatgctccagcagagggcggcaaggggggcagcactttctgccgaggtagagtgtccacttgggcgctttgattgccgcctccagttcctcaatgaggtccggttcgccctgaagagcgacgagaaacgaggcgtcgcaaaggtattcgcggcgggtgagcatggctccggacttggttcccccctcggcggtacgcatcggcatccccgcacccaccgtgtgataatcccaccagcggacccctggcgcatcgacgcgtacgcccatgcgcagccgggccagccttggaagccagccttcgcgggcctctggccgggaaacgcccaatgccgcgcaaagcatcccgatgacgccggacttggtcggcgcctcggccgtgcgccgaatgacgaacttggattgctgatcgccccatgcctgaagaggaccttcaagccgaagtagcagcgtctttgcgctcatggggcacctccggattcaggaccactttcttggcctcctgccagtcgtaaccgatttccttgagtacagccgctatcagttcgtcaagagacttaacatctttgtcggcaagcgggacctcacgctgtttctgttttccgtcttcgctctccgtggtggtagccgtcaacggatagcggagatttggagagaaccagaaccgcttcgtcggcttgccgtatcccgtatctatgtcgttcacataatgggcaagctgcgccacgctctgcgagatgatgtcccgttcgccctgaggagccgccggtttggcgaaggcgttggcgtagctgatgggagtgtttctgacttccaccaacatcccgtcaggagggttgtgcgcggcaaaactattttgttttcccgtggggttggccaaggccgcggcgcgaatgaaggcgccgacggtatgggccgccagtttttcgtgattcgtcccgaagggcttcaggtttttgaccagcgtttcccaatgaatggagaaatacttgtagaaacatgccgaaccgaacatggcttcatccacgtaacctgcgcccgcgtcctcgccggggacatcatcggcggcgacatagtagtccacctcgggccgggcctcatgggtggaaatggcatgggcgacttgaagcgatgcctcaaccgtcgtgtctttgaggactcccgtttcaagcatcctgccgctcagcgccatgtccggcacggcgacggattcactgatgagcttgccgaactccgctgccaaggcctcgtccgtttttccgtcgccctgctggaggagttcggccatgcgtgtaatcgcctcttgggtggtgtaaaccagcatcttgctcctctcagcactttcctgttcgtcttctccttcctgtttttttgctttcttaggctccagcccgcaggctttgagaatgttctccgctcgcttcctgacgtctttgcccgtcaccttttccgcaatctctttcgccaactggcgggtgcgaactccgcccagcaattgtctgaactcctcactcatgcggatgctgcgcttaaggcactggctggaaatacgggagcgcaagactccgccaaaaaagcaagtcttgggcgcgcccaggtcatcccggttcaggttggccgggctgtgattctgaatggcgtgaatctggatcaacatgactctcctcctcttggacagttcaaaaattcctcggcccatttgagccgggtggattcgcgttcccagatggaaagatcgttcgtcagccgcacccagtcgagttcgaggtgcttggaagctatgaggtcgattgcccactgtagggcgggttcgatttcagcaagcggcagcgtgagcatcctgtcgaagcgttgctcgaaacgctgccgcgctgttttctcgcccggccgggatcgcccgagctggcgagcgagggtctcgcggggtgaatgctcgaggggccggagggcgtagagtttggcgacaagccaggccacctcacggcgaggcgcccgttgggtttgcgcccgcagcggccaccaaaggcctgcgaaaaggtcaaagccctctaccgattcgtcgagcccttgcccggcatggttgcgcaagagcccgagctcaccgggtttcagtcgagtcagaacttcgacgtactgctccgttggagtcacttgtcccccccttcgtctttgttgtttctctttggccgcatgtccggctttacagcggcaatttcttgtcgcctccggagggaagcggttgtgtagcccggggaaagcgatttggcgacggcggccatcaacggacgatattcctgggccgcctcttcccatgccttaccgccttctgcgatcatctcgtcgatttttccggaaaccgttgcctcggcttggggacgaacagcggcgactgcggagagaatttcaaggtgtcctctgtttcgtgaagtctctcgcggtttggctctgccaacgagcttccagccttccttctgccacgcctggatttcttgcaaactcgcctgaaccttcacgtcgtcgagcgcggccaagaattgaatctcccgctcggctgcttccaggtatttgtcgttctgcactgtcgcaaagctgacgacccacaacttactgttccccttcggcttttccccgcacaggattcccgccacgaccttcgtccacttcccagccgcagcgtcggccgggccaagcgcgctgaaaggcttcacaatctcgtcgccttcgctgatggtgtgcgggtcgttccagattcgtgccagactgccttcgcctgtctttgtgctcccaatacccgcaaagacacattgacgtatcagagcctccctgcgcccgcaggcgatgcagttggactctggtgtctccggagtgtctaaccagacgcgccgcggtacccacgttaatcctatcaataatggaacattgccgtgttgagggaggcttatgtccggattttcccatgtgggcgtgcccaggttcatctccgacgtcttccgccatgagaggcgcagggtttcggaaaggcagtcgcccatcggcacgatgtagatcggcggtttttgattgacgcccgggggcttgccgcgcccggccgacgtagcaaagagcggaaggcgcaacaagcccattgcgcagcatgccggacataagccgtttctgaaatctgtcccatgccggaagtgccagaagtttgtgccggtcggcacttcttgcatcagatagttgacggacagcttcttctcaagtcggttaggcttgcgttggtaaaaccgcttcccatcgccctgaaggttgaaacagtctttgttgtcatcgagtttcttgaaccaatcagagggaaacgaagaaatcgagttcttgtcgtccgggggattccctttgcaccaatagagcaacgcaagcaggaaacgcaggatggccaggcggtccattgggttgctggccgcgatttggcgaatccggcctgcttgcctaagggcctcactaatgcccacgcgaccgctgtgcccatctttccacagaacgggaatccacttttcttcgagcaggttgtactccacggcttcctccttgcctgggcaagaggcgggtggcaggcccgtcgcgccccggggggaccggaccgtccgctgcgtagctaccacaggacaatcatggcgaaggtatacacccgggacgcggcaaaggcaaggcccgaagaccacgacaacggttatcgcgtccgcttagcccacacttcacaggctgcaaggcgcgccgttgactaagcgcagaagctttgatgcctccgcggcgttccgattcggagggaatcttgcgatcgatttcgcgggtggcgcatacgtcccgacgggtttttgtcgggatgtatgcgcccctcggcatgtcgacaccttcatagcctcttgtccatgctcaagatcgaaccatcattccagaaatagaacctcccgccgcagcgcgaccacggccagtcgcccgggtgcttgaccagcactcgtttgacgggattgtcgcgcctgtgattcaatttctcgtctcgcttcttggggctccagatgttcatgtcgtagaacccaccccaacaatatatcgtccctgtggcgcatacatcccgacaaaaagaagctgtgaaaaaatcaagaaaatcgaaaaattaagaaattttcttgtcttagctatacagctatgatatattagcctctgaccgcacttccggcgggga

SEQ ID NO: 642 - DNA, 10044 bp, Artificial Sequence; identical to SEQ ID NO: 641
  Synthetic Oligonucleotide

SEQ ID NO: 643 - DNA, 10044 bp, Artificial Sequence; identical to SEQ ID NO: 641
  Synthetic Oligonucleotide

SEQ ID NO: 644 - DNA, 10044 bp, Artificial Sequence; identical to SEQ ID NO: 641
  Synthetic Oligonucleotide

SEQ ID NO: 645 - DNA, 10044 bp, Artificial Sequence; identical to SEQ ID NO: 641
  Synthetic Oligonucleotide

SEQ ID NO: 646 - DNA, 10044 bp, Artificial Sequence; identical to SEQ ID NO: 641
  Synthetic Oligonucleotide

SEQ ID NO: 647 - DNA, 10044 bp, Artificial Sequence; identical to SEQ ID NO: 641
  Synthetic Oligonucleotide

SEQ ID NO: 648 - DNA, 10044 bp, Artificial Sequence; identical to SEQ ID NO: 641
  Synthetic Oligonucleotide

SEQ ID NO: 649 - DNA, 10044 bp, Artificial Sequence
  Synthetic Oligonucleotide
caccgcgcgtagaactgaatccatagccctctcccttggggctgagcgtgtcccacatctttgactggacaccgcgcgtagaactgaatccatagccctctcccttggggctgagcgtgtcccgctccggcgcttccaccagccggagcgggacgggtgaggggtctcttgctcagtttcgcgaaccaacctcttccgtagcgcctcggtcgtcccccgctgtgcaaagcaatagtactccgcgacccggttttgcaggggagacgggtggcgaacctttaccttcagtgtccggtcgcgctacgaggacgatgtcgcgttttgagcttcggtttggttgcgccgcaaggggcgggccgcacggccagagggagactatagctgatgcggagctttagctggacaagatgggttgcgaaaggatcacgattacaagacacggcgttccggcggcaatgctggtgccggttcgagactcggatcgaaagctgacgcacgaggagattgtcgagggcatgcgcgcgttgcgcaagcgcgtaaagccccacaccatgagcgtccgcgaaatgataattgagggacggcgattttgagcggcgttgtggtgcatgcgtcggtggcgcttgcctggtgctccccggatgaagcgagcgaatacgcggacggggtcctggtggcactgaagggcagacgctcgttgttccagccgtatgggggctcgaaattaccaacgcgctactgaccggtgagcgtcgcaagcgattgaagcagccggaaatcctgcgcttcgccgctttactggagggactttcaattctccaggatggccaggcagtgggtagcgcagacctgcgctttttgcaggtctgcggcttttcaagattcacggcggcaaaagccgcagacttcgatatgcacgaagtctgcgctacccgctgcggttcacccccacgcgcgtggggacaacgacttaatgccattttaggaagtgtccatcaccggttcacccccacgcgcgtggggacaactctttgtcgcggtcgcttagacctgcgctcgccggttcacccccacgcgcgtggggacaacgaatggagctgttgcgtctcggagggcaaaggcggttcacccccacgcgcgtggggacaacttcatcaaactcactaagctctatgccaagagcggttcacccccacgcgcgtggggacaacaagctgaaagttggctttccttttcgagagaccggttcacccccacgcgcgtggggacaacgactccatattcgtcacatccgccgtgtccgccggttcacccccacgcgcgtggggacaacggatacggacgaggttggaatgtgcgcgccgccggttcacccccacgcgcgtggggacaacttctgcgacaccacacccatatcaagctacatcggttcacccccacgcgcgtggggacaacaccccaagaaataattcccctgggaaccgtaccggttcacccccacgcgcgtggggacaacttcaaactggcgttctttataagatgcagaagcggttcacccccacgcgcgtggggacaacgaaccctgcctgtaactacactcacgactccccggttcacccccacgcgcgtggggacaactttcagcggcaatgcgaatcgccgcgagctgccggttcacccccacgcgcgtggggacaactttggggtataaggccgctgtgctgcccgatgcggttcacccccacgcgcgtggggacaacacatccaagtgcttggtcttgatattgttttgcggttcacccccacgcgcgtggggacaactggggtacggtgatcctgcctgcggctgggaacggttcacccccacgcgcgtggggacaactccgcgaccttctcctccaacacggcccgctgcggttcacccccacgcgcgtggggacaacatcggtcgagcagaaggtgcaagccaccattacggttcacccccacgcgcgtggggacaacgcatcggccttggcctcagccttaacctgcgccggttcacccccacgcgcgtggggacaacgtgatcgaggaccgtgccttcaaagttctcccgcggttcacccccacgcgcgtggggacaacccgcagtctcacaagcgcgcgtcggccccagccggttcacccccacgcgcgtggggacaacatcgccagcacgcgccccgcgccctcggaggtcggttcacccccacgcgcgtggggacaacctaagtggattcgccttgccactcgccgataccggttcacccccacgcgcgtggggacaacatcaagcgccagccccggcacatgcagcatatcggttcacccccacgcgcgtggggacaacttctttccagcccatgaaaccttcagccccggcggttcacccccacgcgcgtggggacaacacttactaaattattgattctgcggcatgcgaacgagaaaaaggccctcgaagtcatcgatgacccgagctgtttggccccaggttcggactcgaaagccctgttcattgtcgcttgaatagataatcaagcacccgcctcccttggcctggctgcaggctttttcccagagccgatcacggaccatggcggagacgcgtcccacgaacactcccgcctgaggttccaaaaaccagcgagtcagctcgcctcgcaaccctggggggacgcgctcaagaatcaggaccaccatcgccgggctccgtttcaccgatttcgggggctagcaggcggccgccttcgacctctccttccagattgtcccagaggaagccgggggcggcggcatccaggtcgaaggtagtgtcccaggccgtcgcttttgccagcatcaacgccctttggacatccgggatgattctctccagaagccgcgtggatacgaactgatcgcggcaggtgatgcgcacccggcgttccaactgtcccgtcccctcggcggcggcgcgaaatgccactggaacggtaatttcagccttgtacaggtcggcgagatcgtagacgaaggacagcatcttgccggtgtggataaacccgagtgcgggcgaaaaacctgctgacacgatggcagcatggcagattccatataggcaggagttagcggcggacaaggctcggttggcagggtccgccttgctccactcatcgcgtttatagctgcggcccgaccacgtgatgccggcttcctgggcggccttggcgtaggcatcgcgcacccgcacgccctccatgccgcggatttgctggagggtcagggcagggtcgaacttctccgaaaatcgcaactgatagaggcggcgcaccacctgcatatggaaaccctggtccgcccacagcctcgcctgatgcaggaagttggccgcgttgcgcgtctcgcccatgcccacggcgtagaagcggactccctcctccccgcaccaagccaccaggcacccatggtccgccaacacggagatggcggcgtgagtaatcgagacgcccggacccaacatcaggagagccagattggcacaggggaccggcaccttcccggcttgatcgtggacggcaatggcccgctcttcctgatcgacgtggcaatgctcgacgtacagataactccacccgtcactgaacttgggtagaacgtggagatcttgaattctcacagagcctccagcccgtgctgtagcgtcgatctccgatcgacggcggttgtagcgtcgatctccgatcgaccggggttgtagtcgatctccgatcgacgttacggcggtcggagaccgccgctacaaaaccaggcgatggatctcaccctggtacggccaatcttccgggcgcttgactaaaccggcccggaccggattctgccggacatattcatatttctcccgataggattcttgcgatctcaggacgtgatcgaaaaagtctttctcccaatgtgtgccctcgccctcatcttcccggaggactttggataaatccccgcgcagcgccttgatccatttccctaaaggtggggactcacgacaaaagccggcgaaaagatggatgtgatcaggcatgatcatgaagaacccgacccaaacaagaaaatcgctcgcccgttcggagaatctcgtgaattcccggtgaatcgcaggatttgccaacgagcgtttgcggtcctgcgtacacagcgtgagatagtagattgggctgcccgtatagagccagtccagtcgccgcaagcggggtttgaatttcatattggctcgatctccgctcaagaaatgttgcacggatccccgatcgacaagggattgtagcgtcgatctccgatcgacgtaccggcggtcggagaccgccgctacagcgagagcggcgccacggaaagcaggccgaagccgaaggctttgccgtgcccaacgccgcccacgatggtttctctgaagctgtccgcgtcctcaaccgtaagcgtcccctccaataacgccgagcgaaatttcatgcggccgcccgtcggcctcgggtcggatcggtctcctgcgccccacccgatctgcaagacccggaaagtttccacttggaatccaccttggccgcccttgccggcgaaccattttcgtatcacatcgtcgcggttctggtccttgtcccaggtcagcgccacgcgtttgccttgggccttcgggcggccccgcttatctgtcccctctcgcgtcctcgtaagatcaacgccctctgtgctggtttttatcttcttactcagattggcgcggatacggaagcgaagccgctgacccttctcaaagcgggggtcgaattcctgcacctgagggggagcggctagaggattcagaagaaaacgggcgttgtggaaggcgtagccccagtcaggctttacggcagagttagactggacgaggatcacgacccgcccgcccggttgcgggtcgatgcggaagagaaagccggagtcgccgtcacgtcttacatggacctggttgttggcaaagtccgcgggtttgaaaggcttgaggaagtggggatcgtgggatattcggtctttggatggaaacgccatgcaaaggcgctggtggacgtgatggaggtttcgcagccagagccgcccgggcctggggcggtcggggttggtgccgacgtcaatcaagaggcaggagaggtacatggctattccacctcctcagcggcaaggcgtctgcggcgagtctccagagagcggaacctgataatctcttcccgcttctcgatgatcttgtcgcgccaacggggctcttcggggttgatgcggtccaagcccattccgagcccgtactcgatcatggtcacggcgtcgtggcagaggcggcagagggagcgcaaatcgtcccggagttcgccgccgcccgcgcggcggtacgtgatgtgctgcacggtgctggcgggagacttgcaaaaaacgcacaagtgatagtcgtcgtcgagccgctccttgcgtcggtttttgtactctgtgttcgtgtaatccgctcttgggcgcggaggcggtggcgtgtcgctctgcggtggctgcaccgcaagtgttacgtcgccgtccgctccgacgcgcaactgcctgcggatgacgaatcggggttggtgcgacggcggctcgaatgtcaacggcacgtcgtaccagacgagcgcatcatcgggcgcctcgggctgctcgttggtgggttcccaatcaagcaggcaatcgacgggtcgcggctggggatcgtccttcagccgccgacgccaggggaccgattcgagggcagaaagcaagtcggggaattcacctcccggatgctccagcagagggcggcaaggggggcagcactttctgccgaggtagagtgtccacttgggcgctttgattgccgcctccagttcctcaatgaggtccggttcgccctgaagagcgacgagaaacgaggcgtcgcaaaggtattcgcggcgggtgagcatggctccggacttggttcccccctcggcggtacgcatcggcatccccgcacccaccgtgtgataatcccaccagcggacccctggcgcatcgacgcgtacgcccatgcgcagccgggccagccttggaagccagccttcgcgggcctctggccgggaaacgcccaatgccgcgcaaagcatcccgatgacgccggacttggtcggcgcctcggccgtgcgccgaatgacgaacttggattgctgatcgccccatgcctgaagaggaccttcaagccgaagtagcagcgtctttgcgctcatggggcacctccggattcaggaccactttcttggcctcctgccagtcgtaaccgatttccttgagtacagccgctatcagttcgtcaagagacttaacatctttgtcggcaagcgggacctcacgctgtttctgttttccgtcttcgctctccgtggtggtagccgtcaacggatagcggagatttggagagaaccagaaccgcttcgtcggcttgccgtatcccgtatctatgtcgttcacataatgggcaagctgcgccacgctctgcgagatgatgtcccgttcgccctgaggagccgccggtttggcgaaggcgttggcgtagctgatgggagtgtttctgacttccaccaacatcccgtcaggagggttgtgcgcggcaaaactattttgttttcccgtggggttggccaaggccgcggcgcgaatgaaggcgccgacggtatgggccgccagtttttcgtgattcgtcccgaagggcttcaggtttttgaccagcgtttcccaatgaatggagaaatacttgtagaaacatgccgaaccgaacatggcttcatccacgtaacctgcgcccgcgtcctcgccggggacatcatcggcggcgacatagtagtccacctcgggccgggcctcatgggtggaaatggcatgggcgacttgaagcgatgcctcaaccgtcgtgtctttgaggactcccgtttcaagcatcctgccgctcagcgccatgtccggcacggcgacggattcactgatgagcttgccgaactccgctgccaaggcctcgtccgtttttccgtcgccctgctggaggagttcggccatgcgtgtaatcgcctcttgggtggtgtaaaccagcatcttgctcctctcagcactttcctgttcgtcttctccttcctgtttttttgctttcttaggctccagcccgcaggctttgagaatgttctccgctcgcttcctgacgtctttgcccgtcaccttttccgcaatctctttcgccaactggcgggtgcgaactccgcccagcaattgtctgaactcctcactcatgcggatgctgcgcttaaggcactggctggaaatacgggagcgcaagactccgccaaaaaagcaagtcttgggcgcgcccaggtcatcccggttcaggttggccgggctgtgattctgaatggcgtgaatctggatcaacatgactctcctcctcttggacagttcaaaaattcctcggcccatttgagccgggtggattcgcgttcccagatggaaagatcgttcgtcagccgcacccagtcgagttcgaggtgcttggaagctatgaggtcgattgcccactgtagggcgggttcgatttcagcaagcggcagcgtgagcatcctgtcgaagcgttgctcgaaacgctgccgcgctgttttctcgcccggccgggatcgcccgagctggcgagcgagggtctcgcggggtgaatgctcgaggggccggagggcgtagagtttggcgacaagccaggccacctcacggcgaggcgcccgttgggtttgcgcccgcagcggccaccaaaggcctgcgaaaaggtcaaagccctctaccgattcgtcgagcccttgcccggcatggttgcgcaagagcccgagctcaccgggtttcagtcgagtcagaacttcgacgtactgctccgttggagtcacttgtcccccccttcgtctttgttgtttctctttggccgcatgtccggctttacagcggcaatttcttgtcgcctccggagggaagcggttgtgtagcccggggaaagcgatttggcgacggcggccatcaacggacgatattcctgggccgcctcttcccatgccttaccgccttctgcgatcatctcgtcgatttttccggaaaccgttgcctcggcttggggacgaacagcggcgactgcggagagaatttcaaggtgtcctctgtttcgtgaagtctctcgcggtttggctctgccaacgagcttccagccttccttctgccacgcctggatttcttgcaaactcgcctgaaccttcacgtcgtcgagcgcggccaagaattgaatctcccgctcggctgcttccaggtatttgtcgttctgcactgtcgcaaagctgacgacccacaacttactgttccccttcggcttttccccgcacaggattcccgccacgaccttcgtccacttcccagccgcagcgtcggccgggccaagcgcgctgaaaggcttcacaatctcgtcgccttcgctgatggtgtgcgggtcgttccagattcgtgccagactgccttcgcctgtctttgtgctcccaatacccgcaaagacacattgacgtatcagagcctccctgcgcccgcaggcgatgcagttggactctggtgtctccggagtgtctaaccagacgcgccgcggtacccacgttaatcctatcaataatggaacattgccgtgttgagggaggcttatgtccggattttcccatgtgggcgtgcccaggttcatctccgacgtcttccgccatgagaggcgcagggtttcggaaaggcagtcgcccatcggcacgatgtagatcggcggtttttgattgacgcccgggggcttgccgcgcccggccgacgtagcaaagagcggaaggcgcaacaagcccattgcgcagcatgccggacataagccgtttctgaaatctgtcccatgccggaagtgccagaagtttgtgccggtcggcacttcttgcatcagatagttgacggacagcttcttctcaagtcggttaggcttgcgttggtaaaaccgcttcccatcgccctgaaggttgaaacagtctttgttgtcatcgagtttcttgaaccaatcagagggaaacgaagaaatcgagttcttgtcgtccgggggattccctttgcaccaatagagcaacgcaagcaggaaacgcaggatggccaggcggtccattgggttgctggccgcgatttggcgaatccggcctgcttgcctaagggcctcactaatgcccacgcgaccgctgtgcccatctttccacagaacgggaatccacttttcttcgagcaggttgtactccacggcttcctccttgcctgggcaagaggcgggtggcaggcccgtcgcgccccggggggaccggaccgtccgctgcgtagctaccacaggacaatcatggcgaaggtatacacccgggacgcggcaaaggcaaggcccgaagaccacgacaacggttatcgcgtccgcttagcccacacttcacaggctgcaaggcgcgccgttgactaagcgcagaagctttgatgcctccgcggcgttccgattcggagggaatcttgcgatcgatttcgcgggtggcgcatacgtcccgacgggtttttgtcgggatgtatgcgcccctcggcatgtcgacaccttcatagcctcttgtccatgctcaagatcgaaccatcattccagaaatagaacctcccgccgcagcgcgaccgcggccagtcgcccgggtgcttgaccagcactcgtttgacgggattgtcgcgcctgtgattcaatttctcgtctcgcttcttggggctccagatgttcatgtcgtagaacccaccccaacaatatatcgtccctgtggcgcatacatcccgacaaaaagaagctgtgaaaaaatcaagaaaatcgaaaaattaagaaattttcttgtcttagctatacagctatgatatattagcctctgaccgcacttccggcgggga

SEQ ID NO: 650 - DNA, 10044 bp, Artificial Sequence; identical to SEQ ID NO: 641
  Synthetic Oligonucleotide

SEQ ID NO: 651 - DNA, 10044 bp, Artificial Sequence; identical to SEQ ID NO: 641
  Synthetic Oligonucleotide

SEQ ID NO: 652 - DNA, 10044 bp, Artificial Sequence; identical to SEQ ID NO: 641
  Synthetic Oligonucleotide

SEQ ID NO: 653 - DNA, 10044 bp, Artificial Sequence; identical to SEQ ID NO: 641
  Synthetic Oligonucleotide

SEQ ID NO: 654 - DNA, 10044 bp, Artificial Sequence; identical to SEQ ID NO: 641
  Synthetic Oligonucleotide

SEQ ID NO: 655 - DNA, 10044 bp, Artificial Sequence; identical to SEQ ID NO: 641
  Synthetic Oligonucleotide

SEQ ID NO: 656 - DNA, 10044 bp, Artificial Sequence; identical to SEQ ID NO: 641
  Synthetic Oligonucleotide

SEQ ID NO: 657 - DNA, 10044 bp, Artificial Sequence
  Synthetic Oligonucleotide
caccgcgcgtagaactgaatccatagccctctcccttggggctgagcgtgtcccacatctttgactggacaccgcgcgtagaactgaatccatagccctctcccttggggctgagcgtgtcccgctccggcgcttccaccagccggagcgggacgggtgaggggtctcttgctcagtttcgcgaaccaacctcttccgtagcgcctcggtcgtcccccgctgtgcaaagcaatagtactccgcgacccggttttgcaggggagacgggtggcgaacctttaccttcagtgtccggtcgcgctacgaggacgatgtcgcgttttgagcttcggtttggttgcgccgcaaggggcgggccgcacggccagagggagactatagctgatgcggagctttagctggacaagatgggttgcgaaaggatcacgattacaagacacggcgttccggcggcaatgctggtgccggttcgagactcggatcgaaagctgacgcacgaggagattgtcgagggcatgcgcgcgttgcgcaagcgcgtaaagccccacaccatgagcgtccgcgaaatgataattgagggacggcgattttgagcggcgttgtggtgcatgcgtcggtggcgcttgcctggtgctccccggatgaagcgagcgaatacgcggacggggtcctggtggcactgaagggcagacgctcgttgttccagccgtatgggggctcgaaattaccaacgcgctactgaccggtgagcgtcgcaagcgattgaagcagccggaaatcctgcgcttcgccgctttactggagggactttcaattctccaggatggccaggcagtgggtagcgcagacctgcgctttttgcaggtctgcggcttttcaagattcacggcggcaaaagccgcagacttcgatatgcacgaagtctgcgctacccgctgcggttcacccccacgcgcgtggggacaacgacttaatgccattttaggaagtgtccatcaccggttcacccccacgcgcgtggggacaactctttgtcgcggtcgcttagacctgcgctcgccggttcacccccacgcgcgtggggacaacgaatggagctgttgcgtctcggagggcaaaggcggttcacccccacgcgcgtggggacaacttcatcaaactcactaagctctatgccaagagcggttcacccccacgcgcgtggggacaacaagctgaaagttggctttccttttcgagagaccggttcacccccacgcgcgtggggacaacgactccatattcgtcacatccgccgtgtccgccggttcacccccacgcgcgtggggacaacggatacggacgaggttggaatgtgcgcgccgccggttcacccccacgcgcgtggggacaacttctgcgacaccacacccatatcaagctacatcggttcacccccacgcgcgtggggacaacaccccaagaaataattcccctgggaaccgtaccggttcacccccacgcgcgtggggacaacttcaaactggcgttctttataagatgcagaagcggttcacccccacgcgcgtggggacaacgaaccctgcctgtaactacactcacgactccccggttcacccccacgcgcgtggggacaactttcagcggcaatgcgaatcgccgcgagctgccggttcacccccacgcgcgtggggacaactttggggtataaggccgctgtgctgcccgatgcggttcacccccacgcgcgtggggacaacacatccaagtgcttggtcttgatattgttttgcggttcacccccacgcgcgtggggacaactggggtacggtgatcctgcctgcggctgggaacggttcacccccacgcgcgtggggacaactccgcgaccttctcctccaacacggcccgctgcggttcacccccacgcgcgtggggacaacatcggtcgagcagaaggtgcaagccaccattacggttcacccccacgcgcgtggggacaacgcatcggccttggcctcagccttaacctgcgccggttcacccccacgcgcgtggggacaacgtgatcgaggaccgtgccttcaaagttctcccgcggttcacccccacgcgcgtggggacaacccgcagtctcacaagcgcgcgtcggccccagccggttcacccccacgcgcgtggggacaacatcgccagcacgcgccccgcgccctcggaggtcggttcacccccacgcgcgtggggacaacctaagtggattcgccttgccactcgccgataccggttcacccccacgcgcgtggggacaacatcaagcgccagccccggcacatgcagcatatcggttcacccccacgcgcgtggggacaacttctttccagcccatgaaaccttcagccccggcggttcacccccacgcgcgtggggacaacacttactaaattattgattctgcggcatgcgaacgagaaaaaggccctcgaagtcatcgatgacccgagctgtttggccccaggttcggactcgaaagccctgttcattgtcgcttgaatagataatcaagcacccgcctcccttggcctggctgcaggctttttcccagagccgatcacggaccatggcggagacgcgtcccacgaacactcccgcctgaggttccaaaaaccagcgagtcagctcgcctcgcaaccctggggggacgcgctcaagaatcaggaccaccatcgccgggctccgtttcaccgatttcaggggctagcaggcggccgccttcgacctctccttccagattgtcccagaggaagccgggggcggcggcatccaggtcgaaggtagtgtcccaggccgtcgcttttgccagcatcaacgccctttggacatccgggatgattctctccagaagccgcgtggatacgaactgatcgcggcaggtgatgcgcacccggcgttccaactgtcccgtcccctcggcggcggcgcgaaatgccactggaacggtaatttcagccttgtacaggtcggcgagatcgtagacgaaggacagcatcttgccggtgtggataaacccgagtgcgggcgaaaaacctgctgacacgatggcagcatggcagattccatataggcaggagttagcggcggacaaggctcggttggcagggtccgccttgctccactcatcgcgtttatagctgcggcccgaccacgtgatgccggcttcctgggcggccttggcgtaggcatcgcgcacccgcacgccctccatgccgcggatttgctggagggtcagggcagggtcgaacttctccgaaaatcgcaactgatagaggcggcgcaccacctgcatatggaaaccctggtccgcccacagcctcgcctgatgcaggaagttggccgcgttgcgcgtctcgcccatgcccacggcgtagaagcggactccctcctccccgcaccaagccaccaggcacccatggtccgccaacacggagatggcggcgtgagtaatcgagacgcccggacccaacatcaggagagccagattggcacaggggaccggcaccttcccggcttgatcgtggacggcaatggcccgctcttcctgatcgacgtggcaatgctcgacgtacagataactccacccgtcactgaacttgggtagaacgtggagatcttgaattctcacagagcctccagcccgtgctgtagcgtcgatctccgatcgacggcggttgtagcgtcgatctccgatcgaccggggttgtagtcgatctccgatcgacgttacggcggtcggagaccgccgctacaaaaccaggcgatggatctcaccctggtacggccaatcttccgggcgcttgactaaaccggcccggaccggattctgccggacatattcatatttctcccgataggattcttgcgatctcaggacgtgatcgaaaaagtctttctcccaatgtgtgccctcgccctcatcttcccggaggactttggataaatccccgcgcagcgccttgatccatttccctaaaggtggggactcacgacaaaagccggcgaaaagatggatgtgatcaggcatgatcatgaagaacccgacccaaacaagaaaatcgctcgcccgttcggagaatctcgtgaattcccggtgaatcgcaggatttgccaacgagcgtttgcggtcctgcgtacacagcgtgagatagtagattgggctgcccgtatagagccagtccagtcgccgcaagcggggtttgaatttcatattggctcgatctccgctcaagaaatgttgcacggatccccgatcgacaagggattgtagcgtcgatctccgatcgacgtaccggcggtcggagaccgccgctacagcgagagcggcgccacggaaagcaggccgaagccgaaggctttgccgtgcccaacgccgcccacgatggtttctctgaagctgtccgcgtcctcaaccgtaagcgtcccctccaataacgccgagcgaaatttcatgcggccgcccgtcggcctcgggtcggatcggtctcctgcgccccacccgatctgcaagacccggaaagtttccacttggaatccaccttggccgcccttgccggcgaaccattttcgtatcacatcgtcgcggttctggtccttgtcccaggtcagcgccacgcgtttgccttgggccttcgggcggccccgcttatctgtcccctctcgcgtcctcgtaagatcaacgccctctgtgctggtttttatcttcttactcagattggcgcggatacggaagcgaagccgctgacccttctcaaagcgggggtcgaattcctgcacctgagggggagcggctagaggattcagaagaaaacgggcgttgtggaaggcgtagccccagtcaggctttacggcagagttagactggacgaggatcacgacccgcccgcccggttgcgggtcgatgcggaagagaaagccggagtcgccgtcacgtcttacatggacctggttgttggcaaagtccgcgggtttgaaaggcttgaggaagtggggatcgtgggatattcggtctttggatggaaacgccatgcaaaggcgctggtggacgtgatggaggtttcgcagccagagccgcccgggcctggggcggtcggggttggtgccgacgtcaatcaagaggcaggagaggtacatggctattccacctcctcagcggcaaggcgtctgcggcgagtctccagagagcggaacctgataatctcttcccgcttctcgatgatcttgtcgcgccaacggggctcttcggggttgatgcggtccaagcccattccgagcccgtactcgatcatggtcacggcgtcgtggcagaggcggcagagggagcgcaaatcgtcccggagttcgccgccgcccgcgcggcggtacgtgatgtgctgcacggtgctggcgggagacttgcaaaaaacgcacaagtgatagtcgtcgtcgagccgctccttgcgtcggtttttgtactctgtgttcgtgtaatccgctcttgggcgcggaggcggtggcgtgtcgctctgcggtggctgcaccgcaagtgttacgtcgccgtccgctccgacgcgcaactgcctgcggatgacgaatcggggttggtgcgacggcggctcgaatgtcaacggcacgtcgtaccagacgagcgcatcatcgggcgcctcgggctgctcgttggtgggttcccaatcaagcaggcaatcgacgggtcgcggctggggatcgtccttcagccgccgacgccaggggaccgattcgagggcagaaagcaagtcggggaattcacctcccggatgctccagcagagggcggcaaggggggcagcactttctgccgaggtagagtgtccacttgggcgctttgattgccgcctccagttcctcaatgaggtccggttcgccctgaagagcgacgagaaacgaggcgtcgcaaaggtattcgcggcgggtgagcatggctccggacttggttcccccctcggcggtacgcatcggcatccccgcacccaccgtgtgataatcccaccagcggacccctggcgcatcgacgcgtacgcccatgcgcagccgggccagccttggaagccagccttcgcgggcctctggccgggaaacgcccaatgccgcgcaaagcatcccgatgacgccggacttggtcggcgcctcggccgtgcgccgaatgacgaacttggattgctgatcgccccatgcctgaagaggaccttcaagccgaagtagcagcgtctttgcgctcatggggcacctccggattcaggaccactttcttggcctcctgccagtcgtaaccgatttccttgagtacagccgctatcagttcgtcaagagacttaacatctttgtcggcaagcgggacctcacgctgtttctgttttccgtcttcgctctccgtggtggtagccgtcaacggatagcggagatttggagagaaccagaaccgcttcgtcggcttgccgtatcccgtatctatgtcgttcacataatgggcaagctgcgccacgctctgcgagatgatgtcccgttcgccctgaggagccgccggtttggcgaaggcgttggcgtagctgatgggagtgtttctgacttccaccaacatcccgtcaggagggttgtgcgcggcaaaactattttgttttcccgtggggttggccaaggccgcggcgcgaatgaaggcgccgacggtatgggccgccagtttttcgtgattcgtcccgaagggcttcaggtttttgaccagcgtttcccaatgaatggagaaatacttgtagaaacatgccgaaccgaacatggcttcatccacgtaacctgcgcccgcgtcctcgccggggacatcatcggcggcgacatagtagtccacctcgggccgggcctcatgggtggaaatggcatgggcgacttgaagcgatgcctcaaccgtcgtgtctttgaggactcccgtttcaagcatcctgccgctcagcgccatgtccggcacggcgacggattcactgatgagcttgccgaactccgctgccaaggcctcgtccgtttttccgtcgccctgctggaggagttcggccatgcgtgtaatcgcctcttgggtggtgtaaaccagcatcttgctcctctcagcactttcctgttcgtcttctccttcctgtttttttgctttcttaggctccagcccgcaggctttgagaatgttctccgctcgcttcctgacgtctttgcccgtcaccttttccgcaatctctttcgccaactggcgggtgcgaactccgcccagcaattgtctgaactcctcactcatgcggatgctgcgcttaaggcactggctggaaatacgggagcgcaagactccgccaaaaaagcaagtcttgggcgcgcccaggtcatcccggttcaggttggccgggctgtgattctgaatggcgtgaatctggatcaacatgactctcctcctcttggacagttcaaaaattcctcggcccatttgagccgggtggattcgcgttcccagatggaaagatcgttcgtcagccgcacccagtcgagttcgaggtgcttggaagctatgaggtcgattgcccactgtagggcgggttcgatttcagcaagcggcagcgtgagcatcctgtcgaagcgttgctcgaaacgctgccgcgctgttttctcgcccggccgggatcgcccgagctggcgagcgagggtctcgcggggtgaatgctcgaggggccggagggcgtagagtttggcgacaagccaggccacctcacggcgaggcgcccgttgggtttgcgcccgcagcggccaccaaaggcctgcgaaaaggtcaaagccctctaccgattcgtcgagcccttgcccggcatggttgcgcaagagcccgagctcaccgggtttcagtcgagtcagaacttcgacgtactgctccgttggagtcacttgtcccccccttcgtctttgttgtttctctttggccgcatgtccggctttacagcggcaatttcttgtcgcctccggagggaagcggttgtgtagcccggggaaagcgatttggcgacggcggccatcaacggacgatattcctgggccgcctcttcccatgccttaccgccttctgcgatcatctcgtcgatttttccggaaaccgttgcctcggcttggggacgaacagcggcgactgcggagagaatttcaaggtgtcctctgtttcgtgaagtctctcgcggtttggctctgccaacgagcttccagccttccttctgccacgcctggatttcttgcaaactcgcctgaaccttcacgtcgtcgagcgcggccaagaattgaatctcccgctcggctgcttccaggtatttgtcgttctgcactgtcgcaaagctgacgacccacaacttactgttccccttcggcttttccccgcacaggattcccgccacgaccttcgtccacttcccagccgcagcgtcggccgggccaagcgcgctgaaaggcttcacaatctcgtcgccttcgctgatggtgtgcgggtcgttccagattcgtgccagactgccttcgcctgtctttgtgctcccaatacccgcaaagacacattgacgtatcagagcctccctgcgcccgcaggcgatgcagttggactctggtgtctccggagtgtctaaccagacgcgccgcggtacccacgttaatcctatcaataatggaacattgccgtgttgagggaggcttatgtccggattttcccatgtgggcgtgcccaggttcatctccgacgtcttccgccatgagaggcgcagggtttcggaaaggcagtcgcccatcggcacgatgtagatcggcggtttttgattgacgcccgggggcttgccgcgcccggccgacgtagcaaagagcggaaggcgcaacaagcccattgcgcagcatgccggacataagccgtttctgaaatctgtcccatgccggaagtgccagaagtttgtgccggtcggcacttcttgcatcagatagttgacggacagcttcttctcaagtcggttaggcttgcgttggtaaaaccgcttcccatcgccctgaaggttgaaacagtctttgttgtcatcgagtttcttgaaccaatcagagggaaacgaagaaatcgagttcttgtcgtccgggggattccctttgcaccaatagagcaacgcaagcaggaaacgcaggatggccaggcggtccattgggttgctggccgcgatttggcgaatccggcctgcttgcctaagggcctcactaatgcccacgcgaccgctgtgcccatctttccacagaacgggaatccacttttcttcgagcaggttgtactccacggcttcctccttgcctgggcaagaggcgggtggcaggcccgtcgcgccccggggggaccggaccgtccgctgcgtagctaccacaggacaatcatggcgaaggtatacacccgggacgcggcaaaggcaaggcccgaagaccacgacaacggttatcgcgtccgcttagcccacacttcacaggctgcaaggcgcgccgttgactaagcgcagaagctttgatgcctccgcggcgttccgattcggagggaatcttgcgatcgatttcgcgggtggcgcatacgtcccgacgggtttttgtcgggatgtatgcgcccctcggcatgtcgacaccttcatagcctcttgtccatgctcaagatcgaaccatcattccagaaatagaacctcccgccgcagcgcgaccacggccagtcgcccgggtgcttgaccagcactcgtttgacgggattgtcgcgcctgtgattcaatttctcgtctcgcttcttggggctccagatgttcatgtcgtagaacccaccccaacaatatatcgtccctgtggcgcatacatcccgacaaaaagaagctgtgaaaaaatcaagaaaatcgaaaaattaagaaattttcttgtcttagctatacagctatgatatattagcctctgaccgcacttccggcgggga

SEQ ID NO: 658 - DNA, 10044 bp, Artificial Sequence; identical to SEQ ID NO: 641
  Synthetic Oligonucleotide

SEQ ID NO: 659 - DNA, 10037 bp, Artificial Sequence
  Synthetic Oligonucleotide
cgtagaactgaatccatagccctctcccttggggctgagcgtgtcccacatctttgactggacaccgcgcgtagaactgaatccatagccctctcccttggggctgagcgtgtcccgctccggcgcttccaccagccggagcgggacgggtgaggggtctcttgctcagtttcgcgaaccaacctcttccgtagcgcctcggtcgtcccccgctgtgcaaagcaatagtactccgcgacccggttttgcaggggagacgggtggcgaacctttaccttcagtgtccggtcgcgctacgaggacgatgtcgcgttttgagcttcggtttggttgcgccgcaaggggcgggccgcacggccagagggagactatagctgatgcggagctttagctggacaagatgggttgcgaaaggatcacgattacaagacacggcgttccggcggcaatgctggtgccggttcgagactcggatcgaaagctgacgcacgaggagattgtcgagggcatgcgcgcgttgcgcaagcgcgtaaagccccacaccatgagcgtccgcgaaatgataattgagggacggcgattttgagcggcgttgtggtgcatgcgtcggtggcgcttgcctggtgctccccggatgaagcgagcgaatacgcggacggggtcctggtggcactgaagggcagacgctcgttgttccagccgtatgggggctcgaaattaccaacgcgctactgaccggtgagcgtcgcaagcgattgaagcagccggaaatcctgcgcttcgccgctttactggagggactttcaattctccaggatggccaggcagtgggtagcgcagacctgcgctttttgcaggtctgcggcttttcaagattcacggcggcaaaagccgcagacttcgatatgcacgaagtctgcgctacccgctgcggttcacccccacgcgcgtggggacaacgacttaatgccattttaggaagtgtccatcaccggttcacccccacgcgcgtggggacaactctttgtcgcggtcgcttagacctgcgctcgccggttcacccccacgcgcgtggggacaacgaatggagctgttgcgtctcggagggcaaaggcggttcacccccacgcgcgtggggacaacttcatcaaactcactaagctctatgccaagagcggttcacccccacgcgcgtggggacaacaagctgaaagttggctttccttttcgagagaccggttcacccccacgcgcgtggggacaacgactccatattcgtcacatccgccgtgtccgccggttcacccccacgcgcgtggggacaacggatacggacgaggttggaatgtgcgcgccgccggttcacccccacgcgcgtggggacaacttctgcgacaccacacccatatcaagctacatcggttcacccccacgcgcgtggggacaacaccccaagaaataattcccctgggaaccgtaccggttcacccccacgcgcgtggggacaacttcaaactggcgttctttataagatgcagaagcggttcacccccacgcgcgtggggacaacgaaccctgcctgtaactacactcacgactccccggttcacccccacgcgcgtggggacaactttcagcggcaatgcgaatcgccgcgagctgccggttcacccccacgcgcgtggggacaactttggggtataaggccgctgtgctgcccgatgcggttcacccccacgcgcgtggggacaacacatccaagtgcttggtcttgatattgttttgcggttcacccccacgcgcgtggggacaactggggtacggtgatcctgcctgcggctgggaacggttcacccccacgcgcgtggggacaactccgcgaccttctcctccaacacggcccgctgcggttcacccccacgcgcgtggggacaacatcggtcgagcagaaggtgcaagccaccattacggttcacccccacgcgcgtggggacaacgcatcggccttggcctcagccttaacctgcgccggttcacccccacgcgcgtggggacaacgtgatcgaggaccgtgccttcaaagttctcccgcggttcacccccacgcgcgtggggacaacccgcagtctcacaagcgcgcgtcggccccagccggttcacccccacgcgcgtggggacaacatcgccagcacgcgccccgcgccctcggaggtcggttcacccccacgcgcgtggggacaacctaagtggattcgccttgccactcgccgataccggttcacccccacgcgcgtggggacaacatcaagcgccagccccggcacatgcagcatatcggttcacccccacgcgcgtggggacaacttctttccagcccatgaaaccttcagccccggcggttcacccccacgcgcgtggggacaacacttactaaattattgattctgcggcatgcgaacgagaaaaaggccctcgaagtcatcgatgacccgagctgtttggccccaggttcggactcgaaagccctgttcattgtcgcttgaatagataatcaagcacccgcctcccttggcctggctgcaggctttttcccagagccgatcacggaccatggcggagacgcgtcccacgaacactcccgcctgaggttccaaaaaccagcgagtcagctcgcctcgcaaccctggggggacgcgctcaagaatcaggaccaccatcgccgggctccgtttcaccgatttcgggggctagcaggcggccgccttcgacctctccttccagattgtcccagaggaagccgggggcggcggcatccaggtcgaaggtagtgtcccaggccgtcgcttttgccagcatcaacgccctttggacatccgggatgattctctccagaagccgcgtggatacgaactgatcgcggcaggtgatgcgcacccggcgttccaactgtcccgtcccctcggcggcggcgcgaaatgccactggaacggtaatttcagccttgtacaggtcggcgagatcgtagacgaaggacagcatcttgccggtgtggataaacccgagtgcgggcgaaaaacctgctgacacgatggcagcatggcagattccatataggcaggagttagcggcggacaaggctcggttggcagggtccgccttgctccactcatcgcgtttatagctgcggcccgaccacgtgatgccggcttcctgggcggccttggcgtaggcatcgcgcacccgcacgccctccatgccgcggatttgctggagggtcagggcagggtcgaacttctccgaaaatcgcaactgatagaggcggcgcaccacctgcatatggaaaccctggtccgcccacagcctcgcctgatgcaggaagttggccgcgttgcgcgtctcgcccatgcccacggcgtagaagcggactccctcctccccgcaccaagccaccaggcacccatggtccgccaacacggagatggcggcgtgagtaatcgagacgcccggacccaacatcaggagagccagattggcacaggggaccggcaccttcccggcttgatcgtggacggcaatggcccgctcttcctgatcgacgtggcaatgctcgacgtacagataactccacccgtcactgaacttgggtagaacgtggagatcttgaattctcacagagcctccagcccgtgctgtagcgtcgatctccgatcgacggcggttgtagcgtcgatctccgatcgaccggggttgtagtcgatctccgatcgacgttacggcggtcggagaccgccgctacaaaaccaggcgatggatctcaccctggtacggccaatcttccgggcgcttgactaaaccggcccggaccggattctgccggacatattcatatttctcccgataggattcttgcgatctcaggacgtgatcgaaaaagtctttctcccaatgtgtgccctcgccctcatcttcccggaggactttggataaatccccgcgcagcgccttgatccatttccctaaaggtggggactcacgacaaaagccggcgaaaagatggatgtgatcaggcatgatcatgaagaacccgacccaaacaagaaaatcgctcgcccgttcggagaatctcgtgaattcccggtgaatcgcaggatttgccaacgagcgtttgcggtcctgcgtacacagcgtgagatagtagattgggctgcccgtatagagccagtccagtcgccgcaagcggggtttgaatttcatattggctcgatctccgctcaagaaatgttgcacggatccccgatcgacaagggattgtagcgtcgatctccgatcgacgtaccggcggtcggagaccgccgctacagcgagagcggcgccacggaaagcaggccgaagccgaaggctttgccgtgcccaacgccgcccacgatggtttctctgaagctgtccgcgtcctcaaccgtaagcgtcccctccaataacgccgagcgaaatttcatgcggccgcccgtcggcctcgggtcggatcggtctcctgcgccccacccgatctgcaagacccggaaagtttccacttggaatccaccttggccgcccttgccggcgaaccattttcgtatcacatcgtcgcggttctggtccttgtcccaggtcagcgccacgcgtttgccttgggccttcgggcggccccgcttatctgtcccctctcgcgtcctcgtaagatcaacgccctctgtgctggtttttatcttcttactcagattggcgcggatacggaagcgaagccgctgacccttctcaaagcgggggtcgaattcctgcacctgagggggagcggctagaggattcagaagaaaacgggcgttgtggaaggcgtagccccagtcaggctttacggcagagttagactggacgaggatcacgacccgcccgcccggttgcgggtcgatgcggaagagaaagccggagtcgccgtcacgtcttacatggacctggttgttggcaaagtccgcgggtttgaaaggcttgaggaagtggggatcgtgggatattcggtctttggatggaaacgccatgcaaaggcgctggtggacgtgatggaggtttcgcagccagagccgcccgggcctggggcggtcggggttggtgccgacgtcaatcaagaggcaggagaggtacatggctattccacctcctcagcggcaaggcgtctgcggcgagtctccagagagcggaacctgataatctcttcccgcttctcgatgatcttgtcgcgccaacggggctcttcggggttgatgcggtccaagcccattccgagcccgtactcgatcatggtcacggcgtcgtggcagaggcggcagagggagcgcaaatcgtcccggagttcgccgccgcccgcgcggcggtacgtgatgtgctgcacggtgctggcgggagacttgcaaaaaacgcacaagtgatagtcgtcgtcgagccgctccttgcgtcggtttttgtactctgtgttcgtgtaatccgctcttgggcgcggaggcggtggcgtgtcgctctgcggtggctgcaccgcaagtgttacgtcgccgtccgctccgacgcgcaactgcctgcggatgacgaatcggggttggtgcgacggcggctcgaatgtcaacggcacgtcgtaccagacgagcgcatcatcgggcgcctcgggctgctcgttggtgggttcccaatcaagcaggcaatcgacgggtcgcggctggggatcgtccttcagccgccgacgccaggggaccgattcgagggcagaaagcaagtcggggaattcacctcccggatgctccagcagagggcggcaaggggggcagcactttctgccgaggtagagtgtccacttgggcgctttgattgccgcctccagttcctcaatgaggtccggttcgccctgaagagcgacgagaaacgaggcgtcgcaaaggtattcgcggcgggtgagcatggctccggacttggttcccccctcggcggtacgcatcggcatccccgcacccaccgtgtgataatcccaccagcggacccctggcgcatcgacgcgtacgcccatgcgcagccgggccagccttggaagccagccttcgcgggcctctggccgggaaacgcccaatgccgcgcaaagcatcccgatgacgccggacttggtcggcgcctcggccgtgcgccgaatgacgaacttggattgctgatcgccccatgcctgaagaggaccttcaagccgaagtagcagcgtctttgcgctcatggggcacctccggattcaggaccactttcttggcctcctgccagtcgtaaccgatttccttgagtacagccgctatcagttcgtcaagagacttaacatctttgtcggcaagcgggacctcacgctgtttctgttttccgtcttcgctctccgtggtggtagccgtcaacggatagcggagatttggagagaaccagaaccgcttcgtcggcttgccgtatcccgtatctatgtcgttcacataatgggcaagctgcgccacgctctgcgagatgatgtcccgttcgccctgaggagccgccggtttggcgaaggcgttggcgtagctgatgggagtgtttctgacttccaccaacatcccgtcaggagggttgtgcgcggcaaaactattttgttttcccgtggggttggccaaggccgcggcgcgaatgaaggcgccgacggtatgggccgccagtttttcgtgattcgtcccgaagggcttcaggtttttgaccagcgtttcccaatgaatggagaaatacttgtagaaacatgccgaaccgaacatggcttcatccacgtaacctgcgcccgcgtcctcgccggggacatcatcggcggcgacatagtagtccacctcgggccgggcctcatgggtggaaatggcatgggcgacttgaagcgatgcctcaaccgtcgtgtctttgaggactcccgtttcaagcatcctgccgctcagcgccatgtccggcacggcgacggattcactgatgagcttgccgaactccgctgccaaggcctcgtccgtttttccgtcgccctgctggaggagttcggccatgcgtgtaatcgcctcttgggtggtgtaaaccagcatcttgctcctctcagcactttcctgttcgtcttctccttcctgtttttttgctttcttaggctccagcccgcaggctttgagaatgttctccgctcgcttcctgacgtctttgcccgtcaccttttccgcaatctctttcgccaactggcgggtgcgaactccgcccagcaattgtctgaactcctcactcatgcggatgctgcgcttaaggcactggctggaaatacgggagcgcaagactccgccaaaaaagcaagtcttgggcgcgcccaggtcatcccggttcaggttggccgggctgtgattctgaatggcgtgaatctggatcaacatgactctcctcctcttggacagttcaaaaattcctcggcccatttgagccgggtggattcgcgttcccagatggaaagatcgttcgtcagccgcacccagtcgagttcgaggtgcttggaagctatgaggtcgattgcccactgtagggcgggttcgatttcagcaagcggcagcgtgagcatcctgtcgaagcgttgctcgaaacgctgccgcgctgttttctcgcccggccgggatcgcccgagctggcgagcgagggtctcgcggggtgaatgctcgaggggccggagggcgtagagtttggcgacaagccaggccacctcacggcgaggcgcccgttgggtttgcgcccgcagcggccaccaaaggcctgcgaaaaggtcaaagccctctaccgattcgtcgagcccttgcccggcatggttgcgcaagagcccgagctcaccgggtttcagtcgagtcagaacttcgacgtactgctccgttggagtcacttgtcccccccttcgtctttgttgtttctctttggccgcatgtccggctttacagcggcaatttcttgtcgcctccggagggaagcggttgtgtagcccggggaaagcgatttggcgacggcggccatcaacggacgatattcctgggccgcctcttcccatgccttaccgccttctgcgatcatctcgtcgatttttccggaaaccgttgcctcggcttggggacgaacagcggcgactgcggagagaatttcaaggtgtcctctgtttcgtgaagtctctcgcggtttggctctgccaacgagcttccagccttccttctgccacgcctggatttcttgcaaactcgcctgaaccttcacgtcgtcgagcgcggccaagaattgaatctcccgctcggctgcttccaggtatttgtcgttctgcactgtcgcaaagctgacgacccacaacttactgttccccttcggcttttccccgcacaggattcccgccacgaccttcgtccacttcccagccgcagcgtcggccgggccaagcgcgctgaaaggcttcacaatctcgtcgccttcgctgatggtgtgcgggtcgttccagattcgtgccagactgccttcgcctgtctttgtgctcccaatacccgcaaagacacattgacgtatcagagcctccctgcgcccgcaggcgatgcagttggactctggtgtctccggagtgtctaaccagacgcgccgcggtacccacgttaatcctatcaataatggaacattgccgtgttgagggaggcttatgtccggattttcccatgtgggcgtgcccaggttcatctccgacgtcttccgccatgagaggcgcagggtttcggaaaggcagtcgcccatcggcacgatgtagatcggcggtttttgattgacgcccgggggcttgccgcgcccggccgacgtagcaaagagcggaaggcgcaacaagcccattgcgcagcatgccggacataagccgtttctgaaatctgtcccatgccggaagtgccagaagtttgtgccggtcggcacttcttgcatcagatagttgacggacagcttcttctcaagtcggttaggcttgcgttggtaaaaccgcttcccatcgccctgaaggttgaaacagtctttgttgtcatcgagtttcttgaaccaatcagagggaaacgaagaaatcgagttcttgtcgtccgggggattccctttgcaccaatagagcaacgcaagcaggaaacgcaggatggccaggcggtccattgggttgctggccgcgatttggcgaatccggcctgcttgcctaagggcctcactaatgcccacgcgaccgctgtgcccatctttccacagaacgggaatccacttttcttcgagcaggttgtactccacggcttcctccttgcctgggcaagaggcgggtggcaggcccgtcgcgccccggggggaccggaccgtccgctgcgtagctaccacaggacaatcatggcgaaggtatacacccgggacgcggcaaaggcaaggcccgaagaccacgacaacggttatcgcgtccgcttagcccacacttcacaggctgcaaggcgcgccgttgactaagcgcagaagctttgatgcctccgcggcgttccgattcggagggaatcttgcgatcgatttcgcgggtggcgcatacgtcccgacgggtttttgtcgggatgtatgcgcccctcggcatgtcgacaccttcatagcctcttgtccatgctcaagatcgaaccatcattccagaaatagaacctcccgccgcagcgcgaccacggccagtcgcccgggtgcttgaccagcactcgtttgacgggattgtcgcgcctgtgattcaatttctcgtctcgcttcttggggctccagatgttcatgtcgtagaacccaccccaacaatatatcgtccctgtggcgcatacatcccgacaaaaagaagctgtgaaaaaatcaagaaaatcgaaaaattaagaaattttcttgtcttagctatacagctatgatatattagcctctgaccgcacttccggcgggga

SEQ ID NO: 660 - DNA, 10037 bp, Artificial Sequence; identical to SEQ ID NO: 659
  Synthetic Oligonucleotide

SEQ ID NO: 661 - DNA, 10022 bp, Artificial Sequence
  Synthetic Oligonucleotide
ccatagccctctcccttggggctgagcgtgtcccacatctttgactggacaccgcgcgtagaactgaatccatagccctctcccttggggctgagcgtgtcccgctccggcgcttccaccagccggagcgggacgggtgaggggtctcttgctcagtttcgcgaaccaacctcttccgtagcgcctcggtcgtcccccgctgtgcaaagcaatagtactccgcgacccggttttgcaggggagacgggtggcgaacctttaccttcagtgtccggtcgcgctacgaggacgatgtcgcgttttgagcttcggtttggttgcgccgcaaggggcgggccgcacggccagagggagactatagctgatgcggagctttagctggacaagatgggttgcgaaaggatcacgattacaagacacggcgttccggcggcaatgctggtgccggttcgagactcggatcgaaagctgacgcacgaggagattgtcgagggcatgcgcgcgttgcgcaagcgcgtaaagccccacaccatgagcgtccgcgaaatgataattgagggacggcgattttgagcggcgttgtggtgcatgcgtcggtggcgcttgcctggtgctccccggatgaagcgagcgaatacgcggacggggtcctggtggcactgaagggcagacgctcgttgttccagccgtatgggggctcgaaattaccaacgcgctactgaccggtgagcgtcgcaagcgattgaagcagccggaaatcctgcgcttcgccgctttactggagggactttcaattctccaggatggccaggcagtgggtagcgcagacctgcgctttttgcaggtctgcggcttttcaagattcacggcggcaaaagccgcagacttcgatatgcacgaagtctgcgctacccgctgcggttcacccccacgcgcgtggggacaacgacttaatgccattttaggaagtgtccatcaccggttcacccccacgcgcgtggggacaactctttgtcgcggtcgcttagacctgcgctcgccggttcacccccacgcgcgtggggacaacgaatggagctgttgcgtctcggagggcaaaggcggttcacccccacgcgcgtggggacaacttcatcaaactcactaagctctatgccaagagcggttcacccccacgcgcgtggggacaacaagctgaaagttggctttccttttcgagagaccggttcacccccacgcgcgtggggacaacgactccatattcgtcacatccgccgtgtccgccggttcacccccacgcgcgtggggacaacggatacggacgaggttggaatgtgcgcgccgccggttcacccccacgcgcgtggggacaacttctgcgacaccacacccatatcaagctacatcggttcacccccacgcgcgtggggacaacaccccaagaaataattcccctgggaaccgtaccggttcacccccacgcgcgtggggacaacttcaaactggcgttctttataagatgcagaagcggttcacccccacgcgcgtggggacaacgaaccctgcctgtaactacactcacgactccccggttcacccccacgcgcgtggggacaactttcagcggcaatgcgaatcgccgcgagctgccggttcacccccacgcgcgtggggacaactttggggtataaggccgctgtgctgcccgatgcggttcacccccacgcgcgtggggacaacacatccaagtgcttggtcttgatattgttttgcggttcacccccacgcgcgtggggacaactggggtacggtgatcctgcctgcggctgggaacggttcacccccacgcgcgtggggacaactccgcgaccttctcctccaacacggcccgctgcggttcacccccacgcgcgtggggacaacatcggtcgagcagaaggtgcaagccaccattacggttcacccccacgcgcgtggggacaacgcatcggccttggcctcagccttaacctgcgccggttcacccccacgcgcgtggggacaacgtgatcgaggaccgtgccttcaaagttctcccgcggttcacccccacgcgcgtggggacaacccgcagtctcacaagcgcgcgtcggccccagccggttcacccccacgcgcgtggggacaacatcgccagcacgcgccccgcgccctcggaggtcggttcacccccacgcgcgtggggacaacctaagtggattcgccttgccactcgccgataccggttcacccccacgcgcgtggggacaacatcaagcgccagccccggcacatgcagcatatcggttcacccccacgcgcgtggggacaacttctttccagcccatgaaaccttcagccccggcggttcacccccacgcgcgtggggacaacacttactaaattattgattctgcggcatgcgaacgagaaaaaggccctcgaagtcatcgatgacccgagctgtttggccccaggttcggactcgaaagccctgttcattgtcgcttgaatagataatcaagcacccgcctcccttggcctggctgcaggctttttcccagagccgatcacggaccatggcggagacgcgtcccacgaacactcccgcctgaggttccaaaaaccagcgagtcagctcgcctcgcaaccctggggggacgcgctcaagaatcaggaccaccatcgccgggctccgtttcaccgatttcgggggctagcaggcggccgccttcgacctctccttccagattgtcccagaggaagccgggggcggcggcatccaggtcgaaggtagtgtcccaggccgtcgcttttgccagcatcaacgccctttggacatccgggatgattctctccagaagccgcgtggatacgaactgatcgcggcaggtgatgcgcacccggcgttccaactgtcccgtcccctcggcggcggcgcgaaatgccactggaacggtaatttcagccttgtacaggtcggcgagatcgtagacgaaggacagcatcttgccggtgtggataaacccgagtgcgggcgaaaaacctgctgacacgatggcagcatggcagattccatataggcaggagttagcggcggacaaggctcggttggcagggtccgccttgctccactcatcgcgtttatagctgcggcccgaccacgtgatgccggcttcctgggcggccttggcgtaggcatcgcgcacccgcacgccctccatgccgcggatttgctggagggtcagggcagggtcgaacttctccgaaaatcgcaactgatagaggcggcgcaccacctgcatatggaaaccctggtccgcccacagcctcgcctgatgcaggaagttggccgcgttgcgcgtctcgcccatgcccacggcgtagaagcggactccctcctccccgcaccaagccaccaggcacccatggtccgccaacacggagatggcggcgtgagtaatcgagacgcccggacccaacatcaggagagccagattggcacaggggaccggcaccttcccggcttgatcgtggacggcaatggcccgctcttcctgatcgacgtggcaatgctcgacgtacagataactccacccgtcactgaacttgggtagaacgtggagatcttgaattctcacagagcctccagcccgtgctgtagcgtcgatctccgatcgacggcggttgtagcgtcgatctccgatcgaccggggttgtagtcgatctccgatcgacgttacggcggtcggagaccgccgctacaaaaccaggcgatggatctcaccctggtacggccaatcttccgggcgcttgactaaaccggcccggaccggattctgccggacatattcatatttctcccgataggattcttgcgatctcaggacgtgatcgaaaaagtctttctcccaatgtgtgccctcgccctcatcttcccggaggactttggataaatccccgcgcagcgccttgatccatttccctaaaggtggggactcacgacaaaagccggcgaaaagatggatgtgatcaggcatgatcatgaagaacccgacccaaacaagaaaatcgctcgcccgttcggagaatctcgtgaattcccggtgaatcgcaggatttgccaacgagcgtttgcggtcctgcgtacacagcgtgagatagtagattgggctgcccgtatagagccagtccagtcgccgcaagcggggtttgaatttcatattggctcgatctccgctcaagaaatgttgcacggatccccgatcgacaagggattgtagcgtcgatctccgatcgacgtaccggcggtcggagaccgccgctacagcgagagcggcgccacggaaagcaggccgaagccgaaggctttgccgtgcccaacgccgcccacgatggtttctctgaagctgtccgcgtcctcaaccgtaagcgtcccctccaataacgccgagcgaaatttcatgcggccgcccgtcggcctcgggtcggatcggtctcctgcgccccacccgatctgcaagacccggaaagtttccacttggaatccaccttggccgcccttgccggcgaaccattttcgtatcacatcgtcgcggttctggtccttgtcccaggtcagcgccacgcgtttgccttgggccttcgggcggccccgcttatctgtcccctctcgcgtcctcgtaagatcaacgccctctgtgctggtttttatcttcttactcagattggcgcggatacggaagcgaagccgctgacccttctcaaagcgggggtcgaattcctgcacctgagggggagcggctagaggattcagaagaaaacgggcgttgtggaaggcgtagccccagtcaggctttacggcagagttagactggacgaggatcacgacccgcccgcccggttgcgggtcgatgcggaagagaaagccggagtcgccgtcacgtcttacatggacctggttgttggcaaagtccgcgggtttgaaaggcttgaggaagtggggatcgtgggatattcggtctttggatggaaacgccatgcaaaggcgctggtggacgtgatggaggtttcgcagccagagccgcccgggcctggggcggtcggggttggtgccgacgtcaatcaagaggcaggagaggtacatggctattccacctcctcagcggcaaggcgtctgcggcgagtctccagagagcggaacctgataatctcttcccgcttctcgatgatcttgtcgcgccaacggggctcttcggggttgatgcggtccaagcccattccgagcccgtactcgatcatggtcacggcgtcgtggcagaggcggcagagggagcgcaaatcgtcccggagttcgccgccgcccgcgcggcggtacgtgatgtgctgcacggtgctggcgggagacttgcaaaaaacgcacaagtgatagtcgtcgtcgagccgctccttgcgtcggtttttgtactctgtgttcgtgtaatccgctcttgggcgcggaggcggtggcgtgtcgctctgcggtggctgcaccgcaagtgttacgtcgccgtccgctccgacgcgcaactgcctgcggatgacgaatcggggttggtgcgacggcggctcgaatgtcaacggcacgtcgtaccagacgagcgcatcatcgggcgcctcgggctgctcgttggtgggttcccaatcaagcaggcaatcgacgggtcgcggctggggatcgtccttcagccgccgacgccaggggaccgattcgagggcagaaagcaagtcggggaattcacctcccggatgctccagcagagggcggcaaggggggcagcactttctgccgaggtagagtgtccacttgggcgctttgattgccgcctccagttcctcaatgaggtccggttcgccctgaagagcgacgagaaacgaggcgtcgcaaaggtattcgcggcgggtgagcatggctccggacttggttcccccctcggcggtacgcatcggcatccccgcacccaccgtgtgataatcccaccagcggacccctggcgcatcgacgcgtacgcccatgcgcagccgggccagccttggaagccagccttcgcgggcctctggccgggaaacgcccaatgccgcgcaaagcatcccgatgacgccggacttggtcggcgcctcggccgtgcgccgaatgacgaacttggattgctgatcgccccatgcctgaagaggaccttcaagccgaagtagcagcgtctttgcgctcatggggcacctccggattcaggaccactttcttggcctcctgccagtcgtaaccgatttccttgagtacagccgctatcagttcgtcaagagacttaacatctttgtcggcaagcgggacctcacgctgtttctgttttccgtcttcgctctccgtggtggtagccgtcaacggatagcggagatttggagagaaccagaaccgcttcgtcggcttgccgtatcccgtatctatgtcgttcacataatgggcaagctgcgccacgctctgcgagatgatgtcccgttcgccctgaggagccgccggtttggcgaaggcgttggcgtagctgatgggagtgtttctgacttccaccaacatcccgtcaggagggttgtgcgcggcaaaactattttgttttcccgtggggttggccaaggccgcggcgcgaatgaaggcgccgacggtatgggccgccagtttttcgtgattcgtcccgaagggcttcaggtttttgaccagcgtttcccaatgaatggagaaatacttgtagaaacatgccgaaccgaacatggcttcatccacgtaacctgcgcccgcgtcctcgccggggacatcatcggcggcgacatagtagtccacctcgggccgggcctcatgggtggaaatggcatgggcgacttgaagcgatgcctcaaccgtcgtgtctttgaggactcccgtttcaagcatcctgccgctcagcgccatgtccggcacggcgacggattcactgatgagcttgccgaactccgctgccaaggcctcgtccgtttttccgtcgccctgctggaggagttcggccatgcgtgtaatcgcctcttgggtggtgtaaaccagcatcttgctcctctcagcactttcctgttcgtcttctccttcctgtttttttgctttcttaggctccagcccgcaggctttgagaatgttctccgctcgcttcctgacgtctttgcccgtcaccttttccgcaatctctttcgccaactggcgggtgcgaactccgcccagcaattgtctgaactcctcactcatgcggatgctgcgcttaaggcactggctggaaatacgggagcgcaagactccgccaaaaaagcaagtcttgggcgcgcccaggtcatcccggttcaggttggccgggctgtgattctgaatggcgtgaatctggatcaacatgactctcctcctcttggacagttcaaaaattcctcggcccatttgagccgggtggattcgcgttcccagatggaaagatcgttcgtcagccgcacccagtcgagttcgaggtgcttggaagctatgaggtcgattgcccactgtagggcgggttcgatttcagcaagcggcagcgtgagcatcctgtcgaagcgttgctcgaaacgctgccgcgctgttttctcgcccggccgggatcgcccgagctggcgagcgagggtctcgcggggtgaatgctcgaggggccggagggcgtagagtttggcgacaagccaggccacctcacggcgaggcgcccgttgggtttgcgcccgcagcggccaccaaaggcctgcgaaaaggtcaaagccctctaccgattcgtcgagcccttgcccggcatggttgcgcaagagcccgagctcaccgggtttcagtcgagtcagaacttcgacgtactgctccgttggagtcacttgtcccccccttcgtctttgttgtttctctttggccgcatgtccggctttacagcggcaatttcttgtcgcctccggagggaagcggttgtgtagcccggggaaagcgatttggcgacggcggccatcaacggacgatattcctgggccgcctcttcccatgccttaccgccttctgcgatcatctcgtcgatttttccggaaaccgttgcctcggcttggggacgaacagcggcgactgcggagagaatttcaaggtgtcctctgtttcgtgaagtctctcgcggtttggctctgccaacgagcttccagccttccttctgccacgcctggatttcttgcaaactcgcctgaaccttcacgtcgtcgagcgcggccaagaattgaatctcccgctcggctgcttccaggtatttgtcgttctgcactgtcgcaaagctgacgacccacaacttactgttccccttcggcttttccccgcacaggattcccgccacgaccttcgtccacttcccagccgcagcgtcggccgggccaagcgcgctgaaaggcttcacaatctcgtcgccttcgctgatggtgtgcgggtcgttccagattcgtgccagactgccttcgcctgtctttgtgctcccaatacccgcaaagacacattgacgtatcagagcctccctgcgcccgcaggcgatgcagttggactctggtgtctccggagtgtctaaccagacgcgccgcggtacccacgttaatcctatcaataatggaacattgccgtgttgagggaggcttatgtccggattttcccatgtgggcgtgcccaggttcatctccgacgtcttccgccatgagaggcgcagggtttcggaaaggcagtcgcccatcggcacgatgtagatcggcggtttttgattgacgcccgggggcttgccgcgcccggccgacgtagcaaagagcggaaggcgcaacaagcccattgcgcagcatgccggacataagccgtttctgaaatctgtcccatgccggaagtgccagaagtttgtgccggtcggcacttcttgcatcagatagttgacggacagcttcttctcaagtcggttaggcttgcgttggtaaaaccgcttcccatcgccctgaaggttgaaacagtctttgttgtcatcgagtttcttgaaccaatcagagggaaacgaagaaatcgagttcttgtcgtccgggggattccctttgcaccaatagagcaacgcaagcaggaaacgcaggatggccaggcggtccattgggttgctggccgcgatttggcgaatccggcctgcttgcctaagggcctcactaatgcccacgcgaccgctgtgcccatctttccacagaacgggaatccacttttcttcgagcaggttgtactccacggcttcctccttgcctgggcaagaggcgggtggcaggcccgtcgcgccccggggggaccggaccgtccgctgcgtagctaccacaggacaatcatggcgaaggtatacacccgggacgcggcaaaggcaaggcccgaagaccacgacaacggttatcgcgtccgcttagcccacacttcacaggctgcaaggcgcgccgttgactaagcgcagaagctttgatgcctccgcggcgttccgattcggagggaatcttgcgatcgatttcgcgggtggcgcatacgtcccgacgggtttttgtcgggatgtatgcgcccctcggcatgtcgacaccttcatagcctcttgtccatgctcaagatcgaaccatcattccagaaatagaacctcccgccgcagcgcgaccacggccagtcgcccgggtgcttgaccagcactcgtttgacgggattgtcgcgcctgtgattcaatttctcgtctcgcttcttggggctccagatgttcatgtcgtagaacccaccccaacaatatatcgtccctgtggcgcatacatcccgacaaaaagaagctgtgaaaaaatcaagaaaatcgaaaaattaagaaattttcttgtcttagctatacagctatgatatattagcctctgaccgcacttccggcggg

SEQ ID NO: 662 - DNA, 10020 bp, Artificial Sequence
  Synthetic Oligonucleotide
gccggaagtgcggtcagaggctaatatatcatagctgtatagctaagacaagaaaatttcttaatttttcgattttcttgattttttcacagcttctttttgtcgggatgtatgcgccacagggacgatatattgttggggtgggttctacgacatgaacatctggagccccaagaagcgagacgagaaattgaatcacaggcgcgacaatcccgtcaaacgagtgctggtcaagcacccgggcgactggccgtggtcgcgctgcggcgggaggttctatttctggaatgatggttcgatcttgagcatggacaagaggctatgaaggtgtcgacatgccgaggggcgcatacatcccgacaaaaacccgtcgggacgtatgcgccacccgcgaaatcgatcgcaagattccctccgaatcggaacgccgcggaggcatcaaagcttctgcgcttagtcaacggcgcgccttgcagcctgtgaagtgtgggctaagcggacgcgataaccgttgtcgtggtcttcgggccttgcctttgccgcgtcccgggtgtataccttcgccatgattgtcctgtggtagctacgcagcggacggtccggtccccccggggcgcgacgggcctgccacccgcctcttgcccaggcaaggaggaagccgtggagtacaacctgctcgaagaaaagtggattcccgttctgtggaaagatgggcacagcggtcgcgtgggcattagtgaggcccttaggcaagcaggccggattcgccaaatcgcggccagcaacccaatggaccgcctggccatcctgcgtttcctgcttgcgttgctctattggtgcaaagggaatcccccggacgacaagaactcgatttcttcgtttccctctgattggttcaagaaactcgatgacaacaaagactgtttcaaccttcagggcgatgggaagcggttttaccaacgcaagcctaaccgacttgagaagaagctgtccgtcaactatctgatgcaagaagtgccgaccggcacaaacttctggcacttccggcatgggacagatttcagaaacggcttatgtccggcatgctgcgcaatgggcttgttgcgccttccgctctttgctacgtcggccgggcgcggcaagcccccgggcgtcaatcaaaaaccgccgatctacatcgtgccgatgggcgactgcctttccgaaaccctgcgcctctcatggcggaagacgtcggagatgaacctgggcacgcccacatgggaaaatccggacataagcctccctcaacacggcaatgttccattattgataggattaacgtgggtaccgcggcgcgtctggttagacactccggagacaccagagtccaactgcatcgcctgcgggcgcagggaggctctgatacgtcaatgtgtctttgcgggtattgggagcacaaagacaggcgaaggcagtctggcacgaatctggaacgacccgcacaccatcagcgaaggcgacgagattgtgaagcctttcagcgcgcttggcccggccgacgctgcggctgggaagtggacgaaggtcgtggcgggaatcctgtgcggggaaaagccgaaggggaacagtaagttgtgggtcgtcagctttgcgacagtgcagaacgacaaatacctggaagcagccgagcgggagattcaattcttggccgcgctcgacgacgtgaaggttcaggcgagtttgcaagaaatccaggcgtggcagaaggaaggctggaagctcgttggcagagccaaaccgcgagagacttcacgaaacagaggacaccttgaaattctctccgcagtcgccgctgttcgtccccaagccgaggcaacggtttccggaaaaatcgacgagatgatcgcagaaggcggtaaggcatgggaagaggcggcccaggaatatcgtccgttgatggccgccgtcgccaaatcgctttccccgggctacacaaccgcttccctccggaggcgacaagaaattgccgctgtaaagccggacatgcggccaaagagaaacaacaaagacgaagggggggacaagtgactccaacggagcagtacgtcgaagttctgactcgactgaaacccggtgagctcgggctcttgcgcaaccatgccgggcaagggctcgacgaatcggtagagggctttgaccttttcgcaggcctttggtggccgctgcgggcgcaaacccaacgggcgcctcgccgtgaggtggcctggcttgtcgccaaactctacgccctccggcccctcgagcattcaccccgcgagaccctcgctcgccagctcgggcgatcccggccgggcgagaaaacagcgcggcagcgtttcgagcaacgcttcgacaggatgctcacgctgccgcttgctgaaatcgaacccgccctacagtgggcaatcgacctcatagcttccaagcacctcgaactcgactgggtgcggctgacgaacgatctttccatctgggaacgcgaatccacccggctcaaatgggccgaggaatttttgaactgtccaagaggaggagagtcatgttgatccagattcacgccattcagaatcacagcccggccaacctgaaccgggatgacctgggcgcgcccaagacttgcttttttggcggagtcttgcgctcccgtatttccagccagtgccttaagcgcagcatccgcatgagtgaggagttcagacaattgctgggcggagttcgcacccgccagttggcgaaagagattgcggaaaaggtgacgggcaaagacgtcaggaagcgagcggagaacattctcaaagcctgcgggctggagcctaagaaagcaaaaaaacaggaaggagaagacgaacaggaaagtgctgagaggagcaagatgctggtttacaccacccaagaggcgattacacgcatggccgaactcctccagcagggcgacggaaaaacggacgaggccttggcagcggagttcggcaagctcatcagtgaatccgtcgccgtgccggacatggcgctgagcggcaggatgcttgaaacgggagtcctcaaagacacgacggttgaggcatcgcttcaagtcgcccatgccatttccacccatgaggcccggcccgaggtggactactatgtcgccgccgatgatgtccccggcgaggacgcgggcgcaggttacgtggatgaagccatgttcggttcggcatgtttctacaagtatttctccattcattgggaaacgctggtcaaaaacctgaagcccttcgggacgaatcacgaaaaactggcggcccataccgtcggcgccttcattcgcgccgcggccttggccaaccccacgggaaaacaaaatagttttgccgcgcacaaccctcctgacgggatgttggtggaagtcagaaacactcccatcagctacgccaacgccttcgccaaaccggcggctcctcagggcgaacgggacatcatctcgcagagcgtggcgcagcttgcccattatgtgaacgacatagatacgggatacggcaagccgacgaagcggttctggttctctccaaatctccgctatccgttgacggctaccaccacggagagcgaagacggaaaacagaaacagcgtgaggtcccgcttgccgacaaagatgttaagtctcttgacgaactgatagcggctgtactcaaggaaatcggttacgactggcaggaggccaagaaagtggtcctgaatccggaggtgccccatgagcgcaaagacgctgctacttcggcttgaaggtcctcttcaggcatggggcgatcagcaatccaagttcgtcattcggcgcacggccgaggcgccgaccaagtccggcgtcatcgggatgctttgcgcggcattgggcgtttcccggccagaggcccgcgaaggctggcttccaaggctggcccggctgcgcatgggcgtacgcgtcgatgcgccaggggtccgctggtgggattatcacacggtgggtgcggggatgccgatgcgtaccgccgaggggggaaccaagtccggagccatgctcacccgccgcgaatacctttgcgacgcctcgtttctcgtcgctcttcagggcgaaccggacctcattgaggaactggaggcggcaatcaaagcgcccaagtggacactctacctcggcagaaagtgctgccccccttgccgccctctgctggagcatccgggaggtgaattccccgacttgctttctgccctcgaatcggtcccctggcgtcggcggctgaaggacgatccccagccgcgacccgtcgattgcctgcttgattgggaacccaccaacgagcagcccgaggcgcccgatgatgcgctcgtctggtacgacgtgccgttgacattcgagccgccgtcgcaccaaccccgattcgtcatccgcaggcagttgcgcgtcggagcggacggcgacgtaacacttgcggtgcagccaccgcagagcgacacgccaccgcctccgcgcccaagagcggattacacgaacacagagtacaaaaaccgacgcaaggagcggctcgacgacgactatcacttgtgcgttttttgcaagtctcccgccagcaccgtgcagcacatcacgtaccgccgcgcgggcggcggcgaactccgggacgatttgcgctccctctgccgcctctgccacgacgccgtgaccatgatcgagtacgggctcggaatgggcttggaccgcatcaaccccgaagagccccgttggcgcgacaagatcatcgagaagcgggaagagattatcaggttccgctctctggagactcgccgcagacgccttgccgctgaggaggtggaatagccatgtacctctcctgcctcttgattgacgtcggcaccaaccccgaccgccccaggcccgggcggctctggctgcgaaacctccatcacgtccaccagcgcctttgcatggcgtttccatccaaagaccgaatatcccacgatccccacttcctcaagcctttcaaacccgcggactttgccaacaaccaggtccatgtaagacgtgacggcgactccggctttctcttccgcatcgacccgcaaccgggcgggcgggtcgtgatcctcgtccagtctaactctgccgtaaagcctgactggggctacgccttccacaacgcccgttttcttctgaatcctctagccgctccccctcaggtgcaggaattcgacccccgctttgagaagggtcagcggcttcgcttccgtatccgcgccaatctgagtaagaagataaaaaccagcacagagggcgttgatcttacgaggacgcgagaggggacagataagcggggccgcccgaaggcccaaggcaaacgcgtggcgctgacctgggacaaggaccagaaccgcgacgatgtgatacgaaaatggttcgccggcaagggcggccaaggtggattccaagtggaaactttccgggtcttgcagatcgggtggggcgcaggagaccgatccgacccgaggccgacgggcggccgcatgaaatttcgctcggcgttattggaggggacgcttacggttgaggacgcggacagcttcagagaaaccatcgtgggcggcgttgggcacggcaaagccttcggcttcggcctgctttccgtggcgccgctctcgctgtagcggcggtctccgaccgccggtacgtcgatcggagatcgacgctacaatcccttgtcgatcggggatccgtgcaacatttcttgagcggagatcgagccaatatgaaattcaaaccccgcttgcggcgactggactggctctatacgggcagcccaatctactatctcacgctgtgtacgcaggaccgcaaacgctcgttggcaaatcctgcgattcaccgggaattcacgagattctccgaacgggcgagcgattttcttgtttgggtcgggttcttcatgatcatgcctgatcacatccatcttttcgccggcttttgtcgtgagtccccacctttagggaaatggatcaaggcgctgcgcggggatttatccaaagtcctccgggaagatgagggcgagggcacacattgggagaaagactttttcgatcacgtcctgagatcgcaagaatcctatcgggagaaatatgaatatgtccggcagaatccggtccgggccggtttagtcaagcgcccggaagattggccgtaccagggtgagatccatcgcctggttttgtagcggcggtctccgaccgccgtaacgtcgatcggagatcgactacaaccccggtcgatcggagatcgacgctacaaccgccgtcgatcggagatcgacgctacagcacgggctggaggctctgtgagaattcaagatctccacgttctacccaagttcagtgacgggtggagttatctgtacgtcgagcattgccacgtcgatcaggaagagcgggccattgccgtccacgatcaagccgggaaggtgccggtcccctgtgccaatctggctctcctgatgttgggtccgggcgtctcgattactcacgccgccatctccgtgttggcggaccatgggtgcctggtggcttggtgcggggaggagggagtccgcttctacgccgtgggcatgggcgagacgcgcaacgcggccaacttcctgcatcaggcgaggctgtgggcggaccagggtttccatatgcaggtggtgcgccgcctctatcagttgcgattttcggagaagttcgaccctgccctgaccctccagcaaatccgcggcatggagggcgtgcgggtgcgcgatgcctacgccaaggccgcccaggaagccggcatcacgtggtcgggccgcagctataaacgcgatgagtggagcaaggcggaccctgccaaccgagccttgtccgccgctaactcctgcctatatggaatctgccatgctgccatcgtgtcagcaggtttttcgcccgcactcgggtttatccacaccggcaagatgctgtccttcgtctacgatctcgccgacctgtacaaggctgaaattaccgttccagtggcatttcgcgccgccgccgaggggacgggacagttggaacgccgggtgcgcatcacctgccgcgatcagttcgtatccacgcggcttctggagagaatcatcccggatgtccaaagggcgttgatgctggcaaaagcgacggcctgggacactaccttcgacctggatgccgccgcccccggcttcctctgggacaatctggaaggagaggtcgaaggcggccgcctgctagcccccgaaatcggtgaaacggagcccggcgatggtggtcctgattcttgagcgcgtccccccagggttgcgaggcgagctgactcgctggtttttggaacctcaggcgggagtgttcgtgggacgcgtctccgccatggtccgtgatcggctctgggaaaaagcctgcagccaggccaagggaggcgggtgcttgattatctattcaagcgacaatgaacagggctttcgagtccgaacctggggccaaacagctcgggtcatcgatgacttcgagggcctttttctcgttcgcatgccgcagaatcaataatttagtaagtgttgtccccacgcgcgtgggggtgaaccgccggggctgaaggtttcatgggctggaaagaagttgtccccacgcgcgtgggggtgaaccgatatgctgcatgtgccggggctggcgcttgatgttgtccccacgcgcgtgggggtgaaccggtatcggcgagtggcaaggcgaatccacttaggttgtccccacgcgcgtgggggtgaaccgacctccgagggcgcggggcgcgtgctggcgatgttgtccccacgcgcgtgggggtgaaccggctggggccgacgcgcgcttgtgagactgcgggttgtccccacgcgcgtgggggtgaaccgcgggagaactttgaaggcacggtcctcgatcacgttgtccccacgcgcgtgggggtgaaccggcgcaggttaaggctgaggccaaggccgatgcgttgtccccacgcgcgtgggggtgaaccgtaatggtggcttgcaccttctgctcgaccgatgttgtccccacgcgcgtgggggtgaaccgcagcgggccgtgttggaggagaaggtcgcggagttgtccccacgcgcgtgggggtgaaccgttcccagccgcaggcaggatcaccgtaccccagttgtccccacgcgcgtgggggtgaaccgcaaaacaatatcaagaccaagcacttggatgtgttgtccccacgcgcgtgggggtgaaccgcatcgggcagcacagcggccttataccccaaagttgtccccacgcgcgtgggggtgaaccggcagctcgcggcgattcgcattgccgctgaaagttgtccccacgcgcgtgggggtgaaccggggagtcgtgagtgtagttacaggcagggttcgttgtccccacgcgcgtgggggtgaaccgcttctgcatcttataaagaacgccagtttgaagttgtccccacgcgcgtgggggtgaaccggtacggttcccaggggaattatttcttggggtgttgtccccacgcgcgtgggggtgaaccgatgtagcttgatatgggtgtggtgtcgcagaagttgtccccacgcgcgtgggggtgaaccggcggcgcgcacattccaacctcgtccgtatccgttgtccccacgcgcgtgggggtgaaccggcggacacggcggatgtgacgaatatggagtcgttgtccccacgcgcgtgggggtgaaccggtctctcgaaaaggaaagccaactttcagcttgttgtccccacgcgcgtgggggtgaaccgctcttggcatagagcttagtgagtttgatgaagttgtccccacgcgcgtgggggtgaaccgcctttgccctccgagacgcaacagctccattcgttgtccccacgcgcgtgggggtgaaccggcgagcgcaggtctaagcgaccgcgacaaagagttgtccccacgcgcgtgggggtgaaccggtgatggacacttcctaaaatggcattaagtcgttgtccccacgcgcgtgggggtgaaccgcagcgggtagcgcagacttcgtgcatatcgaagtctgcggcttttgccgccgtgaatcttgaaaagccgcagacctgcaaaaagcgcaggtctgcgctacccactgcctggccatcctggagaattgaaagtccctccagtaaagcggcgaagcgcaggatttccggctgcttcaatcgcttgcgacgctcaccggtcagtagcgcgttggtaatttcgagcccccatacggctggaacaacgagcgtctgcccttcagtgccaccaggaccccgtccgcgtattcgctcgcttcatccggggagcaccaggcaagcgccaccgacgcatgcaccacaacgccgctcaaaatcgccgtccctcaattatcatttcgcggacgctcatggtgtggggctttacgcgcttgcgcaacgcgcgcatgccctcgacaatctcctcgtgcgtcagctttcgatccgagtctcgaaccggcaccagcattgccgccggaacgccgtgtcttgtaatcgtgatcctttcgcaacccatcttgtccagctaaagctccgcatcagctatagtctccctctggccgtgcggcccgccccttgcggcgcaaccaaaccgaagctcaaaacgcgacatcgtcctcgtagcgcgaccggacactgaaggtaaaggttcgccacccgtctcccctgcaaaaccgggtcgcggagtactattgctttgcacagcgggggacgaccgaggcgctacggaagaggttggttcgcgaaactgagcaagagacccctcacccgtcccgctccggctggtggaagcgccggagcgggacacgctcagccccaagggagagggctatggattcagttctacgcgcggtgtccagtcaaagatgtgggacacgctcagccccaagggagagggctatgga

SEQ ID NO: 663 - DNA, 9886 bp, Artificial Sequence
  Synthetic Oligonucleotide
gtgagcgagaccggaaggaccgtgaacggaggctgagtcctcgtccgaccgtcaaaaaccccgtccggacggcccagggccaagcccgaccaccccactcacggattcggggtcgcctttttaagggatcgagccgcagcgcccgcggcgagcacgagagcagcaggaatctgaggaggtaccgtgtggacgccaaggtcatcgggttcaagctagaacgggagaccaagaacacggtgcggtacgaagaagagaccgcagggcaaccacctgcagtcggtacgctatatgtgcaaaagtgggcgctcggcactccggtcccagcgcgtttgaaactgacgctagaggtcgtaggataggccgctgtagacacgacgttgcaatagtgctttgttcgcccaagcgagagttcggtctcaatggtggaaacaaaggattccttcgtcttcctgatcgctacctgactcccaagattccctctcttttgactttagtgcttagttgcagaagaccgttccctgaggctctcgaagggaacggggcgtttccacgaggagctgaatgaacgctattatttgccacttagcactagttgatccgtttggaccgagctaggactacgcatcgatttcctcattcgatttgtcagctttcttgtttacgtaagcgggtacgctgttctctggaagtgcctttccaagggctgactggttggagacggaagcctcaacagctgtttgctcaatcttgtcaacctatggtataagaatgtgcgttctaatacctttgcatcgttaacacggattcactcccaggacggcggtgaccacagtggaaaaggctgctgggcttattgcggccaagtttcgacatagtgcggatggacaggacacttaccaccccctgctttgccacctgattgatgtggctgtggttgcggaggccctctgggaggagtgcttcgctaaacgtgcgcgggagcatctgacggagagtctccaactcgacagcatatccaccaaacagtgggtcgcatttttggccgggatccacgatctcggcaaggccactccagtcttccaggcgaagggcagccgggatcgacgttcgacaccgccatggcttgtgaacactcccctcgaattccggcctttatctttaggagataaggacccatggcacggcacggtgacggccgcctgcctcccagacatccttagtcgccagttggacgtttcccaagagagtgcagaccgcctcgccgtgatcgcaggaggccaccacggggttttcccttcggcaacgtcccgcaggaacgcgcgcattcccaccgctcggggtgagccccggcggggcgagcctaacccctggccgagcattcgggatgagctcgccactaccctcgccagtcttctcggccttgtcggtcttgagagttcgccgcagctgccctccaacgccgcgagcatgctgctggccggattcatctccgtcgcggactggatcggctccatcgatgacagcgcattcttcccatatgcgccggatggccccgacgatctccctgcgtacctggccgaccggaagctgcgggctcacgacgcgatcaggctcttgcactgggatgcctggcctcggcagagcaagctgcctcgtttcgaagaactctttcccaaaatgtcgccaaggcctcttcaggtggccacggagcaggtcgcgcccgaggtcgtggcacccggtctcgtaatccttgaagctcccatgggcgaggggaagactgaggcggccttctatcttgctgactactggaacgcctcgggtttccgaggttcgtacatagccatgccaacccaggcaaccagcaaccagctgcatcagcggttcgagcggttccttcgcggccggtacgggaccgaggaaaagatcaacatgcagcttctgcacggacacgccgctctgaacacggaaatcaagcttttggagaacggccatgccttcccagcgccatccggcattgatcccggcagcggcgagctggaagcgaccgtgggcgcaggggagtggttcacctaccgcaagcgaggcctgcttgctcccttcggtgtcggcaccgtcgatcaagcgctcctgtcggttctccaggtgaagcacgggtttgtgcgactcttcgggctggccggcaagacggtggtcgtggacgaggtccatgcctacgacgcgtacatgacgaccctcttggagcgcctcctggaatggctggcggcgctcggctcgccggtcgtactcctctccgcaacactgccaaccgtaaggaggcaggcgctcgtgaacgcgtatttgagcggtctcggccgcctgcccgtagcggagcttcctaacgaggcatatccgcggatcacctggacaggggtcgtgggcgtgagagtgcgcacggtcgaggctgctgtggagacccgacgacggctcggcctccgatggctgcccttcggtatcgagagtctaccggcacacttgctcggccagctcagggatggaggctgcgccgcggtcatctgcaacaccgtcaatcgcgcccaggaggtccactgcccttcgggacgcctatgccgccctcccggaagaggagcgtccaagccttgacctgttccatgcccgcttcctgttcaaagaccgcaaggaacgtgaggagcgctgcctgaagcgcttcggcaaacccgataaagatgacggacccaccgcagccagaccatggcgggctatcctggtggccacccaggtcatcgagcagagtctggacctggactttgacgtcatggtgagcgagatggcgccggttgacctcctcttgcagcggtcagggcgccttcagcgccaccaccgggcggatcggcgcgccaccagtgaacccgtgctccaggtcctgtcgcccacgctgggggacgacggcacccccgcgttcgagcgcgccaccacctacgtctatgatgagcacatcctcctccgcacctggcacgtcctccaggatcgggaggccatcgccgttcctgaggatatcgagggtttgatcgaggaggtgtaccgcgaatcgggcgaaccgccagacggcgcgccaggacacctcgccgcccgctggcacagcaccttcgccgagatgaagaggaagcggcaacgtgagcgtgacaaagcaatggtgccccgcattccgtcgccttcaacaggcgcaagattggaagactatacgcgcgacccgcgtgaagaggatgctgccgaccttcatcccgctctgcaggcgctgacgcgcctcgccgagccttcagtggaggttgtgttgctgcccgcgaactcccccttggatgcggcagcggacgctgttccctccctggcaacttgcagggaacttctccgtcactccgtctccatcactgccgctgatgttgtacatctattgctcgcacttcccgtgccccacccgtggaagcgctccggactgttacgccgcttgcggctgctctctctcgatgaaaacaacgagtgccgggtgggaaatgggatactgcggtatgacaccagcctcggtttgcaaatcatccgtctctaacgaaggaggtgcccatgtcagagtcgttctcgttcaacctcctcgatgaaccgtggataccgtgcctgaacaatgacgggaagctccgtcgaatcggcgtcagagaggcacttacgcaagcgggcacaatccggcaaatcgcggcaagcaatcccatggatcggctagcgatcctccggttcctgctggcattgctgtattggtgtaaggggaatccgccaacagaagcggagagtgcgcccgatgactcgtttcccacggaatggttcgcgaagctggaccagaacagggattgcttcaacctgctcggggagggaagaaggttttatcagtacaggggaaaacgcgaaatgccgctcacggcaaactatctggtccacgagatacccacgggcaccaatctctggcacttccgacacgccaccgatggagtggatggcctttgtcctgcctgctgcgctttgggcctgttgcggctgccgttgtttgcaacgtccggggggagcggcaagcctccaggcatcaacatgaaacccccactttatgtcatacctgtcggcgactcccttgcaaagacgctgcggctctcttggtgctccgcgccgagtctgggaacgccggcatgggagaagccggacatctcgttgccaaagactggcgaggtgccgttgttaacaggactatcgtggctgcccaggcgggtatggctcggcaatccagaggaatccgaagccacctgcatctcgtgtggtcgcaagaatcggttgataacatccagcgttttcgccggcatcggcagtatgaaaaccgatgatgaaactcccaaccgcctttggcgggacccccatgtcatctatgataacagcggcaagagcaaagtcacgaccctacacgctaggaacgccctgggcgccaccgatgcgggggctggccagtgggcgtcaatcgtagctgggatgttccaacagcaaagcgcccccgctgcaacggacttgcccaatcaggacagttgggccgagggtggcaaatacagcatatgggtcgtcggcttctccaccgtgcagaacgacaagtatctggaggctattgagtacacactgtctctccctgcctcagcaggtcaatctgtgaccgctgtgcaactcttggaacgatggcaagaagagaacgcacgccttgcccgcaaagtctggccgccagatgagcaatggtcttaccgcaagcatcccgagattgcgtcagccatcgccgccgttcgtccccatgtggaaggcaaggtctctgccaaagtgggggagctgcttaccggcggcgatgccgcatggctggaggccgccagcgagtatcgccccatgatggaggcagtcgccaggtctctctacccaggctttacgactgcggctgttgaatggcggaagcacattgctgacacgctgccggatatgaccaccacagggcctacaaaaaaggccgcaagaaagaaaggaggcgcgccatgagcccaacacccacggagcagtacattggcgttctggcaaagctgaagcctggcgacctggggctgctacgcagccatgccgggcaagggctggacaaatcggtgcatgggtttgacctgttcacgggcctttggtggccgctgcggcagagaaaccaagcagcgcctgaacgcgaggtgacctggctgatcgtgaagctttacgctcgctgtccgctcctccagtcgcctggcgataccctcgcccggcaactggcccgttgccagccaagcaaggagccagagcgtcagcgctaccggcagcgctttgaccggatgctcatgctgcccatcatcaagatggagcctgtgctgcaaggggcagtcgccatgatcgcctcaaaggatctcaagcttgattgggtgaaactcacggatgacctgtccatctgggaacgggaacgtacccggctcaggtgggcggaacaatttctggaaagcaacgaaaggacatagccatgctcattgaaatccacatcatccagaaccacagcccaaacaacctcaatcgggacgacctcggcgcgcccaagacctgctacttcggcggcgtcctgcgctcacgcatctccagccaggccatcaaacgcagcatccgcatgagcgatgagttcagcaagctacttggcggcgttcgcacgcgacagttggcgaagctgatcgcagagaacgtaactggcaaggcggatgtccagaatcgcgctgcacgaattctccaagcatgtggcatcgcaccgaaagatgagtcaagaagcgatatgctcgtttacacgactagggaggcggttgcccaaatggctgcgctgctacagaacgacgaaggcaagaccgatgcacagctacaaagtgatttcgggatgctcattagggaacgggtggctgtgccggacatggccctcagtggaagaatgctggaaaccggtgtcctgaaagacacaactgtagaagcggccctccaggtagcccacgccatttccacccatgaagcccgcccggaggtggactactacgtggcgaaggacgatgtcccaggagaggatgccggggcaggatatgtagacgaagcgatgttcgcttccgcctgcttctacaagtacttctctatccactgggaacaattggtcaagaacttgaaagcctatggggacaatcacaaagagcttgccgcccataccgtcggcgcgttcattcgcggggcggcgctggtcaatccctctggcaagcagaacagccatgcctcgcataataagcctgacggcatactgatcgagataagggacttccccattagctacgccaacgccttcgccaatccggtgtcgcacggcgagcgcgacgttatctcgcaaagcatcgcccagttgggccagtacgcccatgacctggataccggctacggcagaccgcagaagcgcttctggttctccccgaatggccgctacccgttaacggtgcgggacgataaggaggataaggacgtcgccgacaagaacctgacgtcattggaggacctggtacgcgctgtcaccgcagagatcggctacgactgggacgcggtccagagcattgccttgaatgggagatgagccgtatgagcgccaacaccctgtttctccggctggaaggccccatgcaagcctggggagaccaggaatccaagttcgtggtgcgacgaacagccgaggcccccaccaaatcgggagtgatcggtatgctgtgcgccgcgctgggcgtctcgcgccccgatgcctcctatgagtggcttccgaggttgagcgccctgcgcatgggagtccggaccgaccggccgggcgtccgctggtgggactaccacaccgtcggcgcggggatgcagatgcgcatcgccgaaggcaagaccaaagccggcgcgatgctgacgcggcgggagtacctctgcgacgccagctttctggtcgctctgcagggtgagccgacactggtcgcccgcctcgaggcggcgctgcgaaaaccccactggacaccctacttggggagaaaggcctgcccgccatcccgcccgctgttggagcgtcccgccgaggagtctggcgacctgctgactgcactttgctccgtcccgtggcgaaagcggctcgcaacagaccgtgtgccggcaaccgtggagtgtctgctcgactggcagtcgtcgctggaggagccagtagcacccgccgacgccctcgtctggtacgatgtgccgctcacttttgagcctcctgcacacgcccctagattcgtcatgcgccgccggttgcgcgtcggtatcggaggcgaggtcagcatagccgacaagcctgcccagaatcggacgctatcgcctccgcgaccccgcgcggactaccggaataccgagtatcgcaatgcccgcgctaagcgcctgaacgacgactatggcctctgcgtgttctgcaaaagtcccgccaccaccgtgcagcacatcacctaccgtcgggcgggaggcgacgaaacccaggacgacctccgctcactctgccggctttgtcatgacgcggtgacgatgatcgaatacggctatggcatgggcatggatcgcatcaaccctgaggagctacgctggcgggaagacattatccagaagcgtcaagagatcatccaattccgctcgctggagacccgacgacgtcgcctcagccctgaggaggtgtagtagccatgtacctatcgtgcctcttgatcaacgtcggagataacccggaccgcccgcgccccggtcggctgtggctccgcaacctctatcgagttcaccagcgcctgtgcatggcgtttccgactgcatccagggtgtccgctgatccggacttccttcagcctttcaacccggacgatttcgggccaaagccagtacatgccgctcggagcatggatgctggcttcctgttccgcattgaccctcaacccagtggccgagttgtgattcttgtgcagtctgcaagcatgcccgactgggactacgctttccataatgcggactatctcctggcggctccccccagcacgaaagcatttgaaccgtccgccacaaaggagcagcgtctccaattccgtcttgtggcgaatcccacaaagcgattgagccagaactcacgggaaaaggacggccaacccgtcaaatcggaatggattgggaaacgagtccccgttccaaccgaaaagctagaggagtggctagcgcagcgagctgcacctgccggattccgcgtagagaagctccttagcgtacaacctggttacgtccacgcctccaaggatggcggcggtgggggaaaccgacttcgctccgtccggtatgacggtatcctccaagtcaccgatcccgcacctttccaagataccctcatacgcggcattggtcccgcgaaggcttttggctgtggtctcctgtcagtcgccccgccagggaggtgaaccatgaaagacttgcacgcgttacccaagatacgggatagctggagctacttgtacgtggagcattgccgcatcgatcaggaggacaaggccattgccctgcacgatgcccagggcgtcaccgccgtcccctgcgcgagtctgtcgttactgatgctcgggccgggcaccagaatcacccatgccgccatccatgtcctggcggagaacggctgcatggtcttatggacgggggaagagggcgtgcgctgttatgccgtcggactgggcgaaacccggtcggcccggcgcctgctccatcaggcctacctctgtacccacccttccctgcggcttcaggtggcgcggcgactttatgagatgcggtttcccgatcccctggaccctggcctcagcttgcagcaaatacggggtaaagagggcatccgtgtccgggaggcatatgcccaggccagccgcgccaccgggatcccctggtccggacgggcctaccgacggggggactggagtgtcgccgaccctatgaaccgggcgctctccgcagccaatagctgtctctacggaatttgtcatgccgccatcgtctctgccgggtactccccagccctgggtttcgtccatacgggcaagatgctctccttcgtttacgacatcgccgatctctacaaggtcgacttcagcatcccgattgcctttggggctgccgaagaagggtttcatcaactggagacgcgggtgcggcaggcaagcagggatgccttccacaaacagcggctcttggcccgtataatccccgatattgatcgcgccctcggcgtgaagcctaccgagcaggatgaggacagcgcctacgacgcagacgacgccctccccggcggcctgtgggacccggaagtgggatcggtaccggggggaacaagtcatgcgagcctagcgaggtgaaatgatgctggtgctaagacttgagcgggttcctgcatcgttgcggggtgaactgacacggtggctgctggaggcctccaccgggatgtttgtgggcagggtgtctgccatggtgcgcgaacagctatggacgctggtgtgccgcagcctgaagggaggtggagcggtacttgcctatagcacggacaatgagcaggggttcgcgctgcggacatggggcactccgtcgcgggaggtggtagacttcgaggggctttcgctggtgcgggtgccgcgttctgtgcctgaggagtagtgtttttctatgtattttccagtgttgtccccacacgcgtgggggtgaaccgtcatcgtgactgttg

SEQ ID NO: 664 - DNA, 9862 bp, Artificial Sequence
  Synthetic Oligonucleotide
gataactacatcatcgccggagttgggcacccttccgccagcccaggccgcggggtcgctccaatagccgccggcatctgaagaatagacggtcagggccatgatctggcccagtaaagaaagtaaaaacaatactgctaaagcgtttttcataataaactcctttggttggctttcatagacaggctgtttaattacgtcaagagaattgttgagcccgtcacgattgactcagggtcttgtcgagacaacaatgcttccaggtcattttgtcaggcataatgccgtccatgctgaatgattcattgttaatgtccgggcaaatcgacagagtgacggggtttgaggttttcggtggcgggtttatatagggagacctccctaatttgattattcccgccctaataatcactcaaagcaaatatcttgacaatgatctttattcataatagaaggtttccattgagcaaatggagcatattatgtacaatcttctttgtgataattgggtaaatgtgatctatctttcgggcaaaccagatagaatatctttagtgcagactcttaaagatgcacacaatctgcaactggcatacagcaaccccatggacaggtttgctgtcttcagattcctgcttgctcttggctactggtgtttcgctaacaccaacgaggcccctgaacctgataagccgcttccggtctcctggataccctggctggaggaaaacaaggagtatttcgagctctttggggatggcccccggttttaccaagacaatccaagttccaggatcagagccattaccgaccttattcatgagataccaacagctcataatctatgccatttcaatcatgtcaccgactatatcgatgggctctgcgaagcttgctgcatcaagggactgctgagattacctgtctttaccactgtcggtggcagagggataggtgcgggaatcaacaacactcctccattttacctgctctggcatgcaaatgacctcgctggcatgctggctcataattggcaaccctgggataatatggggattccggcatggttgggttcttttcaaaaagaaagcaaggaagtgggcttacttgccggaatgacctggctgccgcgcaaggtgcatctgcatgatcccgtcccaggtcaggcagcatgtagttcctgcggcttaccctccgaagctctcgtctattcctgcagcatagaagtggagccagtaccggaaggccttgagtggaaagaccctcatggtgtttacaccgatctgaaaaaaagcctccagtccaaaatcaaactgatgtccaatgatagatacactttcgcggaccgggattggtatagtccgctgttcagctatttgcgcgcggaaggaaactccagaaaaggaaaactctggttggttggatttgccagtgataaagcaaaaagcatagacatctgggacaagatcatcgagtttgagggaactgatacaaatgatgagttgctggctcaattggcaaacagggctactgcccttaatatcatgcgcaagatatctctcagaggtgatttcaaaaagtcagtgggcacaccccagattgctgacattatcccccacgccgaaagcagaattgccatcaatgcgggtaaaatgactgagaacaggggctattcctggcaggatgccgatgctgaatacagagaactgctcacaaaggttgcgtgctctttggagccggctcaaacagtggacgccaggctcaagagaggtaaattcatttcccgcaagccctggccaattataccagaatccaaaacaaaacccgcagagggggaccaaaatgaatagaggaacagttgacttcattacaagcctggagaacctcaaagaaggcgatttgggcattcttagaaaactcaggggagcccggcttgatgaagagcttcccggatttgacctttttacagccctctggtggcctttgcggcaaaagaatcaacgcgcccccaagcgtgaagtggcttggttgatcgccaaactttttgctgaattccgctttgaacagcgcgaggaagccactttgcccatacttatgggaagcatttgccggaaacttggaccaaaaaaggaattaccccgtgtactggcacgttttgatcaacttgcatcgcttgacattatgcatatggaagaaccgctgttggtcatcatgggtattttgcgaaagcaccagcaggtctactttgactgggtagatctgacagatgttctgtcattttgggagcaggagactgtcaaaagagaatggtcggattcatttactaaagcatacaagatcaacaaggaggattcagatgttgattgaaattcatatgattcagaatcacagcccggcaaatcttaaccgggacgacttgggcgcccccaagacctgttatttcggtggagtattacgttcgcgcatctccagccagtgcatcaagcgcagcatccgttttgccccggagttcgcagaccttagaggaggtatccgaacaaggcgtctggcagagaaacttgaggaaatgctggaaaacaaagataagaagctggttgcaaagttcctggaagcctgtggagttaaaaccaaatcttccaagaaagctggaaaaaagtccgaacagatacccgcggaaaccgatgaagctcaggaagagcagcaggcggctgatacgtcggatatgctgatttttaccacctatgatgccctacgccaaatggccgtcctgctttccaactccaatctcggtgaaagtgaaaaactgcttgggtttaaggaactacttacaaactgcgtccattctcctgatatagcactttgcggcaggatgttggagaccaaagagcttaaaaacactggcgtggaatgcgctttgcaggttgcacatgcgctttccacccacattgccaggccggagatcgactactttgtagcggccgatgatgttcctggtgaagacgccggagcgggtcatattggcgaatccatgtttgcctcagcctgtttctacaaatacttctccattgattgggagcaattggtcaagaacctgaaaggagacactcatctggcagcccacaccgtgggtgcctttctcctcgccgctgccaaaaccaaccccagtggcaaacagaacagcttcgccgctcataacttgccagatggcatacttgtcgagttcaaaaattcccctattagctacgccaacgcattcgtcaggccagtttccctggtcaaggattcggacctggtggagcaaagcatcggccagctttccaactacgtgaacgacatcaggcttggctattatgatgagcaatccccagttatcagcttctggttttctccaaacaatcgctattcccttggcaaagagcatcccaaactggcctccaggagcattggcaacctcaatgagcttgtaagcgccgtgttggattatattggcagcttcgagtgggaagaagttcggaaaagcaaggcttatgttggcgggtgacatgagtgctccacccaataccttattcttgcgcttggagggggctttgcagtcctggggcagcaacgaggctaagtttgctttgcgcaggactgccgacgctccgacaaaatctggtgtcctgggactgctctgcgcggcaatgggaattgggcgcgcggaggctgctgattcatggctcccaaaacttgccaacctgcgcatgggcgtgcggatagaccgccccggcatacgctggtgggatttccacactgtgggcgcgggacaaagaatgcgcatggcagagctgaaggcacccaagaaaccttccatggttggagcggccctggctgagaccttgacaccaaacaaaatacaaaccagggcagagactttgctctcacgccgcgaatatcttgccgacgccagttttctggtcgccttgcaaggtgagccggaacttgtggaaaagctctccaccgctctggccaagccggtctgggctatttatctggggcgcaaatcctgtcccccttcacgtcccgtaggcgagcatcctccgggcttttacaacactttggaggaggcgctgtccgcggttcccctgcaaaagcgctggcacaatgaacccctgccgcaaacactgccttgcgtcatggactggattcccagccgtgacggagaacatgcacctgatgacgcagagattcattacgatctgccggtttcttttcagccgcccagacatttgccgcgcttcgtgatcaggcgtgagctgtttgtgggagaggatgtgcaagtgagcagggaaaccggaaccaacgtttggaggcccaaaggaacccgggcggattatagcaattccgagtataagaaggtcagggcggagcggcttgtgatggatcatgccgcgtgcatggtgtgcaaagctcctgccacgacagttcaacacgtggattaccgcagggcgggaggcaaggaagtaccggaagatctgcgggcgctgtgccgcctctgccacgacgcctgcaccatgctggaatacggttccggcatgaccaccgatcgcatcgacccctgcgaccccatctggcgggagcgtattttgtcaaagcgcaaagaaatagtcgagttccgttcgcgcgggcagcgtttccgcaaaatgaaaccagaggaggaagacggatgatctacttgtccaggctattgatcgatactggaggcaatccagaccgcccccgccccggcagaaagtggctggacaatgtctataacgtccaccgccgcctctccatggcgtttccttcaggtttacgccgggagcaggatccgcatttcctgaagcccttttcgccaaacgacttccaaaaaactcccttccttttccgggtcgataacaacatcgacggaaacgataaaagggcgattattatcgtccagtccgttcttgagccggattgggattattgcttccaaaacgcgcttgatttcctggccgcgccgccggaaacaaaggagtataatccagagtttaaagcgggacaactgctgcggttcaggctgcgggtaaacgccagcgtacgccgtcatattcctgaaatggtgcaacaggacggtcaaaccatagaaactggcaaaatcctgcacaaaagggtttctcttacctgggatgcttcttccaccccggatcaggcccttgccgactggctggctgccaaaagcccaaagctgggcttcacccttcagcgctgtgagcttcttcaactgggttgggtttatggctccaagccagaaccaaaaaatgtcaaagtaaaggaacaggggcagggctactggcgtgaacacacatacaatcctctgcgcttccgtgcggctctcctggagggagttctcgaggtggatgacccgaaactgttcctggaaacgcttagcagcggcattggaaaagcgaaaagtttcggctttggcctgctgtcagttctgccaatcaggaatgatggataaagacctgcactctattccccggatcagagaccggcttagctatctctatgtggagcatgccaaaattgaccagaacgggcaagccatcgccattcacgacgctctgggtgaaaccccggttccttgtgccggcttggctatgctgatgctgggaccgggcataaccatcacacatgcggcaatactttcactggctgcctgtggctgtctcgtagcctgggtgggagaacatggcgtcaggttctatgccgcaggcacaggtacaacccgcagcgctgtcaatcttatgaaacaggcaaagtactgggcagacccggttttgcatctacgggttgtacgcgccatgtaccagttaaggtttcaggatgagctttctccagatttaactttgaaccagatcaggggcaaggaaggtgcccgggtgcgcgatacatatttccaactctcccaaaagtatggtgtgcccatgcagggcagaaactatcaaagagacaactggaataaagcagaccccataaaccgggctttatctgtggcaaactcatgcctctacggcatatcgcacgctgccatcgttgctgcaggattctctcccggattgggctttgtccacactggcaagcaactgtcatttgtctatgatatcgcggatctatacaaaatggagatggctgctcccgccgcattccgggcgaccgctgaagggatcggcgaactcgaccgcagagtcaggcttgcctgccgtgatgaattccacaggcagaatctactcaaacgcattgtcgctgacattagttctctcttcggtgatattatgccagaggatagcccggatgactgttttgccgaagaaccagccttgcctggaggactctggtctccagatggagaagtttccccaggcggcatatcttacgggcaggatgatctgccaaaggaagattgatggtggttttggttttggaaaacgtgccaaactccttgcggggtcagatcacacgttggctgctggaagtaaaggcgggggtgtttgtgggtaaagtctcagcaatggttagggacaaactgtgggataaggttagaagcaattgcagcggtgggacttgcctgatgatctggagtagccaggccgaacagggttttgatatcgaattctggggtgccgcatcaagagtcgttacggaatgggagggtatcaaactaatgaccaaacatccttgaactaaggcttgaaggagctcaatgacctgttagctctctattgatcaagtgtattccccacgcatgtgggggtgaaccgagatctcgctcatccacggctgggtggaagatgtattccccacgcatgtgggggtgaaccgccgctgcagaacatctttggcgggcaactggagtattccccacgcatgtgggggtgaaccgaaccgggtgacgtggctgatgccgatcaaccagtattccccacgcatgtgggggtgaaccggaacagctcaagacgcgcaactacaaggtcgggtattccccacgcatgtgggggtgaaccgaaccgggtgacgtggctgatgccgatcaaccagtattccccacgcatgtgggggtgaaccgcaataaaaagaagcactctacgaatgagatgagtattccccacgcatgtgggggtgaaccgacgcctataccggcccccgcgcccgcgccctcgtattccccacgcatgtgggggtgaaccggtggattaaaaacaattgattctttatcagatgtattccccacgcatgtgggggtgaaccgaaaacgatggttactactgtgttgatagctatgtattccccacgcatgtgggggtgaaccgaatctggctcttgtcggaacctccgcctttccacctaaaaaacacctttccacgaactattaattcgtggataactctaaaagtccaacctgcttcagccccaatatttgcggtcgaggctgcggtattggatggcttcggagatgtggtcggatttgatggcggccaggccttccaggtcggcgatggtgcgcgccaccttgaggatgcggtcgaagacccgggcggaatagcccagtttgtcgatcgcgtgctgcatctggctttggctgggggcatccagcgcgcagtgtttgcgcagcagtttggagttcatctgggcgttgcagaagatgccatctttggcatagcgttcccgctggatggcgcgggcgcggttgaccctggcgcggatgtcggcggagctgtcgccggaaggcaaagacgccagatcggaataggtgaccgagggcacttccacgtggatgtcgatgcggtcaagcagcgggccggagatacggctgcggtagcgttggatggcgccatattcgcaggtgcaggggtgattggggatgctggagccgaaatagccgcagggacaggggttcatggaggcgatgagcatgaattccgcgggaaaggtgaggctttgggaggcgcgggagatagtgacgatgccatcctccaggggctggcgcagcacttccagcacgccacgcttgaactctggcagttcatccagaaacagcactccgcgatgcgccagggatacctcgccggggcgggggaaggctcctcccccgatcagggcgatatcgctgacggtatgatgcgggctgcgataggggcgggtggtgaggatgccgttgtgaaaatctttggagtggcctgccacggagtggatcttggtagcttccagggcttcatccagcgagagttccggcaggatggtgggcacgcgccgggcgagcatggtcttgcccgaaccgggagggccaagcatcagcaggttgtggcctccggcggcggagacctccagggcacgcttgacctgaaactgacccttcacgtcgtgcatatccacgggaaaggcattcagggtggcaaagatctgctcgcggtcgacttctgcgggcggaatcttcgcctcgccgcgcagaaagagggccgcttccttcagcgaggtgaccgggatcacctgcaagccgtcgatgatggcggcttccccggcgttttcccagggcaggacgagggtgtcgatgccatcccgtttggcggccaaagcgatgggcagcactcccttgacggggcgcaggttgccatccagcgaaagctcgccgatgagggcggtcttggtcaggtattccaccggaatctgtttgatggactgcagcacggcgatggcgatggggaggtcgagggcggcgctgtccttgcggatgtccgccggggcgaggttgatggtgaagcggcgcacggcggcgtcccaaccggaattgcgcagggcggcgaagatgcggtcctggctttccttgaccgcgctggatgccatgcccacgatggtgaccccgaaaacctgagaggtggcgtcacactccactgtgagctgttgcccgtctattcctatcgtggtgtaagtgcgcactattccaaccatttgatcctacccttgtttggtattttgcattgtttgtcagtaaaatagcggtcggcgcaacggtcaagggaaaagtgcgggagggggtgttgattgtccacgaattacacgaattattagacgtggaaaggtggaaaagtgttttgaggtggaaaggtggaaaggtgaaatggtgaaatgaggtgtcctgaaacaagtcctcaaccaagctatatactgtgtcatcacaggcaagctcgcttaccacaggatccagtctttttgaataatcatccacaaattacacaaattaacacgaattaaaggaacagaataaggacaagcgtccagcctaaaaacaagcacagaccccaaaacaaacaccccctgactaaaagccgtgtcatcccgggcagccggtgcccctctagggtggctgacccgggatccagtcttttagaaacgtccacaaattacacaaattaacacgaattaaaagacagaataaggacaagcgtccagcctaaaaacaagcacagaccccgaaacaaaccatacaagactacatactgtgtcatcccgggcttgacccgggatccagtcttttagaaacaaccagccagcccgtaaacaaacaaccccagactaaaagagtgtcatcacggcctgcgagccgtgatccagtcttttagaaacaaccagccagcccggaaacaaagcacccccagactacacaccgcgtcatcacggcctgcgagccgtgatccagtgtccaggggtggcaaagtccgtttgccacagagaccggaggtctcttccaaacaggcaactccgttgcctctgccgaacagacttcggcagccctttaatcaca

SEQ ID NO: 665 - DNA, 9752 bp, Artificial Sequence
  Synthetic Oligonucleotide
gtccgcgaaattcgcactccttgtctccaaacttgtgcgtccacgggatatgctccgcaatcaggctgcgctcatcctccgtaaagaagcgggcgaactccggctcgtgcaacagcgcaaacgtcttcttgttaaaaccgatatccgaccggaacgagcccaccacacatacattatggtctttgaatgcgcgcgtcatagccgtcacctccgccagccgctcgacgtattcccgcgagacgactcttctatagattatgtcaatcgggagaccgcgatgcgatagaacgcgcccgtcatactcgagctcgcgcgggtccgccacgaccgcctcatacccccgctcacggcagaactctgcgaacccgacaaactcctcagatgtgcgcacctctttccagtccacaatcgctatgcgcggcgttcgcgaggccgccgaaccggcaaactcgcggtagcaatcgagcaacacctcgagcacgcgctcgcttatatcaaacgtcttcacccgatgcggagaaaaaaactcgcgcatgctcggcgccgacaagaacagtttcgcgaccttttccgccccgtccattccggcggcgccgtcggtgttcagttcggaaaattgaagcgtgttgccgtagaaaaacgagtcaaaccgcgagcacggaatcgcgcgctcatagcccgggtccgtctcgataaggtcgagctgctccggccggaaatcatagaaccgcttgacggcaggctcatcgagaaacaggcgcgtcaccttctccatcagttgcatcaggccttcgaccacccgcccgatatactgaacctgcgcctccgtcagtataaacggaaaaaatgccaccccgagcggcttgccaccatacaacaagtggctttcggcagccctgcgctcgaactccctgatgtccgcctccaaccgctcgcggtcgctccggaacaagtcattcagcctcgcatagagcgcttcgatctcctcgtgcatagaaatttgctgctccactgaacctctactttcgctctttccgtacaaatcccctgcggaaactgccaaagaattataacagaacgataccaatgcaaccaaaactctggaacacgaatagagagaaaccacggatttcacggattacacggattctccaacccgaaacacgaagcaagaaacgagagactggattttcaccacggatttacatggcgcagcaaaaccgcaaccaaaagaacaaaaacaacaaaaccatggaaccacggatttacacggataaacacggattttgggacaagaggaaagtgtttgttgaccggttcatccccacgcgcgtggggatcacgctatcatttcttttgtgggatcgctcatgctcggttcatccccacgcgcgtggggatcacgcgatgacaaataggggcgttctagggggtatcggttcatccccacgcgcgtggggatcactcataaagagttcgcgccgattctgagtccggcggttcatccccacgcgcgtggggatcacatgagagcggccctgggcctaatcccctcccacggttcatccccacgcgcgtggggatcactgtccataggcgttatttcgtgatgttccttgcggttcatccccacgcgcgtggggatcactcttcctcggcgaatgtggctttgaaccgcaacggttcatccccacgcgcgtggggatcacgtgagcgttgtatagaacagagcaccgccgcccggttcatccccacgcgcgtggggatcacgagcgacaggctcagtggattctttggccttccggttcatccccacgcgcgtggggatcacgccgttcttgaactcgaggatgggagtcgagtcggttcatccccacgcgcgtggggatcactggagtgccgatatgcttttcgtatagacgatcggttcatccccacgcgcgtggggatcacaccaaaatctcgccccgtcaaacaccccgtatccctacataaagggcagcaacatttggtttgcgtcagtcccgtctgcgttctctttattccttgtccttccctttctactcttcgagattcgatccggacgcagcacaagcccaatgccctccacatccgtgagtgtgcggtccggcaaacctgcgctgcgatgccgataaccttgcgggatccggccgtcgctccatatctgaagcacagagcccctaccaattttctggaccgccttctcccaaagttgatccctcaccctcgcactcggattgccaaggaagactcccgtccgcggctctatcagccaacgtgatagctctcccttcaagctcgccggggcgttctccaagatcatcacgagcatccaagacctccgctatatcaggcaagattcgctgcatcaacttcgtctcatgaaagacgttgcgacaagctattcttgttctgcgctcgatgtcgaggctgctctctttcacggctcgaaatgctatcggtacggccaccccagtcttgtagaggtcggcaatgtcgtacacaaatgacagtaacttccccgtatgaatgaagccgattgcaggcgaataccccgccgaaagaatcgcagcatggcaaaggccatagaggcatgcgtaagccgaagacaacgcacggttcaaaggatccccatggctccaattatcctgcctgtaatttcgcccgtgccactcgatgcccacttcctctgcgaccctccggtacgcctctcgaacgcgatacccttccttagcgcgcacgaggtcaagcgaaatcttgtctggcagcggatcgggaaaacgcttcgcatacatacgtcgaatcaccttgattcggtcttcataattcgagtaaagagccgcctgccgcagcaaacgcgtcgaatggtatgttccacccgtgctgtgcgcatacaggcgcacgccctcttcacccgtccagcacacgagtgtattattgtctgccagacaccgcatcgcagcgtgtgtcaccgccgaacccggaccaagcagaagcacgccgagttgatctatcgggatatctatcgaaccttcagccttgtagaaagtcagcgcgcttgcttccttctccagccggccgtgctcaaggtacagatagctccagcggtccgcaaactttggaaggtcatgaaggttgcgcatacgctataccctcgcaatcgacaaaagcccaaacccgaatgccttagcggagccaatgcctgtttcgagaagttccttcagtaccaccggatcccccattcgaaactttccttcaaacagcacagaccaccactgcatgcgctggccgggctgaggttcgtacttacttcgccagccataggcccatccgggaacaaacttctcaatacagattggagagtcagcagcgcttccaagtttgccagctacccagcgggcatggtcttccaaagtcggatcgacacgcatgcgttttccattggacgagccgtcttgaattttccgtgtcggattggcgcggagccggaatcgcacaagctcgccaggacggatgcggtagttttccttcccgcctttcaggaccagctcgttgccgtcaacggctatagagacggacttcatctgtggcggtgcggcaagcaggaaaccggcatccccgataggatggcccagatcattcgttttgtctttcatcaagccaaaagcgcggtcccagtcaggttctttatctgaagccgactgaataatgatgagcggcttccgacctccttgcctgaaatcaaccgggtagtcaatgcgaaagagaaagccgttttcgccgtttcgcgcctgatttgcatcgcccccgttgggttccctgaacagaatgcctgacggaaacgccaggcacaaccgctgatgtacacggtacagattgcgcaaccagcgacgacagattttccagtccggacggtcgggattgtcacctatattgataagcaaatgggagtgatacatagcctattcctcatcttcttcaagcagttctcgacggacacgctcgggcgcgcccctcaaagcacggcggcggccttcctcgcttcgccaccgacggatttcatcacgcgcgcggataatatcctctcgccagcatgcatgttctgggttaatccggtctagtcccatcccaagaccgtactcgagcatcgtcaccgcgtcgtggcagagccggcagagcgaccgcaaatcctttgggtcttcatctcccccagcccgacgataggtgacatgctgcacggtcgtggccggagacttgcagaaaacacacagaccgccatcgtccttcaatcttccaggtctgatattctcacgccattgcggggtagagtaaccggcgcgcggtctcggaggcggatctgcgacacgctgaagtgcgtcaccgaccttcacgtttacctcatcacggacaaccagccgtgcctcatgaaccggtgggtcgaatgagaccggtgtatcgtaccagacctcggcctcagcaggagcaatgtcggattcattgacagcgcgccattcaatcaagcaacccaacgtcacctcttctcggcggcgtctgttctggtctcgcggtatgtccgattcgtagcgtggacaccacggtattgtccccagtgctgtcagcaagtccctgtgctctgtgggattcgtccatgtctcgctgcttcgtggcgcggctaggaccggaatactcggcgggcacgacttgcggccaaggaatactggccacttcggcgacgcaatcgccgcggcgatatcatggatcaacttcgcatcaccaccctggagcgccacgagaaagctcgcgtcggccaggtactcccggcgcgtgatgagcgtgccctgggctccggtcttcagaccgcccccagcggttgtcatgccgattcccgctcctaccgtttggtaatcccaccaccgcgtgccgtgccggtcgatgcgcacacccatcgcaagccccttcagctccggcaggcgttcccgcgccgccttgcgcgacaggcccatggcgcagcagagcaggcccagtatgccggacttggtcggcgcatccatggtccgccggatgacgaattttgacgtgtcgccccaagcctggagggggccttcaaggcggaggaagagtgtgttggcttcggtcatttcgccgcctccgcaggcgtcccggttgcccccatcttgtccacgaccttatggacgaacttatcgaactcaccgaactcgtcggaaccgaccacggattgttcttgctcgtgttccttcatgctcttgtcgatccaggtcagacgatggcgcagattcggcgagaaccagaaacgttcggcctcgatgccgtaacctgtagcgagatcgtgggcgtactggccaagtctagcgatgctttcgccgatcaaaccgcgttcggacttttcccacaccggatcggcgaaggcgttggtgtagctgacgggcgtggccgacttagttttgacctcaaccagaactccgtcgggcggattgaatgccgcgaatgcgtgttgtttgccggaggggttggccttggcggctgcttcaaggaagcaccgtaccgtcctgcgggcgaggtcggcatcgtccgccaggttcttcttcaactgctcaaagtcaatgacgaagtgtttgtagaagcaggccgagttgaacatggcctcgttgacgtgggccgcgccggcgtcctggccgggcacgtcgtcggcagcggtgaagtagtccacctcgttcacgaccgcgtgagtcgaaatcgcatgagcggcggagagcgcagcctcaacggtaaactggcctttgaggccctgaaacggcccctttgcatcgaactccgtcatacggccacaaagtgcgatgtcgggtgtcttgacaaacttgccgatgatctcggagaatttcatgcccaggtcgccgtttccttggccaacggcagcgcccatttccttgatggcggattgaggcagaaagaagagtatgtcgaaagtgttctcatccttcaggccgacccccccgtccgtaaagacctttcgaatggccttgcaatgttgctcattcggtggattgtctttgcccgccgcctcctttgcgatcagctcgatcagccggcgtgtacgcacgccgccatccctctccaaagcccccgcgaactccgggctgcggcggatgctgcgtttgagacactggctggagatgcgcgcccgggtgacgccgccgaagatgcaggtcttgggcgcgccaagatcgtcccggttcaggttcgaagggctgtgattctggatcatgtggatttcgatcaacatttctatgctctcctctcttttgaatcagtggcgttgagatacgtttcggcccagatgtcgcgaacatcgcgtccgcggcggtgctcctcgccccgttcccagatggagagatcgtcgaggagttgcacccagtcgatgcccttcacatcccgcgcatgcggcacgtgcccggcgacggcccgggcgacctctcccagcgcccaacgcaaatgcggctccagagacgacagggacgagcaaagcagagcgtcgaatcgagctcggaagcgcttgcggccatcctcgtcgtgcggttcgcagcggcccaggacttcaggcaaagagggccccgcgcctgaatctggtcggatgtgcgggacgcggaacgcgccgaaaagcttggcaacgagccatgacggctcccggcgcggggtcgccggacttttcgcccgcagtggccaccagaggcccgtgaagacgtcgaaaccctggagcgttgcgtcgagcggccgtccggccagacggcgcagccgcgagtgctcgccttcctgcaactctgaaagcctcttgatgtattcagcggtctggctcatttgagcctcccttcttgcggccacgttttggttcgccaggcgcggctgcaggcgtacctgcgtgcgacagatgatccggcttctcaaccagctctttaatcttcttgctcaacagggcttgcgcgtgattccgcgtggcatgccgacgaagcggtgaaccaggtgttacggcagcgataacctgttccaccaccggcgcatatacctcatgcaggaatgccttgtcttcggttgcgttatcgcccgtcgaggcattgattcggctcagccggtcacgaatctgagcctcggcatttggcgtcagaagctttacggatgcgctaatttcggggtgctgcaggtcagggttgtatgtaactgtcctaagtaccccgcgacgccggaatttggcctcgctgttttcgtttggcttttccttcgtgcctgtgccctgtaggatttcagcgcaatcgcttgtaagcttcgccaacatagtcgcagcggtatccggtaaacgcacagcgggcgtgtcgtggaagacgtactgcccgtcgccgactatgccaatggcaagtgccttggtgccgcgcagacgcaaggcatcgcgccagaacttggaggcgtgcaggccaacgtcctcgctgaggtcgggcagcctgacgggctcggcttccttgagaagatgagggtcttcaacccagaacttcttcacctgcgtatcctgctgatcaagcaagggcttctctttcttcgtgggcttcttggtcaactccttgatgatcttctggttgcccgccgtgtacaattggtcgatgactcgtgcaatcttcgctgcatcgctcttgtctacgggcgcttgctccgcattggaatcggcttgcgagagcgccagcatcctgcacttgtggatgacaggggcaaccctgacgaccttgtcggccaccttgcgcctgtcggtcgtcttcgccttgtaatcgctgttgagtttttggaactcggataagacattcttgccaaattgctggcccgtggtgacaggagtgggccaccccttctcaatacataggctcttgaccaacgttccggtttgcccgcagtacgcacaaaaaccaccgttctctgccatgttcagccacaacttgcggggccgccaggcaagcctggctactgcgtcaggtgaattcggctgctcgttgcccaaccatggagcctgatcagcttgcggatttgtttctggaagattcgcgcaaagggtctggaacagattcttcccttcagtaaatgcgtaggccgcagagcacgggttgactgatgcgggataaaacctgttggccggagcccagaccgagagccgcaagattcccatcgcgcaacacgccgggcaaaacccgtaggaactgtcatgcacaacgtgccgcatgtgattcaccgaatccgctccagggaactcgacgagcagatcgccgatggtccgagattccttgcccttcaacaattcgtcctgatagaacctcttaccgtcgcccagcagattgaacgcggccttgttttccttcagtttagccagccagttctccggtatgtcggcgctcttctcgtccaaggccgcgagtgaagacttcgcgtcctctttgcaccacatgagcacagccaacagaaagcgcaggagcgccacgcggtccataggattgcttgccgcaatctgccggatgcgccccgcctccgtaagcgcctcccgaatgcccacgcgactcaccttgccgtcccgccacaaaaccggaatccattcctcttcaagcaggttgtagttcatacattcgccccaatcttttgtaacgcctgcgataaaaacagttcactttgctcctgttggctgtaaattactactttcaggcaacaaagtcaagctccctctgcacacctctgcgccctctgcggttaactgaatggtctctggcgagatgggggagcacacgcaccgacgcgattcggagtatgcgcataaaaggacatggggcagtcctttcaagaagtgggagcggcgtgccgattctactgtggtaataagatagcaaacgccattataccacaaaactgttgagagtaaaggagaaaaaatgagcaacggggaaatggcataatcccctctccccccctttaggaaagggggacgaaggggaattgcattccctctgcggccctgcgcccctgggtctgcgacccctctgcggttagcaagagagtttacggttcacagtttacggcccaaagaggcatttcgttcgtgtaatccgtggtaatccgtgtgaatccgtggttaaagaccgttccgggttctgcgttccgagttccgggttcaggctcagggttcaaagttcaaggttcaaagttcaaagtatagagtcctgagaatcagtgcaatccgtgtgaatccgtggttaaagaccgttccgggttctgcgttccgagttccgggttcaaaatccgtgttaatccgtggttaaagaccgttccgggttctgcgttccgagttccgggttcaaaatccgtgataatccgtgaaaatccgtggtttcggtctgcggattgcatcgggggttgtcattttcaaatctctcttgactccggttgtccgtagtggtacattagttacgcagcacgtgcttcttgccgggtatcatcatggtcggaaggggctccggtaagtaatcctcattttgcgcgagcgcccaacgaaccggaattcccttcaccagggcgataccttcgggcggaaggagggggatcaggatatggtggaggcaacaattgtccgtagccgccgcttgaaactgcgcgtgcgcgaagcggtcctgcaggatgttcagagaatcaccgaa

SEQ ID NO: 666 - DNA, 9660 bp, Artificial Sequence
  Synthetic Oligonucleotide
ccatcaggtcaccaagccgcctcgctacgtcctcggttcacccccacatgcatggggaatacctctaccaggataccgacaaagccgccgccgccggttcacccccacatgcatggggaatacgttaccagtcccttcatcgctatttcgtcggcggttcacccccacatgcatggggaatacggcatcacctacctggatggctttgtcaaagtcggttcacccccacatgcatggggaatacgtcttgcctggcactacgttaattcctggtttcggttcacccccacatgcatggggaatacgcgttggcctgggcggcatagacgggattcgtcggttcacccccacatgcatggggaatacatagccagcagtgccgccggctggcgggcgttcggttcacccccacatgcatggggaatacgatacaaggcaatgcagaaggcaaaacagatgcggttcacccccacatgcatggggaatacttgacactcatatgatcacctcgttttgtagtcggttcacccccacatgcatggggaatacattgaattcttttgcgataggttgaagggtctcggttcacccccacatgcatggggaatacaggtcacgtgcagcttgtagcattcggataagcggttcacccccacatgcatggggaatacctgtgccgaagccagatcttggtgacgtgatccggttcacccccacatgcatggggaataccggacagcctatgcaaccgatgcgtgtgtatccggttcacccccacatgcatggggaatacacttgatcaatagaggtctaagaggtcattgaactccttcaagccttagtttaaggatgcttggtcataagtttgataccctcccattccgtaacgactcttgatgcggcaccccagaattcgatatcaaacccttgctcggtctgactactccagatcatcaggcaagttccaccgctgcaattgcttctaaccttatcccacagtttatctctaaccattgctgagactttacccacaaacaccccggcttttacttccagcagccaacgtgtgatcttacccctcagggagcttggcacattttccaatactaaaaccaccatcaatcttcctttggcagatcatcctgcccgtaagatatgccgcctggggaaacttctccatctggagaccagagtcctccaggcaatgctggttcttcggcaaaacagtcatccaggctatcctctggcataatatcaccgaagagagaactaatatccgcgacaatgcgtttgagtagattctgcctgtggaattcatcacggcaggcaagcctgactctgcggtcgagttcgccgatcccttcagcggtcgcccggaatgcggcgggagcagccatttccattttgtatagatccgcgatatcatagacaaatgacagttgcttgccagtgtggacaaagcccaatccgggagagaatcctgcagcaacaatggcagcgtgcgatatgccgtagaggcaggagtttgccacagataatgcccggtttatgggatccgctttattccagttgtctctttgatagtttctgccctgcatgggcacaccatacttttgggagagttggaaataggtatcgcgcacccgggcaccttccttgcccctgatctggttcaaagttaaatcaggagaaagctcatcctggaacctcaactgatacatggagcgcacaacccgtaaatgcaaaaccgggtctgcccagtactttgcctgtttcataagattgacggcgctacgggttgtacctgtgcctgcggcatagaacctgacgccatgttcccccacccaggctaccagacagccacaggcagccagtgaaagtattgccgcatgggtgatggttatgcccggtcccagcatcagcatagccaagccggcacaaggaaccggggtttctcccagggcatcgtgaatggcgatggcttgcccgttctgatcaattttggcatgctccacatagagatagctaagccgatctctgatccgggggatagagtgcaggtctttattcatcattcctgattggcagaacggacagcaggccaaagccgaagcttttcgcttttccaatgccgcttctaagcgtttccaggaacagtttcgggtcatccactttgagaattccctccagtagagccgaacggaagcgcagaggattgtatgtgtgttcacgccagtagccctgtccctgttcctttgctttgacatttttaggttcaggcttggagccataaacccaacccagttgaagaagctcacagcgctgaagggtgaagcccagctttgggcttttggcagccagccagtcggcaagggcctgatccggggtggaagagggatcccaggtgagagaaacccttttgtgcaggatgttgccagtttctatggtttgaccgtcctgttgcaccttctcaggaatatgacggcgtacgctggcgtttacccgcagcctgaaccggagcagttgtcccgcttgaaactctggattatactcctttgtttccggtggcgctgccaggaaatcaagcgcgttttggaagcaataatcccaatccggctcaagaacggactggacgataataatcgcccttttatcgtttccgtcgatgttgttatcgacccggaaaaggaagggagttttttggaagtcgtttggcgaaaagggcttcaggaaatgcggatcctgctcccggcgcaaacctgaagggaacgccatggaaaggcggcggtggacgttatagatattgtccagccactttctgccggggcggggacggtctggattgcctccagtatcgatcaatagcttggacaagtagatcatccgttttcctcctctggcttcattttgcggaaacgctgcccgcgcgaacggaactcgactatatctttgcgctttgccagtattcgctcccgccagatggggtcgcaggggtcgatgcggtcggtggtcatgccggaaccgtattccagcatggtgcaggcgtcgtggcagaggcggcacagcgcccgcaggtcttccggtatttccttgcctcccgccctgcggtaattcacgtgttgaacagtcgtggcgggagctttgcataccatgcacgcggcatggtccatcacaagccgctccgccctgaccttcttatactcggaattgttataatccgcccgggttcctttgggcctccaaacgctggttccggtttccctgctcacttgcacatcctctcccacaaccagctcacgcctgatcacgaagcgcggcaaatggcggggcggctgaaaagaaaccggcagatcgtaatgaatctccgcgtcatcaggcgcatgttctccgtcctggctggggatccagtccatgacgcaaggcagtatttgcggcaggggttcattgtgccagcgcttttgcaggggaaccgcggacagcgcctcctccaaagtgttataaaagcccggagcatgctcgcccacgggacgtgaagggggacaggatttgcgccccagataaattgcccagaccggcttggccagagcggcggagagcttttccacaagttccggctcaccctgcaaggcgaccagaaaactggcgtcggcaagatattcgcggcgtgagagcaaggtctctgccctggtttttactttgcttggtgtcagggtatcagccagggcagctccaaccatggaaggttttttgggtgccttcagctctgccatgcgcattctttgtcccgctccaacagtatggaagtcccaccagcgtatgccggggcggtctatccgcacgcccatgcgcaggttggcgagttttgggagccatgaatcagcagcctccgcgcgcccaattcccatggccgcgcaaagcagccccaggacacctgattttgtgggagcgtcggtagtcctgcgcaaagcaaacttagcctcgttgctgccccaagactgcaaagccccctccaagcgcaagaataaggtgttgggtggcgcactcatgtcagccgccaacataagccttgcttttctgaacttcttcccacttgaagccgccaatataatccaacacagcgcctacaagctcattgaggttgccaatgtttctggaagccagtttggaatgctcattgccaagggaatagcgattgtttggagaaaaccagaagctgataactggggattgctcatcataatagccaagcctgatgtcgttcacgtagttggaaagctggccgatgctttgttccaccaggtccgattccttgaccacggaaactggcctgacgaatgcgttggcgtagctaataggggaattcttgaactcaacaaggatgccatcgggatagttatgagcggcgaagctgttctgtttgccactggggttggttttggctgcggcgaggagaaaggcacccacggtgtgggctgccagattcgtgtcccctttcaggttcttgaccaactgttcccaatcaatggagaagtatttgtagaaacaggctgaggcaaacatggattcgccaatatgacccgctccggcgtcttcaccgggaacatcatcggccgccacaaaatagtctatctcaggtctggcaatgtgggtggagatcgcatgtgcaacctgtagggcgccttcaacgccagtgtttttaagctctttggtctccagcatcctgccgcaaagtgctatatccggagaatggacgcagtttgtgagcagatctttgaactgcagcagtttttcgctttcacttagtttggagtcggaaagcagctttgccatttggcgcagggcatcataagtggtaaaaaccagcatgtcagatgtatcagccgcctgctgctcatcctgatcttcatcggcttccgcgggtatcttttcggacttttttgcagctttcttggaagatttggttttgattccgcaggcttcaagaaacttggcaaccagcttcttatctttgttttccagcatttcttcaagtttctctgccagacgccttgttcggatacctcctctaaggtccgcgaattccggggcaaaacggatgctgcgcttgatgcattggctggagatgcgagaacgtaatactccaccgaaataacaggtcttgggggcgcccaagtcgtcccggttaagatttgccgggctgtgattctgaatcatatgaatttcaatcaacatctgaatcctccttgttgatcttgtatgctttaataaatgaatccgaccattctcttttgacaggttcctgctcccaaaatgacagaacatcagtaagccctacccagtccaggcagacctgctggtgcttgcgcaaaatacccatgatgaccgacagcggctcttccatctgcataatgtcaagcgatgcgagttgatcaaagcgtgccaatacccggggtaattcctttttgggttccaacttccggcagatgcctcccataagaatgggcaatgtggctccctcgcgctgttcaaagcggaattcagcaaaaagtttggcgatcaaccaagccacttcacgcttgggagcgcgttgattcttttgccgcaaaggccaccatagggcggaaaacaggtcaaatccgggaagcttttcatcaagccgggctcccctgagttttctaagaatgcccaaatcgccttctttgaggttctccaggcttgcaatgaagtcaacggttcctctattcattctggtcctcctctgcgggttttgttttggattctggtataactggccagggcttgcgggaaatgaatttacctctcttgagcctggcgtccactgtttgagccggctccaaagagcatgcaaccttggtgagcagttctccgtattcagtatcggcatcctgccaggaatagcccctgttctcagtcattttacccgcattgatggcaattctgctttcggcgtgggggataatgtcagcaatctggggagtgcccactgactttttgaaatcacctctgagaggcttcttgcgcatggcattaagggcagtagccctgtttgccaattgagccagtagctcatcatttgtatcagttccctcaagctcgatgatcttgtcccagatgtctatgctttttgctttatcgctggcaaatccaaccaaccatagttttccttgtctggagtttccttccgcgtgcaaatagctgaacaacgggctataccaatcccggtccgcgaaagtgtatctatcattggacatcagtttgattttggactggagactttttccctgatcggtgtaaacaccatgagggtctttccatttaaggccttccggcactggttcaggttttatgctgcaggaatagacgagagctttggagggtaagccgcaggaacaacatgctgcctgacctgagacaggatcatgcagatgcaccttgcgcggcagccaggtcattccggcaagtaagcccactttcctgctttctttttgaaaagaacccaaccatgccggaatccccatattatcccagggttgccaattttgaaccagcatgccagcgaggtcatttgcatgccagagcaggtaaaatggaggagtgttgttgattcccgcgcctatccctctgccaccgacagtggtaaagacaggtaatctcagcagtcccttgatgcagcaagcttcgcagagcccatcgatatagtcggtgacatgattgaaatggcataggttgtgagctgttggtatctcatgaataaggtcggtaatggctctgatcctggaactgggatcggcttggaaaaatctctgtccatccccaaaaagctcgaaataccccttgttttcttccagccaggatatccaggaggtcggaagcggcttatcaggttcaggctccccgttggtgttggcgaaacaccagtagccaagagcaagcaggaatctgaaaacagcgaaccggtccataggattgctgtatgccagttgcagacagtgtgcgtcttcaagagtttgaactaaagatattctatctggtttgcccgaaagatagaccacgtttacccaattatcacaaagaagattgtacataacatgctccttttgttcgataggaaccttatatttaagccaaagatcattgtcaagaaatttgctttgcggattttgggttaggaaagatcaatttggggcggtatcttgttactttcaaggtgttccatgcggcggcttccactcccattttacggagccccaccagcggctttttcagcgcagttttcccgctgctgatacttggcttgttggaaagaaccgccgtgtgtaatgcgcggcggttcaagttaattatcggacttggaagggcggctgtccgtcacttcagcaatatcattttgcggctggcgctcgtctttccggtgctgaggcggtagatatagactccgcttgccagttgggcgccgttggagtcggtgccgtcccagttcaggctgtgttttccggctcccatctctttgtccagtagggtgctttacatgaaaactcccgggaaaaaagcgtaaaaaaacccctactggtgaaatgatgaccactagtgtaatatggaaagagcagagaacaacctgtgctgtctacaatgcgttatataagaatatagctttacattcgggcatatgcctaatggcaagtcccagctggtagtccatatacggactgtttaccaagttcaaaacgtccatatttcagaacagaagtccgtcggtaatatgttttgtatgcacagcacgctatgttcttattgatcgtgtgaattacactcttagtgtcagatatcccaagctgcgtttgttgtccagttttcattcctggtagcgaaaaatgttttcagcgaagttcaaacattccaaaagactggatcccgggttccacggttcacgcagataaacgcggataaagggcgcagattgacacggattggtgtaatataagggttgccgaagtccgttcggcagaggcaacggagttgcctgtttggaagagacctccggtctctgtggcaaacggactttgccacacctgggcactggatcacggctcgcaggctgtgatgacacggtttttagtctggagggttttgttccggagtcgggtgtgttgactctttaatgttcttttaattcgtgttaatttgtgtaatttgtggatgtttcttttaaaaagactggatcacgggtaagccaccccagagggggccccgacttcccgtgatgacacaaaatataacttggtggacttgtttcgggggcacctttccacctttccacaaaaataccacaaccttccgcataatccttcataccgccctcctttgctgctactggatttgatgccatcatccttaggtcaaccttataaattataaggatgacctaaggaagactcacgccaaaacgctggatgcaaatgagagccacccgcgcgcgaggggaaagggagggcagccagcccatggccgcgcaattacgggcaagtatatatatacttgccctgggatccgcttcccgcctggcatgaaggggtcgtagcacctatatatatggggggagaatttgtggaaaggtgttttgaggtggaaaggtgcctgcttttttaaaaccttacgcgtttgtttctaaaagactggatcccgggtcaagccaccccaccaaaccgcttcgcgctttggcggggaccccgacagcccgggatgacacggtttttagtctgttgtgctttgtttcggggcttgctggttgtttttaaaagactggatcccgggtcaagccaccccaccaaaccgcttcgcgctttggcggtgaccccgacagcccgggatgacacggctttagggcttggtggcggtttgtttcagggtctggttgttgtttttaggctggacacttgtccttattctgttcttttaatccgtgttaatttgtgtaatttgtggatatatcaaaaacacaggcccctgtctgccagaattctctttgcttgacagattcgcgcttttcacatatattatttttacatgggctggtatccagtccgacaaggaaagaaacatgaaagaactgataataaaagctattagcggccgcaagccgcaagactttttgggagaagatagatgagcacaccccgcggagaacgcgtaaacatcaccctgctgggtaaccgcaacgctggaaaatcgtccttgatcaacgccctggcaggacaggagatagccatcgtttccagcaccccgggcaccaccacagacccggtggacaaacgctatgaacttctgcccctgggcccggtgaccttctttgacaccgctggactggacgacagcggcgaactgggcgaaaaacgggtactcgccacctataagatactttaccgcacggacatagccgtgtttgtgaacgatggccgccccttcgcggagagcgagctgtcctccctgaaacgcatccgcgagatgaagataccgctgttaatggtctttaaccacagggatttgcgcgagcctgcccccgccaatatcgcctggtgcgaggaacggggactgccctgggtctccgtctccgccctcaagggggaaaacatcgacgccgcc

SEQ ID NO: 667 - DNA, 9556 bp, Artificial Sequence
  Synthetic Oligonucleotide
gggcatgccggttcacccccacatgcgtggggacatcgcctgtggggatgacgatgcaagggttcgtttccggttcacccccacatgcgtggggacatcatggaatccgccgcgaccgtccgcgtattcctcggttcacccccacatgcgtggggacatcgcggcgaaggccgggcgcaatcatcgccccagcggttcacccccacatgcgtggggacatcttcttgacgggaatcttggtgttcttgcccttcggttcacccccacatgcgtggggacatcggcgtagtgctgcggcttggattccttcacgccggttcacccccacatgcgtggggacatcaaacaccaggacagcagccgggccgggcatgccggttcacccccacatgcgtggggacatcactggcttacgactccgaaatcatggttttcggcaggataagcccgtccaagtctacaaaactacgatcggaatcgcctcgagtgaggatcgtatagccctgctcattggctgccgggttgatgaggatcgcggagccacgattctcatcaacctcatcacagacagtcttccatagttcttcccgcacacgacccgacaggtgtcccacgtaaacacctgtctgcggttgaatgagccagcgagtcaaccgacctcgtagcccggggcgcacatttcggacaatcagcaccatcatgcgacatcctctccttctgggcgctgcgttaatatctgcccgatcggggtatccaaggagaacgactttggctgccataattcagcaggacgcgcctcgtctcctgcaaactcatccatctcttctgcttcaacattcagaagctttcgcatatcaggaatgatccgcttcatcaggtgcatctgatgaaatcgacgtctcgcctcggtgcgaacatccctttccagttcctttggctgtcttccagcgatctcaaatgccagtgggatcgtcagctctgccttgtaaaggtccgctatgtcatagacgaacgagagttgtttgccggtgtgaataaagccgatggcgggtgaatagccagcggaaagaatcgcagcgtgaaccaagccgtatagacatgcattggcggcggatagtgcacggttcactggatctccggcgaaccagtccttgcgggcatatttgcggcccagccacggcacgccggtcgccttcgaagcatccgcgtaagtctgtctcatgcggatgccttccttgccgcgaagctgctgcaaggtcaggccgggatcgatcgtctcatcggtaaagcgagcgcagtacattcggacgactacttgtaggcgggtacgttcatccagtgcgagctttgcctgccgtaaaagattccgactgtgccgcgcaccgcccatgccgcaggcgtaaaaccgaaccccgaattcgccggaccacacaagcaggcagttgttgtccgccagcgccttgatggcttcatgggtgatactgacgccggggccaagcatcagcagtgagagcgacgctacaggcacttcagtcacgccgtccagttcatggatcgcgatgccattgccagagtgcttgatgatggcgcgatcgatgtagaggaaggaaaggcgatcatcgaaacgtccgatttcaaaaaggctggttttcatgtctacaccccggatggttcattcttcggtcgctagggccatgagtaataaaccgaagttgatattcacttgtcaaagatcggctattgcaaggtgtgacatttgagggcatcacaatgttccgttgcccgtcagtgcgactgaaatcagaccgaagccgaaagctttggcggggccgatgccggcaatcaacgctttgctaaaccgttgcgggtcgttgatttcgaggatgcccgcgaatctcacactgcgaagacgatgtcccttgcccgccgtactggacttattgacatacacatacccgggctggatcagtgacaaattgccaagccgaaaaccgttggcatctgcccgttgttgcagccaggtctgcagcgcttcatcggtcggcggcacaggaacacgcttgccattgcggcgtcgtccgtcggcgtcgctcttggtatcgatcttgcgtgttggattggcgaccagttggaaccgtaatatcgcatccattccaaacgacaaccgaacatgccctgtgattgaaggcggggcagcgagcaaatgttgggcgttgtggaaagcgtagtcccaatcaggttggatggctgatttcacaaggatcacaacacgtccaccgggcagagggtcaacacggaataggaagttgtgcgagtcatcgcgcggctcatgcacaggtctgttgctcaaagcattaggctctcctgcattcactacgctacttgtgaaacctcggtctggctggggattgtggaatgcgtctggccgatagggctttagaaattcaggatcgttcgccttcgtatcagggaatgggaacgccatacagagacgttgatgtacacggtacatattgcgcagccattgccgacccgggcgaacccgatcgggattgatccccacatcaatgagcaaggtggacatgtacatcgttattcgatctcctcagcttgtagctgacgacggcggttttctagtgagcgaaactggatgatctccgttcgcttggcgatgatccgctcgcggtactgagaatcctcggggttgatccggtccaagcccatgcccagtccgtactcgatcattgtcaccgcatcgtggcacaaccggcaaagcgagcggaggtcttcctgcgtctcatcgccaccggcgcggcggtaggtgacgtgttgcacggtattggcgggggacttgcagaagacacaaaggccgtgatcgcgatgtagtcgccggggtcttgcgccatagggttcccgcgtcacttcgccggttcgttcattcacaacatccacgagccgttcgctggtccattcagaattagtgtagttagcacgggggcgaggcggtgctgaagcatgctgctgaagtgctttgccgaccatgacctcgaccgatttacggacaacgagccgtggctgatggacctgcggggtgaaggcaacgggagcgtcgtaccagacctcggcggcggctggcgcgatggtttgcaactccgtcgcgcaccattcgatcaagcatggcagatcaatcgtcttgatcctgttgtgtctcgcatcgtatggggcatcggtgtcatagcgaggtggccacggcactgcctcaagcgcagctgtcaggttgctgtggatcccggggttcgtccaagactcaccctcacgcggccgtgccaatattggtacggcgggtgagcaggacttacggccgaggtagattggccacatgggtgatgaaagtgcgagagcgacttcgttgataatcgcggcgtcgccgctgagcgcgactaggaaacttgcatcggcgaggtattcgcggcgggtgacgagagtgccctgtgcccccatctttagtttgcccgctgctgtcatcagcccaatgccagccccaacggtgtggtagtcccaccagcgcgttcctgcccggtcgatacgcacgcccatcgtaaggccgttcaaatccaccaatcgatcccgtgccgcctgccgcgacaatcccatcgcgcaacagatcaaacccagtacaccggatttcgtaggcgcgtccatgcttcgacggacgacaaacttcgaagtgtcgccccaagcctgaagggggccttcgaggcgtaggaacacggtatggtgaatcataatgcggctccggcggtggcagcgttgtccatatttacggtgttcatcaccttcgttacgagtgtttcaaacgaactgaaactctcagcaccgccaaccactggcttttcctgctttgccacactggcttcgtcgcgatctaaccaagtgagcggataccggtttccaggtgagaaccaatagcgcgtcgccataatgccgtagccttcggcgatctcgtggacgtgctggccgagacgagcgatgctttcgccgatcatgccacgtggggactttggcagcaccgggtctgcaaaagcgttggcatagctcaccggtacgcaccgctccgtcttgatttccacgagcacgccctcaggaggattgaatgccgcgaaactcttctgcttgcccgatggcgtggccagggccgcagcattgaggaactgccgaactgtggttgtcgcaagctcgacatctccgccgagattggtgacgagttggtcccagtcgatgcaaaaatgtttgtagaagcaggccgacgcaaacatggcctcgtttacgtgccccgcgccggttccggtggcaaggtcatcaactgctgtgaagtaatcgacctcgttgatcacttcgtgcgttgagatggcatgggcggcggacagagccgcttcgacggtgaagttaaggtttgcgaaatgacccttcgctttgaactcggtcatacggcccgagagggcaatgtcagggacgtgcgcggcttcgttgaggattttggcaaatacatccgccatgttgggttcgttcgcattagccgcctcggccatctgttggatcgccgaatcgggaacaaagaatagaatgtcggtagcggtcgcgtccccgccggactcgttgacgccaacgcctccatcttcgaaaatcttgcggattcgattgagcagcgcatcctgcggttcgccattgccttgtgctcggcgagcgatctcgctgatgagaccgcgggtgcggatggctccgtgctttgccaccgcttgctgaaagtcgtcgctacgccggatacttcgcttgaggcactggctggagatgcgggcccgggtgacaccaccgaatagacacgtcttgggtgctcctaggtcgtcgcggttaaggttcgacgggctatggttctggattatgtgtatctcaatcagcattgctggctccttgcagttggtgtgtgtcgttcagatagtcttccgcccagatatcgcgaatgtcacggccccggcgatggtcctcgccccggtcccagattgacagatcatcgagtagttgtgcccaattaatgctagtgacgcccttggcccactgcactcgcccggcgatcgctttggagatttcgcccaatgcccagcgcagatgcggctcgatggacggcaatggcgaacacaacagggcatcgaagcgactgcggaaacgcgggccattgtgatcatcatgcggctcacagcgacgaagcacccgcgctagcaattgtcgattcttcccgtcttcaaacggagtgttcggaattggaaaagccccatagagcttggcgatcaaccaactcgtctcgcgacgcggggcgacaggacttttctgtctcagtggccaccacaggccggtgaacaggtcaaatccagcaaccgtggtgtccagcggcatgcctgcgagccggcgcagacaggcgcgctcgccctcctgcaacgcctcaagacgcttgatgaaggactcggactggctcatgtatggctctccttcgcattgggatcttggtgcttgggcgtagagccgcctgatggcggcagcttgtttgagtgcgacccatacttacgtaatgtttcactgagagcctttgccgcgcgttgcatcgcctcacgtcggcgaagtggtgaaccgaccgttgtggagcgaacaacgtcattgatgatgcaataaagtttgcttgccaactgctctgagtaactgttcagcgaagcatctgcatccggggttgccatgatggcaagccactgttcgacttgcatgcggaaatatgcttccaagtcaggtgaccgtgcatccagacatgcttttctgttggggtgttgtcggtcagggttcagtgtgcttcttctgagcacactcatgagttgctctgtggtactaaaaagcgaattgattgtttcccgaacttcttgactggcattcgtaggaacagccggcaaattcaacacggtggcatcctgataaagccctttgttcgctgccgggccgacgaccatggttgtgtgtcccgctcgattgtcatctccagcgagtatggctcgccaggctcggcgccagaatcggttatgagccgtggcgcttgatcccggagaaggaaacccgagcgttgtttgctgcgttggctttgtactttttcgtttttgtgaggcactggagtcaattgaagaagaatctggatttatgccatcttcgtcaagactaccgctgtcatcctcgttgtcgctgttcgtcgacttcgcctcaaggatcaaatgcgaatccttgtcccagaattttttttgcgtgccaacagttgcgaacggcggcttccagttgccagtgaacacgtgttgatagatcaatcttgcgacatccccgcaatagctacagggctccatggtaggctgttgatcgcctagccaaatttgacgcgatctccacgcaaaggcatgaagcgaattgagattgtcctttgatggtgcgttgttggtcagccaaggcggcttagtcgcctcagttgtgcctgatggccaattcattgcaagtgattgaagaagcgtggtgccgtacggaaccgcataggctggtgtaggtccattgattgcagatgtgtatcggccgccgccataagcattggcccaaccacaaaagcggatgatgccgagagcacagcaggccgggcaaaatccgtactctttgtctcgcacatggcgaaaatggacgctcttggtttcagttgggaattcgactagtagatcaccgatggggcggtaatcttcatcaatcagcgaagttggtcgctggctcttacctttagttgccttcttccgttcgcgcgcgtcccattgcctctgcctctctttcaacagaacttcgagtagttggcggtcttgaaaaaaacgttcctgatccccaagcagattgaacgcctccgcaggtttcgcaggcgtgccaagattagttatccactcctccgggatgcccgttccgccattgagtaccttgcggtcctcatcgctcatgctcggcttgcaccacattaatacggccagcatgaacctcaatagtgtgatgttgtccatcgggttcgacgcggcagtcagacggatatcgcccgcattgatcagggcgttcctgatacccacgcgatccggcgcgccgttggttcggaggattgggatccattgctcttcgatcagattaaagctcatcgcctagccctcccagttacatcaaacgtgcccacatcagactgtccatatcccaatcgggtgctgcctctagggttgcacggcccagcttagactcgccgtgaagggtgccgacgatgcgcatcggggcgacggcctcgccatggtccaggtgtcacttgatctacaccctgtccaaaacttgaatcctgcctagcagtgtgaacagtttaacgtactttttgccgaggcatactggtctatgatgggttcgtatagcccaccacaatagcaatgattaggaagacgctcaattcatgaattggcatctgctatatcaaatggctgcgtcatacaacagaaaattgcataatccccgtattccagcactcaaccatcgctgtgattcaggagctatggtcaaatcctgtggacggcgtgatcaggcggcctgtttcttttcgccgtccgtgaacgtcacgccggcgatcacatcttggatcagttcatgtttattcaatcgtcgccatcgcttctgtgccgactcggccagcttgaagaccatcgccaggcacgccttgcgtgagccgtttcctttcgtcttgcgatgacgcaggcgcaccgtcgcgaacgtgctctcgatcgggttggtcgtgcgcaagtgaatccaatgctcagccgggaagtcgtagaacgttagcagcacatcgcgatccttcgtcaggcaagtgaccgcagcttcgtacttggcctggtacgtctcgacgaacagatcgaacgcgcgcccggcttccttgcgcgtcggtgccatccagatctgatgcaactgattcttcgccgccggctgcaaccgcttgggcagattgttcagcacgttggcggtcttatgcacccagcagcgctgctcgcgcgtcgtcggccagaccttgcgaagcgccgcccagaatcccaatgcgccgtcggctgtggcgatgttcggagcaatcgtaagcccgcgatgtttcaagtccagcagcatcgtcatccacgactgctcgctctcacgatgtccatcctgcacagcgatcagttccttcgtgccgtccgccgttgcgcccatcaaaacaaggatacattgacgatcttcctccagccgaatgttgaagtgaatgccatcggcccagacgtagacatagtgtttctctgacagatcgcgacgcgaccagtcttgatgttcatcctgccactgcgacacaaggcgcgtgacggtggatgcagaaaggcccgggcaatcggggccgacgagggcttgcaaagcttcggtgaaatcgcccgtcgagacgcccttgaggtagagccaggggatcagctcctcgatcgctttggccttgcgcagatacgggggcaagatggcggaggtgaatcgctccttctgcggctcaggtctccgatcatgcacgcgcggcatcttcacgtgcatcgggccgacgccggtgacgatggtacgcggcgcggcgtgaccgttgcgaacgacctggcgatggccggcatcgtcgagcagatggtgacggtcggcgatccactgcgcggcttcagcttcgatggcatggatgagcatctgccgggctccggtggtcacgatgtgcgtgagaagatcgcccgggtcaggcgatgacgaatcgccagttggaaacggaatcgaatcgggggtagctttatgcatggtggcgtactcctgcccgtgttgggccttgtgggtgcgttagacacacccaaggtacgccgcctttatcacgatctcatccacaggatttggttatagctcagagattcaccactgtcgccagtgtgtgtgcccctcgttccagccggtttgcccattcctggaacttgtacctgatcaacagtaaacactctatacctgcccatagttccttgcaacgcaacacgggcatgagacgcccaacggtgacgggacttgaggcgatgaacgggcgcaatatgcgatcagatactttccggacggcaggcgacactcacttacgactcgtaataggagggagatgacaagccgtctcatcgctctggtcaactcggctgggctgacgtatcacacgcatccattttacttttggccttggcaaataacccctcgcctcctaggctcttccaagctatatgttggtagcggccgtggaattttcggcttccatgaggacgtagttggtgcatagtcgatttccttatggattggtctcttgagattgcggtcgtacggctcgctttggtgccgaggtcagaagactactgattcaatgcgtggttccaacaccgacccatctcggtcaggctcagtt

SEQ ID NO: 668 - DNA, 9507 bp, Artificial Sequence
  Synthetic Oligonucleotide
acgatgaccgtcatgcaaacagttcctccatgtctttgggaattctctggagcagtttctcctgctcgacgcgttccttcagcagcgtgcggaccaggtcgcctttgtcattggggtcctggcgcatggactgaaaggctgccgggaaactggttatttccttgtacaggtccgccacatcatagataaagggcaacgtgccggcgtcgtgaacgaatcccagagacggcaggtaacccagcgagcagagtacggcggcgcacaaggcgtaaaggctggcattggccgtcgagagggcgcgattgatgttgtccgccagattccagttggatttgtcgtagttgcgccccttccaggtgactccgtactgctcgccgagttccgcgtatttggcgggcacgcgcaagccctccattccccgcaattcggtgacggaatacgcctgcacatccacaccgggaaagcgctgcacaaacatgcggcgggcgatctcggcgcgctgcttcggggctcgctttggcgtcagaactctcacgttgcctctgccgggagtggtgtgcgaggggctacggaaagaagcccgaagccgaaggctttgccgtgcccgatgccgcccacgatggtttctctgaagctatccgcgtctttaaccgtaagcgtcccctccaataaggctgagcgaaatttcatgcgatcgcccgccggcctcgggtccgatcggtttcctgcgccccacccgatttgcaagacgcggaaagtttccacctggaagccaccttggtcgcccttggcggcgaaccattttcgtatcacatcgtcggggttctggtccttatcccaggtcagcgctacgcgtttgctttgggccttcgggcggccttggcgatctgttccctcgcccgccttggtaagatcgacgccctttgcgctcgtttttaacttcttgcttagattgatgcggatgcggaaccgaagctgttggcccttggcgaagcgagggtcgaattcctctacctgcgggggagcagccagaggattcaaaagaaaacgggcgttgtggaaggcgtagtcccaatccggcttcacggcggagttggactggacgagaatcacgacccgcccggcgggctgcggctcaatgcgaaaaagaaagccggaacccgccccgcgttctacctgaaccggcttctcgccaaagtccgcgggtttgaaaggcttaagaaaatcgcgatcatgggattttcggttctcggagggaaacgccatccaaaggcgctggtggacgtgatagagattccgaagccacagccttccgggccgaggccggtcggggttactcccgacgtcaatcaaaaggcaggaccggtacatggctactccacctcctcggcgaccaggcgcctgcggcgagtctccagggagcggaacgtgatgatttcgttccgcttttggataatcaagtcgcgccaacgcggctcttccgggttgatgcggtccatgcccatgcctaggccatattcgatcatggtgacggcatcgtggcagaggcgacagagagagcgcaagtcatccgcgagttcattgccacccgcgcggcgataggtgatgtgctggacggtggtggcgggcgacttgcaaaagacgcacaagtgatagtcgtcgtcgagccgcttttcccgtcggattctgtactcggtattagtgtaatccgctcttgggcggggaggcgctggcgtgtagctctgtgctggctgagttgcaagcgttacttcgccgtcgagtccaacgcgcagttgcttgcgaatgacaaatcggggctggtgggagggcgggtcgaaggtcacgggcacgtcgtaccagacgagcgcatcatcgggagcctccggctgctcttcggttgacttccaatcaagcaggcaatccagcgcttcgggctgatcgtctccctccaacctcttgcgccagggaaccgatttgagggcagaaagcaagtcaggaaattcaccccccggatgctccagtaaagggcgcgagggagggcagcactttctgcccagatagagcgtccatttgggcgctttaattgcggactccagttcggcaatgaggtccgactctccctgaaaagcgacgagaaacgaggcgtcgcaaaggtattcgcggcgggtcagcacggcccctggcttggttccaccttcggcagtgcgcatcggcatcccggcgcccaccgtgtgataatcccaccagcggacccccggcacatcgatgcggacgcccatgcgcaggcggctaagccttggaagccagccttccggcgccgccgagcgggagacgcccaacgccgcgcaaagcatccccatgacgccagacctggttggggcgtcagccgtccgccgaatcacaaacttcgactgctgatcgccccatgcctgaaggggggcttcgaggcggagaaagagggtatttgcgctcatcaggccacctccgagttcacaaccactttctgaacctcctcccaatcatggccgattcccttgatgactgcctcgatcaattcctcgagcgacttgatattgttttcggccaaggcgttttccttatccccctccgtaacggtcaagggatagcgaagattgggcgagaaccagaaccgcctcgttggtttgccgtatccggtgtcgatatcgtgaacgtactggccgagttgcgcgacgctctgggatatgatgtctcgttcgccctgggctatggctggtcgggcaaaagcgttggcatagctgagaggtgagtttctgatttcgaccagcattccgtcgggtgggttgtgcgcggcgaaactattctgtttgcccgtgggattcaccaacgccgctccccggatgaacgcgccgacagtatgagcggccagttccttgttgcccttcagattgttgatgagggtttcgaagtcaatcgaaaaatacttgtagaagcaggcggagccgaacattgcttcatctacaaagcctgctcccgcgtcttcaccgggcacatcatcagcggccacatagtagtcaatctccgggcgagccgcgtgagtagaaattgcgtgggcaacttgcagcgccgcctcaacggttgtgtcaagtcccttccagacgtcgccgcccttgggcttcgcgccgccttcctccgacgcctgctttttcgctttctttggttccagcattctgccacagagtgccatgtccggggtgctcgtatggcgagcgattatctgggcaaattccttggcgagctcgttatcggtcttggccgacttggttttcagaagctcagacatctcgttgaccgcttgtttgctcacataaaccactccggcgcttttttcgtcgggcgtagattcctcgtcgtcgcctttcttccctttcttctcttttgccgcgatgccgcagatttctaaaaccgcgatcgcctttttaaactcggcggtatccgggccgcctggagcgatcaattgcgccagtcgccgtgtgcgaacgccgccgagcaactgcttgaattcgtcactcatgcggatgctccgcttgaggcactgactggaaatacgggagcgcagtactccgccgaagtagcaggtcttgggagcgcccaagtcgtcccggttcaggttggccgggctgtgattttgaatggcatgaatttcaattaacatgacggtcctccttcgaagacttcaagaattcctcggcccacttgagccgggtggtttcgcgttcccaaatggaaagatcgtttgtcagcgtcacccagtcgagcttcgggtttttggaggcgatgaggttaagcgaccattgcaaggccggctcgagtatatcaaccggcaaggtcagcatcctgtcgaacctttccgcgacagggtctttctcggggtcattgtcgttccggtaccgcccaagctgccacgcaagcgtctgcccgggtgaatgctcgatcggccggaaggcatagagttttgcgataagccacgccaccgcacggcggggcgcgcgctgattcctctcccgcaacggccaccagagccccgcgaagaggtcaaaggcatcgaccgattggtcgagcccttgcccggcatgctcgcgcaggagtccgagatcaccggacttcagatgtgtcaggacgtcgacgtattgctccgttggagtcatttgtcgcctcccttcttccgtccggccctcccggccggtggggtgcctggctgcatgttcggccttacattgacaatctggcgtcgccgccggagcgcagcggtggtatagcccggggaaagcgatttggcgacggcggccatcatcggcctatattcccgggctgcctgctcccacgcatcgcggcctcgcgaaatcaactcgccgaccttcccggagacctttgcttctacgtgcgggcgaactgcggcgaccatgggaggaatttcaagatgtcttcgggaagtccctctcggtttggctttgccggcaagcttccggccctccttttgccacatgtcaatcgtttcgacactctccgcgacctgccgatcatctagcgtgctcgggagaggaatctcatattccatcgcttccaggtacttgtcgttctgcaccgtcgcaaagctgacgacccacaagcctcttttgccattgggctttttctcccgaagaattcccgccgctatccttgcccattgcccagccgccgcgtcggttgcaccaagggcattgctgggtttaatgacatcctcgccgtcagtgatggtgtgcgggtcgctccatacgcggcccaggccattttcatccgtttttgcgctgccgacaccagcaaacacacattggcgtattagaggcgctttacgtccgcacgagatgcagttggcgtcgggttcctgcggattgtccagccacacgcgccggggcagcgacgtcaatcccacaagcagcggaacattgccatgtcgaggaaggctaagatcgggctcttcccaagccggcgttccgaagtccgtgtccgataccttgcgccaggagagacgcagggtttccgcaagtgaaccgccgaccggtacgacataaaccggcggtttctggttgacccctggcggcttgccgcgcccccctgacgtagcaaatagcggtaaacgcaataaccccgcggcgcagcacgccggacataatccgtcctctttatctgtcgaatgccggaagtgccaagagtttgtgccagtgggcacctcttgcatcaggtagttggcggaaagctttccctctgttccagacttggcattgcactgatagaaccgcttgccatctcccagaaggttgaaacagtccttattgtcatcaagtttcctgaaccaatccgagggaaacgaagagaccgagtcttcatcgtccggcggattccccttgcaccaatagagaagcgcgaggaggaaacgcaggatggccaaacggtccatgggattgctggcggcgacttgacgaatccggcctgcttgcctaagagcttcagtaatgcccacgcgattgctattcccgtctttccatagaactggaatccagttttcttcgagcaggttatagctcataacttcctccttgccttggcaagaggctggtgggcggcccgttgcgctcctggcggcccgattgtcgggtggctgtctaccaaatgattaacgcgatgaaggtatacacccggcacgcgagaaaggcaaggcccgaagaccacaagaacggttatcgcctctgcttagcagacgcgaaccaggagccacctgctcgccaccctttcggccgctgacccaggaagaaaaggtggaagtggagctacgaatccaggcggcggcgccggatgtcgtctgggtaggcttgagcactcccaaacaggaacgctcgatgttcgagcaccgctcacggctaggcgtgccggcgatggccggggtgggagcggccttcgacttcatcgccgggactgccaagcaagcatggatgcaggagaacggcctcgagtggttcttccgcctcacgcaagagccccagcggctctgccaccgcaaggcaggggacaggttacaggttacaggggaaagaagggaaaacaggggttagggaacaggggaaaacaggtgtcaggtatcaggtgtcaggcagcaggctgaccttgggcgccggacggcgctgcctcttggcctgtcacctgtaacctgtgccctctgcctgtcgcccatagccttaggtgaaacccacggaaaggaaacgcggaaaattaggttcctttcgtcgccgtctcggtccgtaggtttcacctacggctaatgatattcctccccttcggggaggcaggtagcgtcctaaacgtgtgttggtggggttttggaattccaatcaaacactggaagggtgtgccatggagtgcattttctaaccttccggggtgtttaagaactcaagccccgcgaaggtccaatggctgaactcatcctcccgcacccaaatcgtgcgagtggggatggcatacgggtatcctcccttgggaacgacacccacccactctcctggatctaactccagcttggttcgaacacaggcgccgcgcggagaaatgtcgaccgcgagagctgaatcgtctgcattgaagaggtcggccttcaccacaagtttgattggaattgttgctattttgcgctcacaccggcgcgaattaacggaggcatttgtttgcatcggcagcccctccccttttggctagactaccggaaacctatattaacccatccaatggggttttgtcaagtcagtccaggggtattggctgagaagttacattgacggccgaaaggaaatctgtgcaacttggcgagctgaaccgagtgccgaagaaaaaaggagtcagtagaggggacggcggaaggagtaaaaacgggtattacagtccatgcagcgaatgggcacgataccaaaaaagctaagaatccaccgctcgatccaacctcgccgatgggagtcggcgagattcatactctcgcatttggggcatacgtcgctggtcatggcttttaccaatataggcactcaacgcgcgtgctgatcggccaagaggttctggcagagatgaagattgtggtgagtgctgttaataaaccctgatgaagcccagagctgccatgagtccgaagatgccaagtacagccagcagcgctcccacgattttaagtttaggtacacgacgaagatgcactccgcttacgattaggccaacggatatcaaaatcgcggtcaacatcccgagtgagtcaggtgccattttcaaacacgttttcactatttagacttcggtcttcctcccttacgggtcaaccgctaagactgaagccacttgagataagcagggccgcacctagcgatcgcttcgccgcccctccgtccaagttcgacagcagcggggtccttaccttgtttttcgctgctggaaagatgctacgtgcgatcgcagtttgtcaagagggaggggaccaacacagaattagggcgctaccccaagttggccatgccacaacaccctccgacagtcagagaccgccactacagcgcgccagggaagggctgactctccaacgggtgagtagcttggtcatcagacttaaggtgtcatgagcgggctggacaaaatggctgtagcgtagggctctgagcggtcaggacaggggataggttacaggggacagggtacagcaggaagagaggtgacaggttacaggtcacaggggacaggggaagacagggaacccgaaggcagaggaccgtggacagggaacaggggaaaacaggtgtcaggcgtcagggaacaggctcacctttggcgccgcagggcgcagcctctttccctgtcacctgtaacctgtcacctattgcctattctctcctctttccctgtcacctttggcctcgcagggcgcggctttggccaccgtcctgctgcatagtttccctatcgagcagcgcacgaatatgagaagacagcggacaggttacagggaacaggggacagtggacagtggacatggaacaggaagacagggaacagaaagacagggaacaggttacagggaacaggtcatagggtagagaagagagaacagggtacaggtgacaggtcacaaggtacaggggacggaggaaggcagggaacggaaagacagggggacagggcgcagcctctttttctgtcacctgacacctgacacctgtgacctgtaacctgtaacctctggctgtcacctataacctgctcgccggacaggagatcgaaatgattcttgccttacctaataattcctgggtgggctgcgcaatgtgcctgctcatcgccgtgctcgttggcgcgtatcgccaatggtgcatttatttttgggaaaggatcgaactcctgccgatcgcagatgacggagacaataagtccgaggattttcacctgaacgcctacgtgccgggttggaagtccaacaagttccggatcggatcgtggctcttggtagcggcgtgcagcaccttgggcgcggcttggggaaccgtcctcctgcggggtttcaatttcgaacatcgcatcatctacttcttgggaattctgctcacccggtggctgctgtccgccctcctcggcatgagcgtcgcgaaccataccctccgagggggccatagcgttccgcaatgagggggaaatagggaataggttacagggcacagggtacaggaagacagggaacaagtaggcagggaataggttataggttacagggtacagcagggaaaacagggaacaggaggacagggaataggttataggtcacagggctcagcttccctcccgggtcgcgtgccacctatggcgccgcaaggcgcacactcgttccctgtcccctgtcccctatgagcttgcttgaggctccttcactgtcacctgtgacctctaacctgtctgctgacacctactgcgccagggcgcagcctcctttcctgtcacctgtcacctgtcacctgtcacccatgacccaggtttactttctagcctattagcggtacggtgatgctcccaatccagtccatgcgcctccagtcccaccccgaaaagccaacgcgagagtctctaagaatagcggacatcggcgctttatccacaatgggattggtgctcgcctacgctgtcttcgagtggggcggagcgctccgaatcgaccagtaccactacctcctggtgctgtgcctgctggcggtggtgctgagccttgcccgcccccgccaccagtgggcgccactacccggccgcgtggtgcgctggaccctggctctcttgcccgtctacatcctgatgcaggtggtgccgctgccggtgtacctggtgcgcgtgctgtcacccgcccgcaccgcggcgatgcctccagcagcactcatcggacgcccagccaactttgtacccctgagcgtttcaccc

SEQ ID NO: 669 - DNA, 9502 bp, Artificial Sequence
  Synthetic Oligonucleotide
ccgctgacttcgacgcccttgcggtcggtggggccggtggtatcgattttgaagccctggcaattagggtagctgttgacgatcagcaggccgatgtcggcggcgttgcgcttgatgtactcgatcgttttctcatgagtgcgccgattcagtgagccgacgaagacattagggcggggctcgataaaccagcgtttcagcattccgcgaatggcatccggcgtgtcggtggcgacgatgaccgtcatgcaaacagttcctccatgtctttgggaattctctggagcagtttctcctgctcgacgcgttccttcagcagcgtgcggaccaggtcgcctttgtcattggggtcctggcgcatggactgaaaggctgccgggaaactggttatttccttgtacaggtccgccacatcatagataaagggcaacgtgccggcgtcgtgaacgaatcccagagacggcaggtaacccagcgagcagagtacggcggcgcacaacgcgtagaggctggcattcgcggtcgagagggcgcgattgatgttgtccgccagattccagttggatttgtcgtagttgcgccccttccaggtgactccgtactgctcgccgagttccgcgtatttggcgggcacgcgcaagccctccattccccgcaattcggtgacggaatacgcctgcacatccacaccgggaaagcgctgcacaaacatgcggcgggcgatctcggcgcgctgcttcggggctcgctttggcgtcagaactctcacgttgcctctgccgggagtggtgtgcgaggggctacggaaagaagcccgaagccgaaggctttgccgtgcccgatgccgcccacgatggtttctctgaagctatccgcgtctttaaccgtaagcgtcccctccaataaggctgagcgaaatttcatgcgatcgcccgccggcctcgggtccgatcggtttcctgcgccccacccgatttgcaagacgcggaaagtttccacctggaagccaccttggtcgcccttggcggcgaaccattttcgtatcacatcgtcggggttctggtccttatcccaggtcagcgctacgcgtttgctttgggccttcgggcggccttggcgatctgttccctcgcccgccttggtaagatcgacgccctttgcgctcgtttttaacttcttgcttagattgatgcggatgcggaaccgaagctgttggcccttggcgaagcgagggtcgaattcctctacctgcgggggagcagccagaggattcaaaagaaaacgggcgttgtggaaggcgtagtcccaatccggcttcacggcggagttggactggacgagaatcacgacccgcccggcgggctgcggctcaatgcgaaaaagaaagccggaacccgccccgcgttctacctgaaccggcttctcgccaaagtccgcgggtttgaaaggcttaagaaaatcgcgatcatgggattttcggttctcggagggaaacgccatccaaaggcgctggtggacgtgatagagattccgaagccacagccttccgggccgaggccggtcggggttactcccgacgtcaatcaaaaggcaggaccggtacatggctactccacctcctcggcgaccaggcgcctgcggcgagtctccagggagcggaacgtgatgatttcgttccgcttttggataatcaagtcgcgccaacgcggctcttccgggttgatgcggtccatgcccatgcctaggccatattcgatcatggtgacggcatcgtggcagaggcgacagagagagcgcaagtcatccgcgagttcattgccacccgcgcggcgataggtgatgtgctggacggtggtggcgggcgacttgcaaaagacgcacaagtgatagtcgtcgtcgagccgcttttcccgtcggattctgtactcggtattagtgtaatccgctcttgggcggggaggcgctggcgtgtagctctgtgctggctgagttgcaagcgttacttcgccgtcgagtccaacgcgcagttgcttgcgaatgacaaatcggggctggtgggagggcgggtcgaaggtcacgggcacgtcgtaccagacgagcgcatcatcgggagcctccggctgctcttcggttgacttccaatcaagcaggcaatccagcgcttcgggctgatcgtctccctccaacctcttgcgccagggaaccgatttgagggcagaaagcaagtcaggaaattcaccccccggatgctccagtaaagggcgcgagggagggcagcactttctgcccagatagagcgtccatttgggcgctttaattgcggactccagttcggcaatgaggtccgactctccctgaaaagcgacgagaaacgaggcgtcgcaaaggtattcgcggcgggtcagcacggcccctggcttggttccaccttcggcagtgcgcatcggcatcccggcgcccaccgtgtgataatcccaccagcggacccccggcacatcgatgcggacgcccatgcgcaggcggctaagccttggaagccagccttccggcgccgccgagcgggagacgcccaacgccgcgcaaagcatccccatgacgccagacctggttggggcgtcagccgtccgccgaatcacaaacttcgactgctgatcgccccatgcctgaaggggggcttcgaggcggagaaagagggtatttgcgctcatcaggccacctccgagttcacaaccactttctgaacctcctcccaatcatggccgattcccttgatgactgcctcgatcaattcctcgagcgacttgatattgttttcggccaaggcgttttccttatccccctccgtaacggtcaagggatagcgaagattgggcgagaaccagaaccgcctcgttggtttgccgtatccggtgtcgatatcgtgaacgtactggccgagttgcgcgacgctctgggatatgatgtctcgttcgccctgggctatggctggtcgggcaaaagcgttggcatagctgagaggtgagtttctgatttcgaccagcattccgtcgggtgggttgtgcgcggcgaaactattctgtttgcccgtgggattcaccaacgccgctccccggatgaacgcgccgacagtatgagcggccagttccttgttgcccttcagattgttgatgagggtttcgaagtcaatcgaaaaatacttgtagaagcaggcggagccgaacattgcttcatctacaaagcctgctcccgcgtcttcaccgggcacatcatcagcggccacatagtagtcaatctccgggcgagccgcgtgagtagaaattgcgtgggcaacttgcagcgccgcctcaacggttgtgtcaagtcccttccagacgtcgccgcccttgggcttcgcgccgccttcctccgacgcctgctttttcgctttctttggttccagcattctgccacagagtgccatgtccggggtgctcgtatggcgagcgattatctgggcaaattccttggcgagctcgttatcggtcttggccgacttggttttcagaagctcagacatctcgttgaccgcttgtttgctcacataaaccactccggcgcttttttcgtcgggcgtagattcctcgtcgtcgcctttcttccctttcttctcttttgccgcgatgccgcagatttctaaaaccgcgatcgcctttttaaactcggcggtatccgggccgcctggagcgatcaattgcgccagtcgccgtgtgcgaacgccgccgagcaactgcttgaattcgtcactcatgcggatgctccgcttgaggcactgactggaaatacgggagcgcagtactccgccgaagtagcaggtcttgggagcgcccaagtcgtcccggttcaggttggccgggctgtgattttgaatggcatgaatttcaattaacatgacggtcctccttcgaagacttcaagaattcctcggcccacttgagccgggtggtttcgcgttcccaaatggaaagatcgtttgtcagcgtcacccagtcgagcttcgggtttttggaggcgatgaggttaagcgaccattgcaaggccggctcgagtatatcaaccggcaaggtcagcatcctgtcgaacctttccgcgacagggtctttctcggggtcattgtcgttccggtaccgcccaagctgccacgcaagcgtctgcccgggtgaatgctcgatcggccggaaggcatagagttttgcgataagccacgccaccgcacggcggggcgcgcgctgattcctctcccgcaacggccaccagagccccgcgaagaggtcaaaggcatcgaccgattggtcgagcccttgcccggcatgctcgcgcaggagtccgagatcaccggacttcagatgtgtcaggacgtcgacgtattgctccgttggagtcatttgtcgcctcccttcttccgtccggccctcccggccggtggggtgcctggctgcatgttcggccttacattgacaatctggcgtcgccgccggagcgcagcggtggtatagcccggggaaagcgatttggcgacggcggccatcatcggcctatattcccgggctgcctgctcccacgcatcgcggcctcgcgaaatcaactcgccgaccttcccggagacctttgcttctacgtgcgggcgaactgcggcgaccatgggaggaatttcaagatgtcttcgggaagtccctctcggtttggctttgccggcaagcttccggccctccttttgccacatgtcaatcgtttcgacactctccgcgacctgccgatcatctagcgtgctcgggagaggaatctcatattccatcgcttccaggtacttgtcgttctgcaccgtcgcaaagctgacgacccacaagcctcttttgccattgggctttttctcccgaagaattcccgccgctatccttgcccattgcccagccgccgcgtcggttgcaccaagggcattgctgggtttaatgacatcctcgccgtcagtgatggtgtgcgggtcgctccatacgcggcccaggccattttcatccgtttttgcgctgccgacaccagcaaacacacattggcgtattagaggcgctttacgtccgcacgagatgcagttggcgtcgggttcctgcggattgtccagccacacgcgccggggcagcgacgtcaatcccacaagcagcggaacattgccatgtcgaggaaggctaagatcgggctcttcccaagccggcgttccgaagtccgtgtccgataccttgcgccaggagagacgcagggtttccgcaagtgaaccgccgaccggtacgacataaaccggcggtttctggttgacccctggcggcttgccgcgcccccctgacgtagcaaatagcggtaaacgcaataaccccgcggcgcagcacgccggacataatccgtcctctttatctgtcgaatgccggaagtgccaagagtttgtgccagtgggcacctcttgcatcaggtagttggcggaaagctttccctctgttccagacttggcattgcactgatagaaccgcttgccatctcccagaaggttgaaacagtccttattgtcatcaagtttcctgaaccaatccgagggaaacgaagagaccgagtcttcatcgtccggcggattccccttgcaccaatagagaagcgcgaggaggaaacgcaggatggccaaacggtccatgggattgctggcggcgacttgacgaatccggcctgcttgcctaagagcttcagtaatgcccacgcgattgctattcccgtctttccatagaactggaatccagttttcttcgagcaggttatagctcataacttcctccttgccttggcaagaggctggtgggcggcccgttgcgctcctggcggcccgattgtcgggtggctgtctaccaaatgattaacgcgatgaaggtatacacccggcacgcgagaaaggcaaggcccgaagaccacaagaacggttatcgcctctgcttagcagacgcgaaccaggagccacctgctcgccaccctttcggccgctgacccaggaagaaaaggtggaagtggagctacgaatccaggcggcggcgccggatgtcgtctgggtaggcttgagcactcccaaacaggaacgctcgatgttcgagcaccgctcacggctaggcgtgccggcgatggccggggtgggagcggccttcgacttcatcgccgggactgccaagcaagcatggatgcaggagaacggcctcgagtggttcttccgcctcacgcaagagccccagcggctctgccaccgcaaggcaggggacaggttacaggttacaggggaaagaagggaaaacaggggttagggaacaggggaaaacaggtgtcaggtatcaggtgtcaggcagcaggctgaccttgggcgccggacggcgctgcctcttggcctgtcacctgtaacctgtgccctctgcctgtcgcccatagccttaggtgaaacccacggaaaggaaacgcggaaaattaggttcctttcgtcgccgtctcggtccgtaggtttcacctacggctaatgatattcctccccttcggggaggcaggtagcgtcctaaacgtgtgttggtggggttttggaattccaatcaaacactggaagggtgtgccatggagtgcattttctaaccttccggggtgtttaagaactcaagccccgcgaaggtccaatggctgaactcatcctcccgcacccaaatcgtgcgagtggggatggcatacgggtatcctcccttgggaacgacacccacccactctcctggatctaactccagcttggttcgaacacaggcgccgcgcggagaaatgtcgaccgcgagagctgaatcgtctgcattgaagaggtcggccttcaccacaagtttgattggaattgttgctattttgcgctcacaccggcgcgaattaacggaggcatttgtttgcatcggcagcccctccccttttggctagactaccggaaacctatattaacccatccaatggggttttgtcaagtcagtccaggggtattggctgagaagttacattgacggccgaaaggaaatctgtgcaacttggcgagctgaaccgagtgccgaagaaaaaaggagtcagtagaggggacggcggaaggagtaaaaacgggtattacagtccatgcagcgaatgggcacgataccaaaaaagctaagaatccaccgctcgatccaacctcgccgatgggagtcggcgagattcatactctcgcatttggggcatacgtcgctggtcatggcttttaccaatataggcactcaacgcgcgtgctgatcggccaagaggttctggcagagatgaagattgtggtgagtgctgttaataaaccctgatgaagcccagagctgccatgagtccgaagatgccaagtacagccagcagcgctcccacgattttaagtttaggtacacgacgaagatgcactccgcttacgattaggccaacggatatcaaaatcgcggtcaacatcccgagtgagtcaggtgccattttcaaacacgttttcactatttagacttcggtcttcctcccttacgggtcaaccgctaagactgaagccacttgagataagcagggccgcacctagcgatcgcttcgccgcccctccgtccaagttcgacagcagcggggtccttaccttgtttttcgctgctggaaagatgctacgtgcgatcgcagtttgtcaagagggaggggaccaacacagaattagggcgctaccccaagttggccatgccacaacaccctccgacagtcagagaccgccactacagcgcgccagggaagggctgactctccaacgggtgagtagcttggtcatcagacttaaggtgtcatgagcgggctggacaaaatggctgtagcgtagggctctgagcggtcaggacaggggataggttacaggggacagggtacagcaggaagagaggtgacaggttacaggtcacaggggacaggggaagacagggaacccgaaggcagaggaccgtggacagggaacaggggaaaacaggtgtcaggcgtcagggaacaggctcacctttggcgccgcagggcgcagcctctttccctgtcacctgtaacctgtcacctattgcctattctctcctctttccctgtcacctttggcctcgcagggcgcggctttggccaccgtcctgctgcatagtttccctatcgagcagcgcacgaatatgagaagacagcggacaggttacagggaacagtggacagtggacagggaacaggaagacagggaacagaaagacagggaacagaaagacagggaacaggttacagggaacaggtcatagggtagagaagagagaacagggtacaggtgacaggtcacaaggtacaggggacggaggaaggcagggaacggaaagacagggggacagggcgcagcctctttttctgtcacctgacacctgacacctgtgacctgtaacctgtaacctctggctgtcacctataacctgctcgccggacaggagatcgaaatgattcttgccttacctaataattcctgggtgggctgcgcaatgtgcctgctcatcgccgtgctcgttggcgcgtatcgccaatggtgcatttatttttgggaaaggatcgaactcctgccgatcgcagatgacggagacaataagtccgaggattttcacctgaacgcctacgtgccgggttggaagtccaacaagttccggatcggatcgtggctcttggtagcggcgtgcagcaccttgggcgcggcttggggaaccgtcctcctgcggggtttcaatttcgaacatcgcatcatctacttcttgggaattctgctcacccggtggctgctgtccgccctcctcggcatgagcgtcgcgaaccataccctccgagggggccatagcgttccgcaatgagggggaaatagggaataggttacagggcacagggtacaggaagacagggaacaagtaggcagggaataggttataggttacagggtacagcagggaaaacagggaacaggaggacagggaataggttataggtcacagggctcagcttccctcccgggtcgcgtgccacctatggcgccgcaaggcgcacactcgttccctgtcccctgtcccctatgagcttgcttgaggctccttcactgtcacctgtgacctctaacctgtctgctgacacctactgcgccagggcgcagcctcctttcctgtcacctgtcacctgtcacctgtcacccatgacccaggtttactttctagcctattagcggtacggtgatgctcccaatccagtccatgcgcctccagtcccaccccgaaaagccaacgcgagagtctctaagaatagcggacatcggcgctttatccacaatgggattggtgctcgcctacgctgtcttcgagtggggcggagcgctccgaatcgaccagtacca

SEQ ID NO: 670 - DNA, 9491 bp, Artificial Sequence
  Synthetic Oligonucleotide
agcagttccttgccttcacgcagagtcgcttcctgcagcgattgggagagttcgcgatggcgagggacggcgcaaattcggggacaggcaccgttctcgctccctgcagtcgctgcgcttccggagccagtccccgaagtttgcactccggtcgcatctggtttgcggtactgaatgccatcgacctcggcacggccgcagcaaagggcgaagtaatcgcatccacccaattgcgagcaggcctgcggattgcgcggccaaagggagtagcggcggcggtagaggatttcctgcgagagcgcccaggcatcctgcatgtattcgaggatctcggaatcgcgccggccgacttcgcgctgcgcgaagtagtattcggggcgggattccacatcggccaaaatcttgtggaagtattcctcaggagtcatctcgcgctggaagatgatttcgcccggttcggtcttgctctgcttccatcgcttgccgtccttggtccgcacgcgccggctgtcgttatccaggacgatcttgaggccgttctcatcaagcaccggaacccaggtggcttgcagcatggggcggcggatggcatcgcaaacaatggtgtcgggctcaatgcccttggccttgcgggaaatgaagtactgggaagtctgcgtgtccatgatccagcggtcccagtaatcgctggaagcgtcgagagaatcggtggtggttttgtgctcaaggactttgtggagtccagcctcgcccaacagcaagtcgatctttcccgccacatcgaacgagcgcgacagcccgccggtttcgggattgaccaagggaaaggaaaattcctcttcgacaccttcgatctgtgccgcgccaaagcggccggcataacattttgcgtagccgatgagaacggccaaggctttcgcgcgaacgaacggatcggcctcgagggcgagaagggcatcggcccatggcgcgttcagcgcgcgggcataggcttccttgtcttcgcctgcatcctggtgaatgtaggattcaagatcaaagccggcattggcctgttcgacgcaatcgacttgttccatggttgctgcatccacttgacaaatcctctctgccgggtttataccggcgttcgataagttggtttccgagaaatcggaagcctgggcgccttcccccgcatttggcttgcggtaaggttggcgtctcaagtcagccgtcgcgcccctaacgcggcggctttgcactatcaggcggtcaacctgagcgctcctgcttccaaaccttcctttacttcctgcgggacggcatcctgcggcggcggccaatccagcccgaggcgctcggcggcttgttccaacaaatagagcgtcttaggcgagccgatccccgcagccagaaaagcgtaaacctgggcaatggtcacgcgaccgtcgcaggccatggacagcgcccgcggcgtcacgcgctgggcatcacgcgcctgggtcagcacgcgctccagattccgcctcacccaatcctccgcctcgtattcggcccccagcgtcaacattggcatctcttcacctccttccggtgttttcttcgcctttatttcgccttctacaatatgcagatttgcatattttgtcaatgccttttctcattcattatgcagatcattgtgtgttgccttttatgccagcggagtttaggatcttgaacagcaccatggatgagacaaaacaaaccacagccagtaaactggcgtctttgcttaaattcttccgtcagcgggcgaagatgacacagccggatctcgcgcaacaggccggcatttctccttccatggtctttcgcaccgaaaaatccctgtctgttcctgccgccgatgactatgcaaatatgctcagtgcatgtggcgttgacctggtgcatatcctggagcgagttgccgcggcacaggacgcgggccggcaagtcaagcactgggaacgcgtttccaaccccctggagcaagtctttgatgaattgggcgaagcggtgcaggaggaaaaggagatcctcatcgcgatggaccgctacggcctgttcgccggcgaaaccgacccagccacagcacgaaagaaaataatcgagacatggtggggccttcgacgctcgacacaccgcgactgagcagccgctggtggagtttgagccggcaccccagcgacagccgcaggccgtttcttgttcctttgctccctcgtccaaacatccgcattcatgcaccctctataggttacttaccggatttcctgaaaaagtgacgaaacttgtccaaaaaatctgagcgcaacctagcgcaagaagcgttgtgctgaactttggcgagcgttgttttttcgttgttttttgcgtgtggtaattgaggtgctactgaaaaattcgctggccctgctatatttttgatgaaatttttaccggagattaaataaggtaatgttttctctgcttggttcgttatctcgtcatttctccgggaggaccacctcagcatgacttataatctgattgatgaagaatggattcccgttttctatcgcaatggcatttatcgccgaacaggcattcgccgcgctttatctgaatcccacctgatccgcgatattgccgctagtaaccccatggatcgcctggcaattctgcggtttctactggcgctagtttattggtgcaaaggcaatccatcggagaatcctggggctgaggggctagctggtaactgggacaaattagagaaggaaagagactgcttcgaattgctcggaacacgaagaagattctatcaatgcatgtccgcgcagcggctgcgcccaattactgatcttcttcaagaaattcctacgggcaataacttctggcattttcgccattgtcaggatggcaaggacggcctttgtctgccgtgctgcacaatgggtttattaagacttccgctatttagcgtcaccgggcttccaaatttgaaagcaggcatcaatggcgcgccgcctatttatgtcattccggtcggcagaacgcttgcggaaacattgcagatcaattggatgcgctgcgtggaaacaggaatgccagcgtggttggaaccgacgcagaggcctgcaccaggaacagaagtcccaatgctcaatggattgacggcgctgtctcgacgggtttttcttcaggagccgcatggcaaaggtatatgcgccaattgtggaactaatggattaccgctcataataacatgtggatatgaatcagccggcgaactaagaacagaacactggattgatccgcatgttctgtattccagcggcacgccccgcaaatccctgcaagcggccgatctcacctcagcaggaaaattccgcatggacaaaccccagtatgacttgcttgcacaaatgctaaaaaacatcccaagggatgggcatactcaaacaagattctggatcgtcgggttcgccacgcatcaagcaaaaaacatcgacgtctgggaatcttccgtggaattaccggcatgtattgctatgccagacgcgccgaagcttgtggaactatggcagaagcaaagtgcgtccatggttccccagcttggcaaaggcagaagtggcaaatctaaagcccgccgaaacaaagatattccagcacatatggccaacatccggccctatattgaacatactgtatcaaacagaataggccagatacttggaaaaggaattgaggcgtggcgcgaagttgccggcgagtatcgtccaatgatgcgcgttctggcagaatcgctgtccccaggtatttcttccagggcgcttcatcgtcgaagaacaatgcaaaccatcgtgccgcagatgcatctacccggagaggaaagaaagggccaatcaaagaaaagaggcgaagcgtgaccgcgaccgaagaatatatacagaagctcaccgagctgaaatcgggtgatctgggtttgctgcggacgcatggtgggcgaccgctagacgaatccgtagatggctttgatctgtttgccggattatggtggccgctgcgccgcgataatcccacggcgccacggcgcagcgtggcttggctgatcgccaaagtctttgctgcttgtccgatgcggcattctgccggcgacacattggcccggcaattggggcaatgcagtcgcaataatgcgcagcggcgacagcgactgcaagacaagttcgatgagatgcttgcccttcccctagatgaactggagccatgcctgaattgggcgctgcgcctgattgctgctggagcggagaagatcgactgggttcaactcacgaatgatctttcggactgggaaaatgaatcaaaacgcctggaatgggcaaaacaatacatcgaaaggatggaagtatcatgttgattgagatccacgctatacagaatcatgccccatccaacctgaaccgtgacgacttgggcgcgccaaaaacgtgttattttggaggcgtattacgatcgcgtatttccagccagtgtatcaagcgcagcattcgcatgagcgagcagttccgggccttgcttggtggggttgccaccaggcgacttgcgcagttgatcagcgaggggcaaagtgattcgttggcttcggaaagagcaatgaacatccttaagatttgcggcattgccccaaaagataaggttaaaggcaagaattcggaggaagaagccagcgaggatgacaagagcgccggtcgcgttttcaccacgcgcaaagcggttcaacaaatgtcggccttgttgaatggcaacggcatgagcgacgcgaaattagcggctgagtttgccaaaatcatcgccgaagaagttgccgctcctgacatggcgctctgtggaagaatgctggagcccaagaaagcaaagaaggaaaagaaaggcaaatcggaggatgaagaccagaatcaagatacaaacgaaaaaggagtatggaagggccttgatctgaatgtcgatgcagctttgcaggttggacatgccttttcaacgcatgaggcacgacctgaggtcgactacttcgtagcagcggacgatgttcgaggcgaagactccggagcggcctttgtagatgaggccatgttctcatccgcctgtttttacaaatacttttcgattaactgggaattgctggtcaggaatctccatggcaatgaggagcttgccgcgcatactgttggcgcatttattcgtgccgcggcgttgagtaacccaacaggaaagcagaacagctttgcggcgcataatcctccggacggcattctcgttgaactgaagcacacaccgatcagttatgcgaatgctttcgccaagccggcgtcgcaaggcagccgcgatattatttcccaaagcattgcccaattggcccaatatgcacacgacatggacactggatatggccagccggagcagcggttttggttttcccccaatctgcgcaatccgctgacgattattcaaaatcaaaaggaaacctccctgaccgagcagaactataagcgacttgatgacttggtgggcgcagtcattcaatgcatgggccaggactgggagcaggttcaaaacatttgcgtcgaacaagaggtgagcatatgagcgccaacacgctgtttctgcgccttgaggggccgatgcaagcgtggggggatcagcagtcgaaattcgttataaggcgcacggccgaagctcccactaaatccggtgttcttgggttgctatgcgcggcacttggcgttccacgcgccctagcacaagagcagtggctttcaaatctgaatgcactgagcatgggggtgcgtattgaccgtccaggcgtgcgatggtgggattaccacactgttggcgcgcgacagcagatgcaaatagctggcggcgggagcaaagagggggcgatgcttacgcgtcgtgaatacctgtgcgatgcctcctttctggtggcgctacagggcccccccgaactcatcttagaactgcacaacggattacggaagccagtctggacattataccttgggcgcaagaattgtccgccctcgcgtccagtattggaaacggcgccggctgattttcccaatctgataacagcgctttcgggcgttccctggcagccgcggctgaaggaaaatatgcatgaggcaccgcacagtcttgcctgtttattggactggctgcccagcgccgaacagactgaagccccggatgatgctcttatctgctacgatgtgccgcttacttttgacccaccggcgcacggcccgcgatttgtaatccgaatgcagttgcagatgggcgacaacggtgccgtcggcattggcacagaatcaacccagcgttacgcgccgcggccgctgcgcccgcgagcgaattatcgcaacacggaatatcgcaatgctcgagccgagcggttggaagatgatcatcatctttgcgtgttctgcaaatcgcttgccacaactgttcagcacatcacctacaggcgtgcgggtggcaaggaaacacacgatgaccttcgtgcgttgtgccgattgtgccacgatgcgataaccatgctggaatatggggcgggcatggggctggaccgcatcaacccggaagacccattgtatcgcgaccagattattgccaagcgcgctgaaatcattcagttccgttccctggaaatgcgccgtcgtcggctcgaaagcgaggaggcagaataatgtatatctccagactgttgatcgacattggaggaaatccggatcgaccccgaccgggccggcgctggctgagcaatgtttatcacgtgcatcaacggctctcgatggcttttccatcaaaggctttgaaagaaagcgatccggatttcctgcagccctatgatccgggtcattttgaacgtacccggttcctttttcgaatcgataaccagattgccgagaactgccctcgcgcaatgatcctcgtgcaatcccttgcggcaccggattgggactatgcctttcataatgccaggatgttccttgccgccgaaccggaagtgcgccaattcgatcctgccctgtatgagaacgaagcgttgcgtttccgcattcgcgttaatctaagcaagaagagcaagcatagccgtgaaggcgaacaattgagtaaaaagcgaggagaggttgattccaaaggtcgcctaaaggagcagagcaagcgcgttgcgctgacatggaaacgcgaagaaaatgagactccagatgaagtcatccggcaatggttcagtgagaaagggaaacactgcggatttgatctgcgcgattgccggctaatgcatttgggatggttaaccgcgtataagcccaaaatgaaatcaatgccagtagacggggaagatcctggccgtccgatgagattccgcacggcgcttcttgaagggaatctatgtattacagagttagacaggtttcgcgaaacgttggccacgggcatcggctcggctaaagccttcggcttcggcttactgagcatagctcgcgtttttgacgattagacttacatcggccccatgggggcagcatggaactgtgagcggagacacattccgatgcgcctgcacaatctgcacgacctgcccaaagtctgcgacagcctgacatatttatatgtcgagcattgccgtgttgagcaggaagaaaagtccattgccatttacgatcagtatggcatgaccccggtcccatgcgcctcgctcatgctgcttatgctggggccgggcgtggccatcacgcatgctgccatcctcaccctggccgacaacgattgcctcattgcctggtgcggcgaatacggtgtgcgcttctatgccgctggaagtggcgccacccgcagcgccacacggcttctgcgtcaggccatcctcgctacgcgcatgtccacacggctcgaagtcgttcggcggctctatgagatgcgcttcgccgaacccatagatcccgacctgacactgcaacagattcgcggcatggaaggcatgcgcgtgcgcagagcctatgcccaggtatccgccaacaccggcgtgccatggaatggtcgcagttatgagcgcaattcctggggagccagcgatcctgtgaaccgcgcattgtcctcggccaattcttgcctgtatggcgtctgccatgccgccatcgtggcggcgggttattctcctgccctgggattcattcacactggcaagcagctctcgttcgtctacgacgtggctgacctgtataagatggaacttacagtgcctgtggcattttctgtcgccgccagccacgacggccaagtcgagcgcgccgcgcgcatcctctgccgcgatgcctttgctcaggccgaccttctagggcgcatcgtcaaagacatggaacgcgccttggacattcgcctgcccgacgacgatgccgcccaattcgacgaagacccggcattgcccggaggactgtgggatcccgaacaaggcaccgtggccgggggacagaactacggcgaaacgtcagccgactccggaccggcggaggagctgcctttctgaaggagaacatcgcccatgatcgtcctcatcgttgaacgggcccccgcaggattacgcggagaactctcacgctggcttcttgaaccccaatccggagtgttcgttggcaaggtttccgctctggtgcggcagaagctttgggaacgcacctgtagagggctcaaaggcggtgcggccattctcatctggcgcaccaataacgagcagggattcgcgtttgaactgtggggcaatcccagccgcagcgtcaccgattgggatggcctgaaactgatcacggtgcaacatgaggggtatcccaaacgccgcggcgccagcacaagcaagaactttcaggatcctggcaccaacagtccttcagcctgacactattgttgccttccgcatcctaagttcaatagattgcagtatactccccacgcgcgtggggatgaaccgatgtcacgatctctggcggggataagcccatcatactccccacgcgcgtggggatgaaccgttaaaggacaccaagagtcttttggactctgcatactccccacgcgcgtggggatgaaccgcaactggcgagtcggggctagcccaatgaccatactccccacgcgcgtggggatgaaccgttgttatggccgatgatacgatcttgcttgcgatactccccacgcgcgtggggatgaaccgatgatcacatatacaccaaccgatgggccgctatactccccacgcgcgtggggatgaaccgtctggcaaatgatcaccatgaaaacatccagaatactccccacgcgcgtggggatgaaccggtctaacgcaataatcgggtggtagtgccatcatactccccacgcgcgtggggatgaaccggacgcactcgatttgttaagtaactggatgaagcaaggtatgaacgccg

SEQ ID NO: 671 - DNA, 9449 bp, Artificial Sequence
  Synthetic Oligonucleotide
ccttcagcagcgtgcggaccaggtcgcctttgtcattggggtcctggcgcatggactgaaaggctgccgggaaactggttatttccttgtacaggtccgccacatcatagataaagggcaacgtgccggcgtcgtgaacgaatcccagagacggcaggtaacccagcgagcagagtacggcggcgcacaaggcgtaaaggctggcattggccgtcgagagggcgcgattgatgttgtccgccagattccagttggatttgtcgtagttgcgccccttccaggtgactccgtactgctcgccgagttccgcgtatttggcgggcacgcgcaagccctccattccccgcaattcggtgacggaatacgcctgcacatccacaccgggaaagcgctgcacaaacatgcggcgggcgatctcggcgcgctgcttcggggctcgctttggcgtcagaactctcacgttgcctctgccgggagtggtgtgcgaggggctacggaaagaagcccgaagccgaaggctttgccgtgcccgatgccgcccacgatggtttctctgaagctatccgcgtctttaaccgtaagcgtcccctccaataaggctgagcgaaatttcatgcgatcgcccgccggcctcgggtccgatcggtttcctgcgccccacccgatttgcaagacgcggaaagtttccacctggaagccaccttggtcgcccttggcggcgaaccattttcgtatcacatcgtcggggttctggtccttatcccaggtcagcgctacgcgtttgctttgggccttcgggcggccttggcgatctgttccctcgcccgccttggtaagatcgacgccctttgcgctcgtttttaacttcttgcttagattgatgcggatgcggaaccgaagctgttggcccttggcgaagcgagggtcgaattcctctacctgcgggggagcagccagaggattcaaaagaaaacgggcgttgtggaaggcgtagtcccaatccggcttcacggcggagttggactggacgagaatcacgacccgcccggcgggctgcggctcaatgcgaaaaagaaagccggaacccgccccgcgttctacctgaaccggcttctcgccaaagtccgcgggtttgaaaggcttaagaaaatcgcgatcatgggattttcggttctcggagggaaacgccatccaaaggcgctggtggacgtgatagagattccgaagccacagccttccgggccgaggccggtcggggttactcccgacgtcaatcaaaaggcaggaccggtacatggctactccacctcctcggcgaccaggcgcctgcggcgagtctccagggagcggaacgtgatgatttcgttccgcttttggataatcaagtcgcgccaacgcggctcttccgggttgatgcggtccatgcccatgcctaggccatattcgatcatggtgacggcatcgtggcagaggcgacagagagagcgcaagtcatccgcgagttcattgccacccgcgcggcgataggtgatgtgctggacggtggtggcgggcgacttgcaaaagacgcacaagtgatagtcgtcgtcgagccgcttttcccgtcggattctgtactcggtattagtgtaatccgctcttgggcggggaggcgctggcgtgtagctctgtgctggctgagttgcaagcgttacttcgccgtcgagtccaacgcgcagttgcttgcgaatgacaaatcggggctggtgggagggcgggtcgaaggtcacgggcacgtcgtaccagacgagcgcatcatcgggagcctccggctgctcttcggttgacttccaatcaagcaggcaatccagcgcttcgggctgatcgtctccctccaacctcttgcgccagggaaccgatttgagggcagaaagcaagtcaggaaattcaccccccggatgctccagtaaagggcgcgagggagggcagcactttctgcccagatagagcgtccatttgggcgctttaattgcggactccagttcggcaatgaggtccgactctccctgaaaagcgacgagaaacgaggcgtcgcaaaggtattcgcggcgggtcagcacggcccctggcttggttccaccttcggcagtgcgcatcggcatcccggcgcccaccgtgtgataatcccaccagcggacccccggcacatcgatgcggacgcccatgcgcaggcggctaagccttggaagccagccttccggcgccgccgagcgggagacgcccaacgccgcgcaaagcatccccatgacgccagacctggttggggcgtcagccgtccgccgaatcacaaacttcgactgctgatcgccccatgcctgaaggggggcttcgaggcggagaaagagggtatttgcgctcatcaggccacctccgagttcacaaccactttctgaacctcctcccaatcatggccgattcccttgatgactgcctcgatcaattcctcgagcgacttgatattgttttcggccaaggcgttttccttatccccctccgtaacggtcaagggatagcgaagattgggcgagaaccagaaccgcctcgttggtttgccgtatccggtgtcgatatcgtgaacgtactggccgagttgcgcgacgctctgggatatgatgtctcgttcgccctgggctatggctggtcgggcaaaagcgttggcatagctgagaggtgagtttctgatttcgaccagcattccgtcgggtgggttgtgcgcggcgaaactattctgtttgcccgtgggattcaccaacgccgctccccggatgaacgcgccgacagtatgagcggccagttccttgttgcccttcagattgttgatgagggtttcgaagtcaatcgaaaaatacttgtagaagcaggcggagccgaacattgcttcatctacaaagcctgctcccgcgtcttcaccgggcacatcatcagcggccacatagtagtcaatctccgggcgagccgcgtgagtagaaattgcgtgggcaacttgcagcgccgcctcaacggttgtgtcaagtcccttccagacgtcgccgcccttgggcttcgcgccgccttcctccgacgcctgctttttcgctttctttggttccagcattctgccacagagtgccatgtccggggtgctcgtatggcgagcgattatctgggcaaattccttggcgagctcgttatcggtcttggccgacttggttttcagaagctcagacatctcgttgaccgcttgtttgctcacataaaccactccggcgcttttttcgtcgggcgtagattcctcgtcgtcgcctttcttccctttcttctcttttgccgcgatgccgcagatttctaaaaccgcgatcgcctttttaaactcggcggtatccgggccgcctggagcgatcaattgcgccagtcgccgtgtgcgaacgccgccgagcaactgcttgaattcgtcactcatgcggatgctccgcttgaggcactgactggaaatacgggagcgcagtactccgccgaagtagcaggtcttgggagcgcccaagtcgtcccggttcaggttggccgggctgtgattttgaatggcatgaatttcaattaacatgacggtcctccttcgaagacttcaagaattcctcggcccacttgagccgggtggtttcgcgttcccaaatggaaagatcgtttgtcagcgtcacccagtcgagcttcgggtttttggaggcgatgaggttaagcgaccattgcaaggccggctcgagtatatcaaccggcaaggtcagcatcctgtcgaacctttccgcgacagggtctttctcggggtcattgtcgttccggtaccgcccaagctgccacgcaagcgtctgcccgggtgaatgctcgatcggccggaaggcatagagttttgcgataagccacgccaccgcacggcggggcgcgcgctgattcctctcccgcaacggccaccagagccccgcgaagaggtcaaaggcatcgaccgattggtcgagcccttgcccggcatgctcgcgcaggagtccgagatcaccggacttcagatgtgtcaggacgtcgacgtattgctccgttggagtcatttgtcgcctcccttcttccgtccggccctcccggccggtggggtgcctggctgcatgttcggccttacattgacaatctggcgtcgccgccggagcgcagcggtggtatagcccggggaaagcgatttggcgacggcggccatcatcggcctatattcccgggctgcctgctcccacgcatcgcggcctcgcgaaatcaactcgccgaccttcccggagacctttgcttctacgtgcgggcgaactgcggcgaccatgggaggaatttcaagatgtcttcgggaagtccctctcggtttggctttgccggcaagcttccggccctccttttgccacatgtcaatcgtttcgacactctccgcgacctgccgatcatctagcgtgctcgggagaggaatctcatattccatcgcttccaggtacttgtcgttctgcaccgtcgcaaagctgacgacccacaagcctcttttgccattgggctttttctcccgaagaattcccgccgctatccttgcccattgcccagccgccgcgtcggttgcaccaagggcattgctgggtttaatgacatcctcgccgtcagtgatggtgtgcgggtcgctccatacgcggcccaggccattttcatccgtttttgcgctgccgacaccagcaaacacacattggcgtattagaggcgctttacgtccgcacgagatgcagttggcgtcgggttcctgcggattgtccagccacacgcgccggggcagcgacgtcaatcccacaagcagcggaacattgccatgtcgaggaaggctaagatcgggctcttcccaagccggcgttccgaagtccgtgtccgataccttgcgccaggagagacgcagggtttccgcaagtgaaccgccgaccggtacgacataaaccggcggtttctggttgacccctggcggcttgccgcgcccccctgacgtagcaaatagcggtaaacgcaataaccccgcggcgcagcacgccggacataatccgtcctctttatctgtcgaatgccggaagtgccaagagtttgtgccagtgggcacctcttgcatcaggtagttggcggaaagctttccctctgttccagacttggcattgcactgatagaaccgcttgccatctcccagaaggttgaaacagtccttattgtcatcaagtttcctgaaccaatccgagggaaacgaagagaccgagtcttcatcgtccggcggattccccttgcaccaatagagaagcgcgaggaggaaacgcaggatggccaaacggtccatgggattgctggcggcgacttgacgaatccggcctgcttgcctaagagcttcagtaatgcccacgcgattgctattcccgtctttccatagaactggaatccagttttcttcgagcaggttatagctcataacttcctccttgccttggcaagaggctggtgggcggcccgttgcgctcctggcggcccgattgtcgggtggctgtctaccaaatgattaacgcgatgaaggtatacacccggcacgcgagaaaggcaaggcccgaagaccacaagaacggttatcgcctctgcttagcagacgcgaaccaggagccacctgctcgccaccctttcggccgctgacccaggaagaaaaggtggaagtggagctacgaatccaggcggcggcgccggatgtcgtctgggtaggcttgagcactcccaaacaggaacgctcgatgttcgagcaccgctcacggctaggcgtgccggcgatggccggggtgggagcggccttcgacttcatcgccgggactgccaagcaagcatggatgcaggagaacggcctcgagtggttcttccgcctcacgcaagagccccagcggctctgccaccgcaaggcaggggacaggttacaggttacaggggaaagaagggaaaacaggggttagggaacaggggaaaacaggtgtcaggtatcaggtgtcaggcagcaggctgaccttgggcgccggacggcgctgcctcttggcctgtcacctgtaacctgtgccctctgcctgtcgcccatagccttaggtgaaacccacggaaaggaaacgcggaaaattaggttcctttcgtcgccgtctcggtccgtaggtttcacctacggctaatgatattcctccccttcggggaggcaggtagcgtcctaaacgtgtgttggtggggttttggaattccaatcaaacactggaagggtgtgccatggagtgcattttctaaccttccggggtgtttaagaactcaagccccgcgaaggtccaatggctgaactcatcctcccgcacccaaatcgtgcgagtggggatggcatacgggtatcctcccttgggaacgacacccacccactctcctggatctaactccagcttggttcgaacacaggcgccgcgcggagaaatgtcgaccgcgagagctgaatcgtctgcattgaagaggtcggccttcaccacaagtttgattggaattgttgctattttgcgctcacaccggcgcgaattaacggaggcatttgtttgcatcggcagcccctccccttttggctagactaccggaaacctatattaacccatccaatggggttttgtcaagtcagtccaggggtattggctgagaagttacattgacggccgaaaggaaatctgtgcaacttggcgagctgaaccgagtgccgaagaaaaaaggagtcagtagaggggacggcggaaggagtaaaaacgggtattacagtccatgcagcgaatgggcacgataccaaaaaagctaagaatccaccgctcgatccaacctcgccgatgggagtcggcgagattcatactctcgcatttggggcatacgtcgctggtcatggcttttaccaatataggcactcaacgcgcgtgctgatcggccaagaggttctggcagagatgaagattgtggtgagtgctgttaataaaccctgatgaagcccagagctgccatgagtccgaagatgccaagtacagccagcagcgctcccacgattttaagtttaggtacacgacgaagatgcactccgcttacgattaggccaacggatatcaaaatcgcggtcaacatcccgagtgagtcaggtgccattttcaaacacgttttcactatttagacttcggtcttcctcccttacgggtcaaccgctaagactgaagccacttgagataagcagggccgcacctagcgatcgcttcgccgcccctccgtccaagttcgacagcagcggggtccttaccttgtttttcgctgctggaaagatgctacgtgcgatcgcagtttgtcaagagggaggggaccaacacagaattagggcgctaccccaagttggccatgccacaacaccctccgacagtcagagaccgccactacagcgcgccagggaagggctgactctccaacgggtgagtagcttggtcatcagacttaaggtgtcatgagcgggctggacaaaatggctgtagcgtagggctctgagcggtcaggacaggggataggttacaggggacagggtacagcaggaagagaggtgacaggttacaggtcacaggggacaggggaagacagggaacccgaaggcagaggaccgtggacagggaacaggggaaaacaggtgtcaggcgtcagggaacaggctcacctttggcgccgcagggcgcagcctctttccctgtcacctgtaacctgtcacctattgcctattctctcctctttccctgtcacctttggcctcgcagggcgcggctttggccaccgtcctgctgcatagtttccctatcgagcagcgcacgaatatgagaagacagcggacaggttacagggaacagtggacagtggacagggaacaggaagacagggaacagaaagacagggaacagaaagacagggaacagaaagacagggaacagaaagacagggaacaggttacagggaacaggtcatagggtagagaagagagaacagggtacaggtgacaggtcacaaggtacaggggacggaggaaggcagggaacggaaagacagggggacagggcgcagcctctttttctgtcacctgacacctgacacctgtgacctgtaacctgtaacctctggctgtcacctataacctgctcgccggacaggagatcgaaatgattcttgccttacctaataattcctgggtgggctgcgcaatgtgcctgctcatcgccgtgctcgttggcgcgtatcgccaatggtgcatttatttttgggaaaggatcgaactcctgccgatcgcagatgacggagacaataagtccgaggattttcacctgaacgcctacgtgccgggttggaagtccaacaagttccggatcggatcgtggctcttggtagcggcgtgcagcaccttgggcgcggcttggggaaccgtcctcctgcggggtttcaatttcgaacatcgcatcatctacttcttgggaattctgctcacccggtggctgctgtccgccctcctcggcatgagcgtcgcgaaccataccctccgagggggccatagcgttccgcaatgagggggaaatagggaataggttacagggcacagggtacaggaagacagggaacaagtaggcagggaataggttataggttacagggtacagcagggaaaacagggaacaggaggacagggaataggttataggtcacagggctcagcttccctcccgggtcgcgtgccacctatggcgccgcaaggcgcacactcgttccctgtcccctgtcccctatgagcttgcttgaggctccttcactgtcacctgtgacctctaacctgtctgctgacacctactgcgccagggcgcagcctccttccctgatacctgacacctgagacctgttacccaagttgactatctagcctattaatggtacagtgatgctcccaatccagcccatgcccgtccagtcccactccgtagggccatcgcgagattacccgagaatgctggacattaccgctttatccacaattggagtggtgctcgcctacgctgtcttcaagtggggcggagtgccccgaaccgaccagtaccgctacctcctggtgctgggcctgctggcggtggtgctgagccttgcccggccgcgcgaccagtgggcgcccctacccggccgtgtggtgcgctggtccctggctcttctgccggcatacatcctgatgcaggtggttccgctgccggtcgcgttggtcagtgtgatttcacccgtccgcaccgcgtcgatacctccagcagccctcatcggacgcccagccaactttcttaccc

SEQ ID NO: 672 - DNA, 9344 bp, Artificial Sequence
  Synthetic Oligonucleotide
cccgtcgttggggacggttcacccccacacgcgtggggacgacggtccgtaactggctgttatcgcgcgagttgtcggttcacccccacacgcgtggggacgacgggaagggtttgggataggggatagggttaagcggttcacccccacacgcgtggggacgacatccaagcctgcagtctcgcggaacggcgaagcggttcacccccacacgcgtggggacgactgtctcacgcccttcgttggccgtccgcggggcggttcacccccacacgcgtggggacgacaagaaggccgattacggaagcgattcagatcatggttcacccccacacgcgtggggacgaccgcgtaatcttgattggccgggcgccgatgaacggttcacccccacacgcgtggggacgacgctgcgatttaaagggcttatggcccgcgaactagaagaagtccctcgaagttttcgacccgccgagagggcgatccccaaaagcggatatcaaacccctgctcgttggcagcattgtagaccagaattccagccccacccgccaatttgcggcagacttcctgccagagcttttcccgcaccagcgcggaaatgtttcccacaaaaacgccagcatgcaattccagcatccatcgtgtcagttccccgcgcacgctgggaggggcattttcgagcaccatcacgaccgtggcttgtcacctccttcagcatcatctccgcggttgatgcctccctccaccgcccccacttcgggatcccagagccaccctggagccgctggttgggcatccagtctggcatccccctgcccaccttccgaagaaccccaatcgagagcgcggtcgatatcggggataattctctgtaataagcggctttccacaaacgcgtcgcgacatttccttcttacgtggctttcctgaaagcccattccttcggctgcggcccgaaaggcgaggggaatggtgacttcggttttatacaggtcggcaacatcgtagacaaaggagagcatctttccggtgtgaataaatcccaaggccggtgaataaccgacggaaacaatggcggcgtggcagacgccgtagaggcaactgttggccaccgaaagggcgcgattgacggcatcggcggcctgccagttatcggttttgtaggatcggccggaccacggaatgcccgcctcgcggctggcgcggaagtatgcgtcgcgcacccggacaccctccatgccgcgcaattgctggatggtcagggaggggtccagcttctccgggaaacgcatcttgtaaagccttttaaccactatgaagcgcaattcgggcgcagagcagaggcgtgactgatgcagcaggcgttcggaagagcgcgtttctcccatgccctgagcgtaggttcggacgccctcttcgcccgtccagaggatggtgcagccattgtcagcaagagatcgcacagccgcgtgcgtgatgctggtgccgggaccgagcatcagcaccagcaatgacgcgcagggtactggcactcggcccttcgcgtcgtgaatggcgatcgctttgccctcctggtcgatcttgcaatgctcgacgtaaaggaaactggaactatcgcggactttgggcaacagatggaggtctttcatgtttttgtagctgcgccccatcgatgatcgaggcggctggcgtcctctctcagcccgttctttacaccaaccaccccttatcccctccttaaccaaggcggggaattaccctcttcgctgaggaagggcccggtagtggtaagtgtggcgatggtgtggtctccactgtaaagaatcaaacggggcaggaggtcaaaaatggcggtcatagacctccggtacaacacggcgctaccgaaagcagcccgaagccgaaagctttgcctggcccgatgccttgtataatcgcttgccgaaacagtgcgggctcggtaacgctgagaagcccgtcataacggacagagcgcaggcgaattccatgcctgtcccctcttttgttggcgaacacataacccggcaaaacattgatggaatccttctcgatagaaaaccccgccttttcagctcgccgattgatccaatcgaggagttgatccgtcggcacaggcacgcgcatccctttcttatccgtattcgcccatttcttgacgagctgtccgtcggctccaagcgagtgttccgtgaggcggcgggtaggattcgcaaggaggcggaatcgaagccgctgacccgttgtgtagcacgggttgaatggctttacttccggcggggcggccagcagataacaggcgttgtgaaaggcgtattcccagtcaggttttggtgcagactgtaccagaattaccacccgactgccggaatgccgagcctgtgatgcttcgcggcaacatcgttcctcgggatcaaggcggaagagaaagccagcggtcggcccgcgctcaacatgaacatggccgttcccaaaatcctctggctggtagggctttaaaaactctgggtcgtactgctttctgcggtcggagggaaacgccatgcaaaggcgctggtgaacgcgatagaggtttcgcagccattggcgcccggggcgggggcggtcgggattgtcaccgacgtcgatcaggagacacgaaatccacatggctattccacctcctctggagcgaggcgtcgccgacgcgtttcgagcgagcggaaggcgatgatctcgttccgcttggcaataatctggtcgcgccaacgtggctcttcgggattgatccgatccagacccatgtttaaaccatactcgatcatggtcacggcgtcatgacacaaacggcagagcgaacgcagatcttccaagctttcattgcctccggcgcgccgataggtgatgtgttgtaccgttgtggctggcgccttgcaaaaaacgcaaagctgctggtcgcgggcaagccgctccaggcgcttgttcctgtaggcggagttggtgtaatcggcccgcgggcggggcggcggcggagtttcggtctgcgccggctggcctgcgacgcccacgccgccctcgatggccactggcaattgacgccggagcacgaatcggggttcgtgcgagggtggttcaaaggtgcggggcacatcataccagacgaaggcatcatcaggcgcttcaggctgatctgccgtgggctgccaatcgagcaggcagtcaaccgttttgggcggttgatcctccttcatccgtttgcgccaaggaatcgacttaagggctgagagtaaatcgggaaactcaccgcttgcgggtttttccagcaaagggcgtgacggagggcagcattttctaccaagatagagcgtccacttgggcgctcctactgcggtctccaactgcgctatcaggtcggcctcaccctgcaaagcgatcaggaaggatgcgtcgcagagatattcgcgacgcgtgatgagagtttcaatttcccccgtcgcggccgttctcttagcgccagcaccatctgccctgggtattccgaccttggctccgaccgtctgatagtcccaccagcggacacccggcgcatcaatgcgcgcccccatacaaagcgagcccagctttcgaagccattcattagaggctttacatctgctaacccccagggcggcgcacagcatcccgacaacgccagacttggtcggagcttccgccgtccgtcggatgacaaactttgactggtggtctccccaggcttgaagaagaccctccaagcgaagaaataaggtgttggccctcatcaaaccacctctgcgttcacagtaattttctgaacctcatgccaattgtggccgattttctcgatgaccttttgaattaagatatcgagcgaactgagattattgtcggtaagcgcaatctcacgtcgtttcttttttccatcttgttcttcctcgatgtaagccagcagaggatggcgggaattaggcgagaaccagaatcgctccgttggcttaccgtacccggtgtccatgtcgtggatgtattggccaagctgcgcgatgctctgggcgatgaggtcacgttcaccctgagcaaccgcgggtttcgcaaaagcgttggcgtagctgagaggggtgtccctgatctcaaccagcatgccatcgggaggattatgcgcggcgaaactgttctgttttccagtggggttcaccatcgcagccccccgaatgaatgcgcccaccgtatgtgcggccagcttttcatgttcttccccaaaccccatgaggtttttcaccaattgctcccagtggattgagaaatatttgtaaaaacaggccgaggcaaacatagcctcgtccacaaagccggcacccgcgtcctcgccggggatgtcatcggcagcgacgtagtaatccacctcggggcgggcctcatgggtggagattgcatgggccacttgaagtgctgcttccaccttagtatcacgcttctcccaaaccgtagaagatttgtccggctccagcatgcggcccgacaaggccatgtccggaactgccgtgcgctccgcaataagtccggcgaacccctccgccagttcactctcagcctttccatcgctgtttcggaggaggttcgccatctcttcaacagcctgtttggtagtatagacaagcattttgctcttctcagaattttcggactcgccttccgatctccagggcttgaatccgcatatttcaagaatcttctccgcacgcttcctcacatctttctcgggaatcttgtcagctatcaatttcgctaattgccgcgtacgaacaccgcctagcaactgcctgaactcgtcgcttctacggatgctgcgcttgaggcattggctggagatgcgcgagcgcagcacaccgccgaaatagcaggctttgggcgcgcccaagtcatctcggttcaaattggccggagcgtgattttgaatagcgtgaatctggatcagcatttatcctcctcctagagacttcaaaaattcctttgcccattcgagacgggtggattctcgttcccaaaccgaaagatcatccgtgagttttatccagtcgagtcccatgccctttgaattgagcacgtcaagcgcccattgcaacgcaggttcgattttgcggatgggcagagtcagcatcctatcaaaccgctggatgaacttctcccgcttgccaacttctggttggcattgcccaagaaggaaagctagcgtctcttccgccgaatactcgagtggccggaaggcatagagcttggcgacgagccatgccacgtcacggcggggtgcccgcgagttcctttgacgcagcggccaccataggcccgtaaacaggtcgaagccctctaccttctcatcgagctcctgccccgcgtgggtgcgcagcaatccgaggtcaccggtcttcaggtgtgtcaggcgtttgatgtactgttctgttggagtcacttatcgcctctcttgcggtcagattccctgccttctctgtttttaaccgcatgtctggtttaacgcgcgcaatttcctgccgctgtcgtagcgctgtggccgtaaaatccggagaaattgatctagagatggcaaccatcatcccttcatagtagttggccgccccctcccatgccgggtggccgtcggaaatgaggcggttcaatttcacagaggcactggcttcgatatgaggccgaatggcttttaccagggcgtcgatctcaacatgttttcgcgaggatttcttgttcttcaccactctgacaactctttttgccagccccgctgcttctctttgccatctctcgatctccttgatggcatcttgaatctgagcactttccgtggtaggttgaaggaaaatctcaaattccttcgcttccaggtacttgtcctgtttacttgcgaaaccaacaacccagaatcggcgtctggaagtgtgcttggtatcgatgaggatcgccgcagttatctttgcccaatcgtcagccgctttatcggaatcggcaagggcattacttggtgtcatcaccacatttttgtcacgaacgacgtgcgggtcgttccaaactcggccatccgccttgccgctaccgatgccggcaaatatgcactgccgaatcagaagctcttttcgcccgcaacaaatacaagggacttcgggttccatggggtcgtccagccaaacgcgtcgcggcagccatgtgagcccggtcaggagggggacttcgccagtcttgggcagtgccatgtcaggcttctcccatgcaggcgtacccaaattcgactgtggtcgccaagagagccacaaggtctcacacagggatcgtccgagaggtatgacgtagacggggggtttgccattgatgcctggtgattttcctttccccccttgggtggtgaatacaggtagccgcaacaaccctgtggcacaacacgcccgacaaaggccgttaactccgtccgcggaatgccggaaatgccgtacattggaccccgtcggcacttcatgaatgagatagttgacggaaagctttttgtcttttcccgagcctggacggtactgatagaaccggattccgtctcccagcaaattgaagcattccttgttttcatagagtttggtaaaccatgcttcggaaaaggtgccacccgaggttggatcgcgcggtggatcccctacgcaccaataaagcagtgcgagcagaaaacgcagggtggccacgcggtccatgggattggtggcggcaatctggcggatgcagtgtgcttcagtgagcacctgaatgaggttgacgcgagtgagctttccagtcttccatagaactggaatccaatcttcctcaagtaggttgtagctcatgcccccctcctctttgccggaggttcaccggaaggcttcacattttacgaaaatttttcgagaaatgcagggggttttttgtggaaggctttaacgaacaagccatccttcggccgagaatactgatgtttggtgaatttcatgcgagcacgctcccccaagttcgaccccggggcaaaaggctccgcaaccggttcttcagccggcgcttgttctgctaaaataaagccgattgcttcataccgttgaagtggacttcccggagggatgggtgagtggttgaaaccggcggtcttgaaaaccgttagccccgaaaggggctcgggggttcgaatccctctccctccgccaacctattttcgggttccaatcaagcctgttccaatgccttatgcggccagcaagaatattctgagtgtagaccttgacgcagattaggctagaatcttaggcactccgatagacgaggtgagacatgcctgatgctgacccgacgcttgaacgcctcgaagatcaaattggttggtacgatcacaagagtaatttcaaccagcgcactttcaagtggatgaaggtgattgagattggtgcggcgggcctggttccgttattttctggtttcaaattgccgtgggtggcgggaagccttggggcgctgatcgcaattttggaaggcgtgctccaactcaatcaatatcattacaactggatcacttaccgttccacttgcgaatccctgaagcacgaaaaatatctctatttagccggggctggtccttacgctgctgccatcaatccccatacactcttggcggaaagaattgagtcgttggtttcgcaggagcacgccaagtgggcggcggggcaggagcaggccacaaagacaaaggatgcctgatccgtcgtaaaagggagtcttgctgatagttcaggctcaaggctaccccctcatcggcgcctgtattgcatcaacaccaccagttccgcgcgcgccaggttggggcttaccaggcaggtgcggtcattgcgcagacaattaaggatcgtcatcccgcaaccgcaagtgcagaagccttgcgataacgcttcggtaaaggcggctttttcagccatcgtcagggccgaaaggtcaaccttcggcacgttgtaaaccacctcggaaagatttccctcacgagtcagcgccacattccagctcatctgcatcaggtcaaggcaaggcccgccaaagttggcgtgtgttccgtcagtgcctttcaatttgcaggcaaacttaactccgttgttgagaaaatttgtgccatttgaaaaattcagaacgtcatctgcggcgttgtattgccatcctccaacggcggcagacgaacggttcagtgtgacaccaaagctgaaatccgggtagagatcaacgctctcgatgagttgctgaccggaacctgtcactattgcccgccagttgccaacaaaatgagcagagctgatttcagccggcgggggagataccggagcagaggttattcgcgctggtgcggaagccttggttggccctgacgatgtgcggctagcctgttctcgcggcggagcgacagaggttttcaatgagcgtatgccagcattcgactccgctcccgctccgtttgttggcgccctgtcagcagcattaggcatggcgtctttctgagggccggcgtcttcgcgcacgacggacacgggcgagttctgcgctgagtgataaatcgtgaccacgacggctgcaatgattgtcgcgccaagaagcgcaacggcagccacacccggcctgaagcggcgccgctgtttcggcgtccttccccgtacgcccaaggcgtggtcaagcgcctctgcgagtttctcgaagccttcatcccagtcttgctcggtaatttcgagagcgttgcgccgcgcaagcgattgaaggtctgctggaagctcttcttccgacggcatgcgggctccacccaccagcactggaaacacccgcacgcctcgccggagagcagtcaagatctcctgacgaaccgtatccttcgggtcgtcaagtcgtcgggtgcccgccgaattcgtcaccgtcagccagcttttgccgatcaccaccacgactgcatcgcttgaacccaacaccttctcgatagcttcctgccactcgacacccggttcaagggacccaatatcgcgaaagacatgattcggataacgagccttgaggcgatcatacaatcggcctgaatctgcccggctgtcatcccggcgataattaataaaaatttttccactggccatagcgaccctaccctttcctctaggtcccaaggcggtctgaatttgtcaaagttgatgatttttgaaatgactgatgctgtgagtgtacaggagaggaatgatattttcaagcgtgatcgaaaagctggcatcgctgaaaagacgtgtgttattctg

SEQ ID NO: 673 - DNA, 9327 bp, Artificial Sequence
  Synthetic Oligonucleotide
ctcgaaattaccaacgcgctactgaccggtgagcgtcgcaagcgattgaagcagccggaaatcctgcgcttcgccgctttactggagggactttcaattctccaggatggccaggcagtgggtagcgcagacctgcgctttttgcaggtctgcggcttttcaagattcacggcggcaaaagccgcagacttcgatatgcacgaagtctgcgctacccgctgcggttcacccccacgcgcgtggggacaacgacttaatgccattttaggaagtgtccatcaccggttcacccccacgcgcgtggggacaactctttgtcgcggtcgcttagacctgcgctcgccggttcacccccacgcgcgtggggacaacgaatggagctgttgcgtctcggagggcaaaggcggttcacccccacgcgcgtggggacaacttcatcaaactcactaagctctatgccaagagcggttcacccccacgcgcgtggggacaacaagctgaaagttggctttccttttcgagagaccggttcacccccacgcgcgtggggacaacgactccatattcgtcacatccgccgtgtccgccggttcacccccacgcgcgtggggacaacggatacggacgaggttggaatgtgcgcgccgccggttcacccccacgcgcgtggggacaacttctgcgacaccacacccatatcaagctacatcggttcacccccacgcgcgtggggacaacaccccaagaaataattcccctgggaaccgtaccggttcacccccacgcgcgtggggacaacttcaaactggcgttctttataagatgcagaagcggttcacccccacgcgcgtggggacaacgaaccctgcctgtaactacactcacgactccccggttcacccccacgcgcgtggggacaactttcagcggcaatgcgaatcgccgcgagctgccggttcacccccacgcgcgtggggacaactttggggtataaggccgctgtgctgcccgatgcggttcacccccacgcgcgtggggacaacacatccaagtgcttggtcttgatattgttttgcggttcacccccacgcgcgtggggacaactggggtacggtgatcctgcctgcggctgggaacggttcacccccacgcgcgtggggacaactccgcgaccttctcctccaacacggcccgctgcggttcacccccacgcgcgtggggacaacatcggtcgagcagaaggtgcaagccaccattacggttcacccccacgcgcgtggggacaacgcatcggccttggcctcagccttaacctgcgccggttcacccccacgcgcgtggggacaacgtgatcgaggaccgtgccttcaaagttctcccgcggttcacccccacgcgcgtggggacaacccgcagtctcacaagcgcgcgtcggccccagccggttcacccccacgcgcgtggggacaacatcgccagcacgcgccccgcgccctcggaggtcggttcacccccacgcgcgtggggacaacctaagtggattcgccttgccactcgccgataccggttcacccccacgcgcgtggggacaacatcaagcgccagccccggcacatgcagcatatcggttcacccccacgcgcgtggggacaacttctttccagcccatgaaaccttcagccccggcggttcacccccacgcgcgtggggacaacacttactaaattattgattctgcggcatgcgaacgagaaaaaggccctcgaagtcatcgatgacccgagctgtttggccccaggttcggactcgaaagccctgttcattgtcgcttgaatagataatcaagcacccgcctcccttggcctggctgcaggctttttcccagagccgatcacggaccatggcggagacgcgtcccacgaacactcccgcctgaggttccaaaaaccagcgagtcagctcgcctcgcaaccctggggggacgcgctcaagaatcaggaccaccatcgccgggctccgtttcaccgatttcgggggctagcaggcggccgccttcgacctctccttccagattgtcccagaggaagccgggggcggcggcatccaggtcgaaggtagtgtcccaggccgtcgcttttgccagcatcaacgccctttggacatccgggatgattctctccagaagccgcgtggatacgaactgatcgcggcaggtgatgcgcacccggcgttccaactgtcccgtcccctcggcggcggcgcgaaatgccactggaacggtaatttcagccttgtacaggtcggcgagatcgtagacgaaggacagcatcttgccggtgtggataaacccgagtgcgggcgaaaaacctgctgacacgatggcagcatggcagattccatataggcaggagttagcggcggacaaggctcggttggcagggtccgccttgctccactcatcgcgtttatagctgcggcccgaccacgtgatgccggcttcctgggcggccttggcgtaggcatcgcgcacccacacgccctccatgccgcggatttgctggagggtcagggcagggtcgaacttctccgaaaatcgcaactgatagaggcggcgcaccacctgcatatggaaaccctggtccgcccacagcctcgcctgatgcaggaagttggccgcgttgcgcgtctcgcccatgcccacggcgtagaagcggactccctcctccccgcaccaagccaccaggcacccatggtccgccaacacggagatggcggcgtgagtaatcgagacgcccggacccaacatcaggagagccagattggcacaggggaccggcaccttcccggcttgatcgtggacggcaatggcccgctcttcctgatcgacgtggcaatgctcgacgtacagataactccacccgtcactgaacttgggtagaacgtggagatcttgaattctcacagagcctccagcccgtgctgtagcgtcgatctccgatcgacggcggttgtagcgtcgatctccgatcgaccggggttgtagtcgatctccgatcgacgttacggcggtcggagaccgccgctacaaaaccaggcgatggatctcaccctggtacggccaatcttccgggcgcttgactaaaccggcccggaccggattctgccggacatattcatatttctcccgataggattcttgcgatctcaggacgtgatcgaaaaagtctttctcccaatgtgtgccctcgccctcatcttcccggaggactttggataaatccccgcgcagcgccttgatccatttccctaaaggtggggactcacgacaaaagccggcgaaaagatggatgtgatcaggcatgatcatgaagaacccgacccaaacaagaaaatcgctcgcccgttcggagaatctcgtgaattcccggtgaatcgcaggatttgccaacgagcgtttgcggtcctgcgtacacagcgtgagatagtagattgggctgcccgtatagagccagtccagtcgccgcaagcggggtttgaatttcatattggctcgatctccgctcaagaaatgttgcacggatccccgatcgacaagggattgtagcgtcgatctccgatcgacgtaccggcggtcggagaccgccgctacagcgagagcggcgccacggaaagcaggccgaagccgaaggctttgccgtgcccaacgccgcccacgatggtttctctgaagctgtccgcgtcctcaaccgtaagcgtcccctccaataacgccgagcgaaatttcatgcggccgcccgtcggcctcgggtcggatcggtctcctgcgccccacccgatctgcaagacccggaaagtttccacttggaatccaccttggccgcccttgccggcgaaccattttcgtatcacatcgtcgcggttctggtccttgtcccaggtcagcgccacgcgtttgccttgggccttcgggcggccccgcttatctgtcccctctcgcgtcctcgtaagatcaacgccctctgtgctggtttttatcttcttactcagattggcgcggatacggaagcgaagccgctgacccttctcaaagcgggggtcgaattcctgcacctgagggggagcggctagaggattcagaagaaaacgggcgttgtggaaggcgtagccccagtcaggctttacggcagagttagactggacgaggatcacgacccgcccgcccggttgcgggtcgatgcggaagagaaagccggagtcgccgtcacgtcttacatggacctggttgttggcaaagtccgcgggtttgaaaggcttgaggaagtggggatcgtgggatattcggtctttggatggaaacgccatgcaaaggcgctggtggacgtgatggaggtttcgcagccagagccgcccgggcctggggcggtcggggttggtgccgacgtcaatcaagaggcaggagaggtacatggctattccacctcctcagcggcaaggcgtctgcggcgagtctccagagagcggaacctgataatctcttcccgcttctcgatgatcttgtcgcgccaacggggctcttcggggttgatgcggtccaagcccattccgagcccgtactcgatcatggtcacggcgtcgtggcagaggcggcagagggagcgcaaatcgtcccggagttcgccgccgcccgcgcggcggtacgtgatgtgctgcacggtgctggcgggagacttgcaaaaaacgcacaagtgatagtcgtcgtcgagccgctccttgcgtcggtttttgtactctgtgttcgtgtaatccgctcttgggcgcggaggcggtggcgtgtcgctctgcggtggctgcaccgcaagtgttacgtcgccgtccgctccgacgcgcaactgcctgcggatgacgaatcggggttggtgcgacggcggctcgaatgtcaacggcacgtcgtaccagacgagcgcatcatcgggcgcctcgggctgctcgttggtgggttcccaatcaagcaggcaatcgacgggtcgcggctggggatcgtccttcagccgccgacgccaggggaccgattcgagggcagaaagcaagtcggggaattcacctcccggatgctccagcagagggcggcaaggggggcagcactttctgccgaggtagagtgtccacttgggcgctttgattgccgcctccagttcctcaatgaggtccggttcgccctgaagagcgacgagaaacgaggcgtcgcaaaggtattcgcggcgggtgagcatggctccggacttggttcccccctcggcggtacgcatcggcatccccgcacccaccgtgtgataatcccaccagcggacccctggcgcatcgacgcgtacgcccatgcgcagccgggccagccttggaagccagccttcgcgggcctctggccgggaaacgcccaatgccgcgcaaagcatcccgatgacgccggacttggtcggcgcctcggccgtgcgccgaatgacgaacttggattgctgatcgccccatgcctgaagaggaccttcaagccgaagtagcagcgtctttgcgctcatggggcacctccggattcaggaccactttcttggcctcctgccagtcgtaaccgatttccttgagtacagccgctatcagttcgtcaagagacttaacatctttgtcggcaagcgggacctcacgctgtttctgttttccgtcttcgctctccgtggtggtagccgtcaacggatagcggagatttggagagaaccagaaccgcttcgtcggcttgccgtatcccgtatctatgtcgttcacataatgggcaagctgcgccacgctctgcgagatgatgtcccgttcgccctgaggagccgccggtttggcgaaggcgttggcgtagctgatgggagtgtttctgacttccaccaacatcccgtcaggagggttgtgcgcggcaaaactattttgttttcccgtggggttggccaaggccgcggcgcgaatgaaggcgccgacggtatgggccgccagtttttcgtgattcgtcccgaagggcttcaggtttttgaccagcgtttcccaatgaatggagaaatacttgtagaaacatgccgaaccgaacatggcttcatccacgtaacctgcgcccgcgtcctcgccggggacatcatcggcggcgacatagtagtccacctcgggccgggcctcatgggtggaaatggcatgggcgacttgaagcgatgcctcaaccgtcgtgtctttgaggactcccgtttcaagcatcctgccgctcagcgccatgtccggcacggcgacggattcactgatgagcttgccgaactccgctgccaaggcctcgtccgtttttccgtcgccctgctggaggagttcggccatgcgtgtaatcgcctcttgggtggtgtaaaccagcatcttgctcctctcagcactttcctgttcgtcttctccttcctgtttttttgctttcttaggctccagcccgcaggctttgagaatgttctccgctcgcttcctgacgtctttgcccgtcaccttttccgcaatctctttcgccaactggcgggtgcgaactccgcccagcaattgtctgaactcctcactcatgcggatgctgcgcttaaggcactggctggaaatacgggagcgcaagactccgccaaaaaagcaagtcttgggcgcgcccaggtcatcccggttcaggttggccgggctgtgattctgaatggcgtgaatctggatcaacatgactctcctcctcttggacagttcaaaaattcctcggcccatttgagccgggtggattcgcgttcccagatggaaagatcgttcgtcagccgcacccagtcgagttcgaggtgcttggaagctatgaggtcgattgcccactgtagggcgggttcgatttcagcaagcggcagcgtgagcatcctgtcgaagcgttgctcgaaacgctgccgcgctgttttctcgcccggccgggatcgcccgagctggcgagcgagggtctcgcggggtgaatgctcgaggggccggagggcgtagagtttggcgacaagccaggccacctcacggcgaggcgcccgttgggtttgcgcccgcagcggccaccaaaggcctgcgaaaaggtcaaagccctctaccgattcgtcgagcccttgcccggcatggttgcgcaagagcccgagctcaccgggtttcagtcgagtcagaacttcgacgtactgctccgttggagtcacttgtcccccccttcgtctttgttgtttctctttggccgcatgtccggctttacagcggcaatttcttgtcgcctccggagggaagcggttgtgtagcccggggaaagcgatttggcgacggcggccatcaacggacgatattcctgggccgcctcttcccatgccttaccgccttctgcgatcatctcgtcgatttttccggaaaccgttgcctcggcttggggacgaacagcggcgactgcggagagaatttcaaggtgtcctctgtttcgtgaagtctctcgcggtttggctctgccaacgagcttccagccttccttctgccacgcctggatttcttgcaaactcgcctgaaccttcacgtcgtcgagcgcggccaagaattgaatctcccgctcggctgcttccaggtatttgtcgttctgcactgtcgcaaagctgacgacccacaacttactgttccccttcggcttttccccgcacaggattcccgccacgaccttcgtccacttcccagccgcagcgtcggccgggccaagcgcgctgaaaggcttcacaatctcgtcgccttcgctgatggtgtgcgggtcgttccagattcgtgccagactgccttcgcctgtctttgtgctcccaatacccgcaaagacacattgacgtatcagagcctccctgcgcccgcaggcgatgcagttggactctggtgtctccggagtgtctaaccagacgcgccgcggtacccacgttaatcctatcaataatggaacattgccgtgttgagggaggcttatgtccggattttcccatgtgggcgtgcccaggttcatctccgacgtcttccgccatgagaggcgcagggtttcggaaaggcagtcgcccatcggcacgatgtagatcggcggtttttgattgacgcccgggggcttgccgcgcccggccgacgtagcaaagagcggaaggcgcaacaagcccattgcgcagcatgccggacataagccgtttctgaaatctgtcccatgccggaagtgccagaagtttgtgccggtcggcacttcttgcatcagatagttgacggacagcttcttctcaagtcggttaggcttgcgttggtaaaaccgcttcccatcgccctgaaggttgaaacagtctttgttgtcatcgagtttcttgaaccaatcagagggaaacgaagaaatcgagttcttgtcgtccgggggattccctttgcaccaatagagcaacgcaagcaggaaacgcaggatggccaggcggtccattgggttgctggccgcgatttggcgaatccggcctgcttgcctaagggcctcactaatgcccacgcgaccgctgtgcccatctttccacagaacgggaatccacttttcttcgagcaggttgtactccacggcttcctccttgcctgggcaagaggcgggtggcaggcccgtcgcgccccggggggaccggaccgtccgctgcgtagctaccacaggacaatcatggcgaaggtatacacccgggacgcggcaaaggcaaggcccgaagaccacgacaacggttatcgcgtccgcttagcccacacttcacaggctgcaaggcgcgccgttgactaagcgcagaagctttgatgcctccgcggcgttccgattcggagggaatcttgcgatcgatttcgcgggtggcgcatacgtcccgacgggtttttgtcgggatgtatgcgcccctcggcatgtcgacaccttcatagcctcttgtccatgctcaagatcgaaccatcattccagaaatagaacctcccgccgcagcgcgaccacggccagtcgcccgggtgcttgaccagcactcgtttgacgggattgtcgcgcctgtgattcaatttctcgtctcgcttcttggggctccagatgttcatgtcgtagaacccaccccaacaatatatcgtccctgtggcgcatacatcccgacaaaaagaagctgtgaaaaaatcaagaaaatcgaaaaattaagaaattttcttgtcttagctatacagctatgatatattagcctctgaccgcacttccggcgggga

SEQ ID NO: 674 - DNA, 9232 bp, Artificial Sequence
  Synthetic Oligonucleotide
cgctacgggcagcaaatgcgcgtagcggtcgagccgctccgcccgctccaggacataaccgaggcgtttgaggatcgagcggttgcccatgcggtcggcgcacgaaaccaccttcgccacatcaatctggtcgtggtcgaagtacagcgcccgcgccaccggctcgatcccgccgcagtgctccgggcggtcaaggcagtccgctatcgtcttctccgggtcggacaccagcaccgcatggttgtcgatctccacctcccgccacccgaagaacttgcgcggcgagagccgcacgaagcgacactcctgcgagagcaccgtcaccggatgccgggcgcgggtcgtcgctatgaacgtggtcagcgggatctgctcggtcagcccgtggtagttcagagccgaccagaagccgatgtagtagggttcggcgagcaacgaggccgtgacgaagctgtgcaaggtaaagacatccgcgccgctcacgccgacgtccagcgggacgagcgcgtagaggccccgctttaggggtagcacccagcgcttgcgcgccaggcgatacagcacctgttgcgcgtccccaccgagcaagcgcgccgcgtcagcggtagcgaagatcggcttgcgctcctgcgccagagcccgcaccaggaaagcctcgcggtcgccgagtgataggttataattctgtgcggtatatctcatgtcagccaactttcagcacaagcataatacccggagatgtcatctgtcaagtgcagtaactggacaagcattgagaccgggtagcgcccgctacctcagtcaccgctggcaccattacccggcatttccgccacctgttggcgcaagtcgtcggcgtccatgtgcgtgtagcgctgggtggtggtgacgctggagtggcccaggagttcctggacggcgcggaggttgggccgcgcgcgcagggcatgggtggcgaaggtgtggcgtagcagatgcggccccgagcggtcggtgatgccgatgcgccgcagatagcggttgaccagcagggccaccccccgcaccgagaagcgctcgccgctgcggttgaggaacagagcgggattgtcgtcctgacgttgggcgaggtaatcttccagcgtgcggcgggcatgggcgttgatgggcacccagcgcaggcgccgccccttgcccactagttgcacctggccccagccatccgcgggcaattggacatccgcgcggttgagcgcacacagctctccaacccgcaggccggtgttgtagaggaaggccagcagcgccaggtcgcggacgccggtgggcgtctccaggcacggctcggccagcaaccgatctacctcttccaccgtcaggtgcttgggcgcgagggttggccccacgcggatggagcgcaggctcatggcggggctggcgtccaccacgcggttgtccaggaggaagttgaagaacgagcgggtggcggcgatggcgtggttgatggtggagggcgcgcgcccggcctgttgttggtctcggaagaactcgcgcaagtcggcggggtgaacctggtcgaggcgcgccggcagcgccgccaggaggggctccagatcccgccggtacgacttcactgaatgcggcgagcgcccctccagcgccagcgcatccaggaactcgctcagcagagaccgagtctggcgcttgccccctcccttgcccctacctgccttccctgatcctcccttggtcatcctggcctcctcgcacgcgagctgaacatcgcataagtgattagggcggatgttcacgtttccgtcaaggccaaggggagcggatatgactcgtctgggcgacgaagtggcgcacagacgcgccgacagcgccgcgaagggccggaaggcgaggcatagccgcaggccggggccgaaagccccacacaggcgcccacggcgcgccgttcgcggcctgtcacgcagctagctgaaggatacagcgcaacgatggcgaaatcgcacttctgctgctcatttcgccgagatgcgccggagttgacgcaggcaaagtgccggaggtcaactgtggtcacaagtccggttctgctcttgttctgggggaagaccggccgtacttctcgcagctaccacccattgctgttccacatgctcgatgttgccgccgtggcgggtctcgtttgggaccattgcctgactccgcgacttcgaaggagactcgaactctcgctcggagctgacgcgcgcactcaagccgtgtttctgtccggggcgcacgacatcggcaaggccgaccagcgattcctcgtaatgcccccgagcagacggcaaggcaccgcgccgcggccgctacctgacccgttagcagccaaagatcggcggaggcccttgacaagatccccacccgcacccacctgcttgtaatggctgcgtcggcgtgcgcgcatgacgcaagacaaagtcggccaattggatggagcaagtgcatggactataaccttatcgtgcagccgtggattcccgttctctggagcgatggcgagtacaagcgcgtgggcatcagggatgcattagtgaaggcaagttgtatccgccagatcgcggcgagcaatcccatggatcgcgtggcaattctgcgtttcctgctggcgctgctgtattggtgcaagggcaacccgccagacaaagggagcgccatttcaggcacgccgttccctccggagtggttcgccaaactcgacgacaacagggactgcttcaaccttctgggcgagggaaagcgattctatcaggatcgtgacgcacggagaagccgggcagctacggatctggtccaggagattcccacgggcaacaacttctggcatttccggcactcgatagaccaggaggacggactctgcctcgcctgctgcgccatgggactgttgaggttgccgctgttttccgtaagtggcctgcctgatttgaagtccgggatcaatggcactccgccggtgtatgtcgtgccctggggcaggtcgctgctacagacgctgcaggcaaactgggtgacatacaccaatcttggcgagcccgcatgggttcaccccgaggttcgtctaactcccgctcaggaagtgcccttgctcaccggtttgacgctgctgtccagacgggtatggctgcacgatctcggacagccaggcccatgcgtgggctgcggagcaaagacagtgctcatacggacgtgcgagtttcagtcggccggggcacagaagaacgatcgatggaacgatcctcatgtcgtctattggggcgagacgccacgaaaggcattcaaggcagcggacctgacggcagcgggcaagttcagaatggaccgcccgtggccctatctgcttgctggcgttgggcaagagggcaagttcggactcatggacaagccgatatcgctgctaatcgtcgggtttgccactgaccaagcaaagaacattgacgtgtgggaacgcatccttgccgcgccatcaacagggtcaacccaagaaacggggacatcctcgatgcagcaatggcagagggagggtggacggctggagaggcggatagcgcggatagtgaggtctcaagaccagggcgcggctgccatcgctgccgcccgcccccatgtcgaaggcagagtctccgcgaaggcgggcgagttgattgtcggcacggacgaagcctggaatcgggcggcggcggaataccgcccaatgatggaggccatcgccagatctctttccccaggtttcactacggcggcggtgcaacggcgaagggagatcgccgacgtgttgccggacatgtggcccaggacagaatcggcgaagaaaccaggccgtaagaaaggaggcgagaggtgacggcaacggagcggtacattgaggccctgacatgtctgaagtctggcgaccttggattgctgcgcacgcacgcggggcagggactcgacaagacggtggacgggttcgacctgttcgcgggtctctggtggccgttgagaaaggatagtccgcgtgctccccgccgcgaggtcgcctggctgactgcgaagctctacgccttccgtccgattccgcagtcgcccgatgacacgcttgcccgccagctacgtcggtgccagcccaccaatgacctagcgagaaagcgtttcccgcaaaggttcgacaggatgctcgtcctgcccctcgacaagatcgagcctgcgctacgatgggcgcttggcttaatcgcgtcaacaggtcgagaactcgactgggtaagattgacggacgatctctccatctgggaacgcgaatccatgcgcaccaggtgggcctatgagttcatcgggcacaacgaaaggggacagtcatgctgatcgagattcacgctattcagaaccacagcccgtcgaatctgaacagagacgacctgggcgcgccaaagacctgcttctttggcggcattctgcgctcccgcatctccagccagtgcctcaagcgaagcatccgcatgagcgagcagttcaaggcattgctcggcggcgtccgcactcggcagttggcgaagctgattgcggcggaagtcaccggcaagcccgacgcgcagaagcgtgcggagaagatcctccaggcttgcggattcgagcccaagacgaagaagcagaacgccgaggaagatgatctcggcgattcagacaagagcaagatgcttgtgtacacaacacgccaagcgattcaggagatggcaaagcttcttcagggcagcaaagcgaagaccgatgagcacctagcgcttgagttcgcgagactcatcggcaagcgagtggccgtgccggatatagcgctgtcagggcgtatgctggagcccgacaaggcctccaaggatgtgtggaagggactcgacaccacggtggacgccgcgctgcaagtggcgcacgcgatctcgacgcacgaggcccgcccggaagtggactactatgtggccgcagacgacattcccggcgacgatgcgggagccggctatctggacgaggcaatgttcgcctccgcctgcttctacaagtatttctcgatcaactggggaacgttggtcgagaacctaaagggctatggcgagaaccacgaagagctggccgcccacacggtcggcgcgttccttcgcggtgcggcccttgcgaatcccacgggcaagcagaacagctgcgccgcgcacaatccccccgacggaatgctgattgagatcaagcacactccgatcagctacgccaatgccttcgcgagccccgtgccgagcaagggcgagcgggacatggtctcgcagagcgtcgcgcaactggcgcaatacgtttatgatctggacatcggatacggcaagccgcagaaccggttctggttctcgcccaatctgcggttccggttgagtgttgtcgaggataagcgggagatcgagcttgccgataacaacatcaggtcgctcgacgagctggtccccgccgtcgtcgccgccatcggccatgattggaaagcggtgcagacggtcgttgcgaactcagaggccgtatcatgagttacgacaccctcttcctgcgcctcgaaggtccgtttcaggcgtggggcgatcaggagtcaaagctcgtcatccggcggacggccgaggcgccgacaagatcgggcgtgattgggatgctctgcgcggcattaggcgtttcccgagccaaggccgccgaggagtcgctgccaaggcttggggctttgcgcatgggcgtccgcctcgaccgccccggcacgcggtggtgggactatcacaccgtcggcgccggaatgcagatgcggattgcggaaggcgagggaaagacaaagcccggcgcaatgctgacccgccgagagtacctgtgcgacgcgtcgtttctcgtcgccctgcgcggcgagccgacgctgattgctgaactcgaaacggcgatgggaaatccacaatggacgctctacctcgggaggaaatgctgccccccgtctcgcccactgctggaacatccggcgggcgcgtttccagacttgctctcggcactcacgtcggtgccgtggcggcggcggctcagagaagactgtccaccagaaaccgtggattgcctactcgactgggggccgacgtccgaacagcccgaagcgcccgacgatgcgcttgtctggtacgacgtgccgctcacctttgagccgccggcgcacggcccccgctttgtcatccgacggcaattgcgcgtgggcgcggatggcgaggtccagatcgccgaaaagcccgcgcagagtcctgctccggctccgccgcgcccacgcgcggactaccggaacaccgagtaccgcaatgcccgcgcagcccgcctacacgcggattggggcctttgtgtcttctgcaaagctccagccgcgacggtgcagcatgtcacctatcgccgcgccggcggaggcgagaccggggacgacctgcgctcgctctgccgcctctgccacgacgcggtgacgatgatcgagtacggcctgggcatgggtctggaccgcatcaacccgtgcgaagctcgttggcgcgggcaaatcatcgcgaagcgcgaggagatcatccgctttcgctcccttgagactcgccgtcggcgcctcagcgctgaggaggtggaatagccatgtacctctcttgcctcttgattgacgttggggacaaccctgaccgcccacgccccgggcggctctggctgcgcaacatctaccacgtccaccagcgcctgtgcatggcgtttccgtcggcgcccagaagggccgatgatgcggacttcctagagcctttcgacccgcagcactttggggccggacaggtccacgtcgtccggggatcacacgcgggcttcctgtttcgcattgaccctaagcccggcggtcgggccgtgatcgtcgtgcagtccgcggtcaggccggattgggagtacgccttccgcaacgccggttatcttctggcttgcgcccctcaggcaaagcagttccacccgagcttccaagtcaaccagcgcttgcggtttcgtctcgttgccaatcccaccaagaagatcggcacgctctccaaggatgaacgacaagccaagaaagagggccgcaatgggtcacgggttccggtgcggcccgagcaattgcacgaatggcttgctcggcgagctgcgctcgccgggttcctcgtagagcaggatgccgttagcattcaaccgggctacgtctatgtgaagaagccgaatggagacgggtcacatgatgacgggaagaagccgaacagcggccgccgtcgctcggtccgctatgaagggacacttacggtgaccgacccggcgaccttcaagaacgcccttgtccgcggcatcggtcccgccaaggccttcggcttcggcctgctatccgtggcgccggtgtcgtagaacaccgatccagcgcctgcaccttgacaactgaatacaggctacatgccccgcaagcagccgggaagtgcggaacaatacagacaggcgcaccatgaacgacgggagggggccgtggacgacctgcatcgcttgcccaagttccgagactgcctgtcttacctgtacctggagcatggccgcatagaccagcacgagaagaccatcgccttccatgacgcccaagggaaggtgccggtgccgattgcctcgctcgccgtgctcatgctcggcccgggcaccgccgtcacccatgccgccatccgcgcgctcgcggacaacaactgcctcgtcgtgtggtgcggcgaggagaacgtccgcttctacgcctccggcatgggtggcacccgcagctccgcggccctgctccatcaggcacggctcgcaaccgacgacaagctgcgtctccaggtcgtcgcgcgcatgtaccgaatgcgtttccaagaggacctgccgcccgataccaccatcgagcagcttcgcggcatcgagggttcgcgtgtcagggccgcctacgcccgcctgagccgcgaaaccagcatcgcctggtcaggccgcaactatgaccgcagcaactggggggcgggcgacaccgtcaatcgcgcactgtcggcggccaactcgtgtctctacgggctgtgccacgccgcgatcctctccgtcggcctcagcccggcgctcggcttcattcacaccggcaagcaactgtccttcgtttacgacatcgccgacctctacaaggtcgccttcaccattccggtggccttccaaaccaccgccgcatccgaagccgacatcgagcggcgagtgcggcttgcctgtcgcgatgccttccgcgaggggcggctgctccagcatattgtgcccgacatccgtgaggcccttggcgcaacggatgaaggcgatgcgctggccgacatctgggcgcaggacccggccatgccggccgagtggtgggcgccgcctcatggaaccgtcatcacgcgtccgcccgccgctgatgacacctcacaggagacctcaacatggtcgtcttgattgtcgagaactcgccgccgagcctgcgcggcgagatcacgcggtggatgatcgagccccgcgcaggggtcttcgtcggcaccatgtccgcgatggtgcgagacaagctttgggagcgtgtcgcccgctcaggcatagacggcggcgcaaccatgcttcacagcgccaataccgagcaggggttcgccgtgcgcagcttcggtaacacgtcgcgccagatcgttgaactcgacgggctgatcctcgtgcagcgcgatgacccgccgagcgccaagaagcgttgaaacgcatccggcggcgaacggctgtttctgttgtccccacgcacgtgggggtgaaccgcaggtgatcgtgcctttgtctccgctggcactgttgtccccacgcacgtgggggtgaaccgctcgaggagttactgcgcatcgcagagatcacgttgtccccacgcacgtgggggtgaaccgaccaggcgtccgccgccctgcgccaggtgcaagttgtccccacgcacgtgggggtgaaccggttggccggatggtgagcggatcgtagccggtgttgtccccacgcacgtgggggtgaaccgacatcggctaccaccgcgtgatcttccgcgacgttgtccccacgcacgtgggggtgaaccgtaatccgtcagacgcgagaactggcacggcccgttgtccccccgcacggtggggtgaaccgg

SEQ ID NO: 675 - DNA, 9151 bp, Artificial Sequence
  Synthetic Oligonucleotide
tctttcaccaccgtcaccaccgcgtcgtgatccagcagttcgcgaatcacctgcacctgcggcaggatcaggcgtcccttgggcgcggcgaggtcgatgggagtcaccagcagcaccctgtccccggccttcaccaagtcacccgccagggggcgctcctccagcagatgggcgggcgccagcttgatcagcagttccttggcggcatcgatgttttcccccttgagggcggagacggagacccagggcagtccccgttcctcgcaccaggcgatattggcgggggcaggctcgcgcaaatccctgtggttaaagaccattaacagcggtatcttcatctcgcggatgcgtttcagggaggacagctcgctctccgcgaaggggcggccatcgttcacaaacacggctatgtccgtgcggtaaagtatcttataggtggcgagtacccgtttttcgcccagttcgccgctgtcgtccagtccagcggtgtcaaagaaggtcaccgggcccaggggcagaagttcatagcgtttgtccaccgggtctgtggtggtgcccggggtgctggaaacgatggctatctcctgtcctgccagggcgttgatcaaggacgattttccagcgttgcggttacccagcagggtgatgtttacgcgttctccgcggggtgtgctcatctatcttctcccaaaaagtcttgcggcttgcggccgctaatagcttttattatcagttctttcatgtttctttccttgtcggactggataccagcccatgtaaaaataatatatgtgaaaagcgcgaatctgtcaagcaaagagaattctggcagacaggggcctgtgtttttgatatatccacaaattacacaaattaacacggattaaaagaacagaataaggacaagtgtccagcctaaaaacaacaaccagaccctgaaacaaaccgccaccaagccctaaagccgtgtcatcccgggctgtcggggtcaccgccaaagcgcgaagcggtttggtggggtggcttgacccgggatccagtcttttaaaaacaaccagcaagccccgaaacaaagcacaacagactaaaaaccgtgtcatcccgggctgtcggggtccccgccaaagcgcgaagcggtttggtggggtggcttgacccgggatccagtcttttagaaacaaacgcgtaaggttttaaaaaagcaggcacctttccacctcaaaacacctttccacaaattctccccccatatatataggtgctacgaccccttcatgccaggcgggaagcggatcccagggcaagtatatatatacttgcccgtaattgcgcggccatgggctggctgccctccctttcccctcgcgcgcgggtggctctcatttgcatccagcgttttggcgtgagtcttccttaggtcatccttataatttataaggttgacctaaggatgatggcatcaaatccagtagcagcaaaggagggcggtatgaaggattatgcggaaggttgtggtatttttgtggaaaggtggaaaggtgcccccgaaacaagtccaccaagttatattttgtgtcatcacgggaagtcggggccccctctggggtggcttacccgtgatccagtctttttaaaagaaacatccacaaattacacaaattaacacgaattaaaagaacattaaagagtcaacacacccgactccggaacaaaaccctccagactaaaaaccgtgtcatcacagcctgcgagccgtgatccagtgcccaggtgtggcaaagtccgtttgccacagagaccggaggtctcttccaaacaggcaactccgttgcctctgccgaacggacttcggcaacccttatattacaccaatccgtgtcaatctgcgccctttatccgcgtttatctgcgtgaaccgtggaacccgggatccagtcttttggaatgtttgaacttcgctgaaaacatttttcgctaccaggaatgaaaactggacaacaaacgcagcttgggatatctgacactaagagtgtaattcacacgatcaataagaacatagcgtgctgtgcatacaaaacatattaccgacggacttctgttctgaaatatggacgttttgaacttggtaaacagtccgtatatggactaccagctgggacttgccattaggcatatgcccgaatgtaaagctatattcttatataacgcattgtagacagcacaggttgttctctgctctttccatattacactagtggtcatcatttcaccagtaggggtttttttacgcttttttcccgggagttttcatgtaaagcaccctactggacaaagagatgggagccggaaaacacagcctgaactgggacggcaccgactccaacggcgcccaactggcaagcggagtctatatctaccgcctcagcaccggaaagacgagcgccagccgcaaaatgatattgctgaagtgacggacagccgcccttccaagtccgataattaacttgaaccgccgcgcattacacacggcggttctttccaacaagccaagtatcagcagcgggaaaactgcgctgaaaaagccgctggtggggctccgtaaaatgggagtggaagccgccgcatggaacaccttgaaagtaacaagataccgccccaaattgatctttcctaacccaaaatccgcaaagcaaatttcttgacaatgatctttggcttaaatataaggttcctatcgaacaaaaggagcatgttatgtacaatcttctttgtgataattgggtaaacgtggtctatctttcgggcaaaccagatagaatatctttagttcaaactcttgaagacgcacactgtctgcaactggcatacagcaatcctatggaccggttcgctgttttcagattcctgcttgctcttggctactggtgtttcgccaacaccaacggggagcctgaacctgataagccgcttccgacctcctggatatcctggctggaagaaaacaaggggtatttcgagctttttggggatggacagagatttttccaagccgatcccagttccaggatcagagccattaccgaccttattcatgagataccaacagctcacaacctatgccatttcaatcatgtcaccgactatatcgatgggctctgcgaagcttgctgcatcaagggactgctgagattacctgtctttaccactgtcggtggcagagggataggcgcgggaatcaacaacactcctccattttacctgctctggcatgcaaatgacctcgctggcatgctggttcaaaattggcaaccctgggataatatggggattccggcatggttgggttcttttcaaaaagaaagcaggaaagtgggcttacttgccggaatgacctggctgccgcgcaaggtgcatctgcatgatcctgtctcaggtcaggcagcatgttgttcctgcggcttaccctccaaagctctcgtctattcctgcagcataaaacctgaaccagtgccggaaggccttaaatggaaagaccctcatggtgtttacaccgatcagggaaaaagtctccagtccaaaatcaaactgatgtccaatgatagatacactttcgcggaccgggattggtatagcccgttgttcagctatttgcacgcggaaggaaactccagacaaggaaaactatggttggttggatttgccagcgataaagcaaaaagcatagacatctgggacaagatcatcgagcttgagggaactgatacaaatgatgagctactggctcaattggcaaacagggctactgcccttaatgccatgcgcaagaagcctctcagaggtgatttcaaaaagtcagtgggcactccccagattgctgacattatcccccacgccgaaagcagaattgccatcaatgcgggtaaaatgactgagaacaggggctattcctggcaggatgccgatactgaatacggagaactgctcaccaaggttgcatgctctttggagccggctcaaacagtggacgccaggctcaagagaggtaaattcatttcccgcaagccctggccagttataccagaatccaaaacaaaacccgcagaggaggaccagaatgaatagaggaaccgttgacttcattgcaagcctggagaacctcaaagaaggcgatttgggcattcttagaaaactcaggggagcccggcttgatgaaaagcttcccggatttgacctgttttccgccctatggtggcctttgcggcaaaagaatcaacgcgctcccaagcgtgaagtggcttggttgatcgccaaactttttgctgaattccgctttgaacagcgcgagggagccacattgcccattcttatgggaggcatctgccggaagttggaacccaaaaaggaattaccccgggtattggcacgctttgatcaactcgcatcgcttgacattatgcagatggaagagccgctgtcggtcatcatgggtattttgcgcaagcaccagcaggtctgcctggactgggtagggcttactgatgttctgtcattttgggagcaggaacctgtcaaaagagaatggtcggattcatttattaaagcatacaagatcaacaaggaggattcagatgttgattgaaattcatatgattcagaatcacagcccggcaaatcttaaccgggacgacttgggcgcccccaagacctgttatttcggtggagtattacgttctcgcatctccagccagtgcatcaagcgcagcatccgttttgccccggaattcgcggaccttagaggaggtatccgaacaaggcgtctggcagagaaactcgaggaaatgctggaaaacaaagataagaagctggttgccaagtttcttgaagcctgcggaatcaaaaccaaatcttccaagaaagctgcaaaaaagtccgaaaagatacccgcggaagccgatgaagatcaggatgagcagcaggcggctgatacatctgacatgctggtttttaccacttatgatgccctgcgccaaatggcaaagctgctttccgactccaaactaagtgaaagcgaaaaactgctgcagttcaaagatctgctcacaaactgcgtccattctccggatatagcactttgcggcaggatgctggagaccaaagagcttaaaaacactggcgttgaaggcgccctacaggttgcacatgcgatctccacccacattgccagacctgagatagactattttgtggcggccgatgatgttcccggtgaagacgccggagcgggtcatattggcgaatccatgtttgcctcagcctgtttctacaaatacttctccattgattgggaacagttggtcaagaacctgaaaggggacacgaatctggcagcccacaccgtgggtgcctttctcctcgccgcagccaaaaccaaccccagtggcaaacagaacagcttcgccgctcataactatcccgatggcatccttgttgagttcaagaattcccctattagctacgccaacgcattcgtcaggccagtttccgtggtcaaggaatcggacctggtggaacaaagcatcggccagctttccaactacgtgaacgacatcaggcttggctattatgatgagcaatccccagttatcagcttctggttttctccaaacaatcgctattcccttggcaatgagcattccaaactggcttccagaaacattggcaacctcaatgagcttgtaggcgctgtgttggattatattggcggcttcaagtgggaagaagttcagaaaagcaaggcttatgttggcggctgacatgagtgcgccacccaacaccttattcttgcgcttggagggggctttgcagtcttggggcagcaacgaggctaagtttgctttgcgcaggactaccgacgctcccacaaaatcaggtgtcctggggctgctttgcgcggccatgggaattgggcgcgcggaggctgctgattcatggctcccaaaactcgccaacctgcgcatgggcgtgcggatagaccgccccggcatacgctggtgggacttccatactgttggagcgggacaaagaatgcgcatggcagagctgaaggcacccaaaaaaccttccatggttggagctgccctggctgataccctgacaccaagcaaagtaaaaaccagggcagagaccttgctctcacgccgcgaatatcttgccgacgccagttttctggtcgccttgcagggtgagccggaacttgtggaaaagctctccgccgctctggccaagccggtctgggcaatttatctggggcgcaaatcctgtcccccttcacgtcccgtgggcgagcatgctccgggcttttataacactttggaggaggcgctgtccgcggttcccctgcaaaagcgctggcacaatgaacccctgccgcaaatactgccttgcgtcatggactggatccccagccaggacggagaacatgcgcctgatgacgcggagattcattacgatctgccggtttcttttcagccgccccgccatttgccgcgcttcgtgatcaggcgtgagctggttgtgggagaggatgtgcaagtgagcagggaaaccggaaccagcgtttggaggcccaaaggaacccgggcggattataacaattccgagtataagaaggtcagggcggagcggcttgtgatggaccatgccgcgtgcatggtatgcaaagctcccgccacgactgttcaacacgtgaattaccgcagggcgggaggcaaggaaataccggaagacctgcgggcgctgtgccgcctctgccacgacgcctgcaccatgctggaatacggttccggcatgaccaccgaccgcatcgacccctgcgaccccatatggcgggagcgaatactggcaaagcgcaaagatatagtcgagttccgttcgcgcgggcagcgtttccgcaaaatgaagccagaggaggaaaacggatgatctacttgtccaagctattgatcgatactggaggcaatccagaccgtccccgccccggcagaaagtggctggacaatatctataacgtccaccgccgcctttccatggcgttcccttcaggtttgcgccgggagcaggatccgcatttcctgaagcccttttcgccaaacgacttccaaaaaactcccttccttttccgggtcgataacaacatcgacggaaacgataaaagggcgattattatcgtccagtccgttcttgagccggattgggattattgcttccaaaacgcgcttgatttcctggcagcgccaccggaaacaaaggagtataatccagagtttcaagcgggacaactgctccggttcaggctgcgggtaaacgccagcgtacgccgtcatattcctgagaaggtgcaacaggacggtcaaaccatagaaactggcaacatcctgcacaaaagggtttctctcacctgggatccctcttccaccccggatcaggcccttgccgactggctggctgccaaaagcccaaagctgggcttcacccttcagcgctgtgagcttcttcaactgggttgggtttatggctccaagcctgaacctaaaaatgtcaaagcaaaggaacagggacagggctactggcgtgaacacacatacaatcctctgcgcttccgttcggctctactggagggaattctcaaagtggatgacccgaaactgttcctggaaacgcttagaagcggcattggaaaagcgaaaagcttcggctttggcctgctgtccgttctgccaatcaggaatgatgaataaagacctgcactctatcccccggatcagagatcggcttagctatctctatgtggagcatgccaaaattgatcagaacgggcaagccatcgccattcacgatgccctgggagaaaccccggttccttgtgccggcttggctatgctgatgctgggaccgggcataaccatcacccatgcggcaatactttcactggctgcctgtggctgtctggtagcctgggtgggggaacatggcgtcaggttctatgccgcaggcacaggtacaacccgtagcgccgtcaatcttatgaaacaggcaaagtactgggcagacccggttttgcatttacgggttgtgcgctccatgtatcagttgaggttccaggatgagctttctcctgatttaactttgaaccagatcaggggcaaggaaggtgcccgggtgcgcgatacatatttccaactctcccaaaagtatggtgtgcccatgcagggcagaaactatcaaagagacaactggaataaagcggatcccataaaccgggcattatctgtggcaaactcctgcctctacggcatatcgcacgctgccattgttgctgcaggattctctcccggattgggctttgtccacactggcaagcaactgtcatttgtctatgatatcgcggatctatacaaaatggaaatggctgctcccgccgcattccgggcgaccgctgaagggatcggcgaactcgaccgcagagtcaggcttgcctgccgtgatgaattccacaggcagaatctactcaaacgcattgtcgcggatattagttctctcttcggtgatattatgccagaggatagcccggatgactgttttgccgaagaaccagccttgcctggaggactctggtctccagatggagaagtttccccaggcggcatatcttacgggcaggatgatctgccaaaggaagattgatggtggttttagtattggaaaatgtgccaagctccctgaggggtaagatcacacgttggctgctggaagtaaaagccggggtgtttgtgggtaaagtctcagcaatggttagagataaactgtgggataaggttagaagcaattgcagcggtggaacttgcctgatgatctggagtagtcagaccgagcaagggtttgatatcgaattctggggtgccgcatcaagagtcgttacggaatgggagggtatcaaacttatgaccaagcatccttaaactaaggcttgaaggagttcaatgacctcttagacctctattgatcaagtgtattccccatgcatgtgggggtgaaccgccacagatttacactcaggtaattgaaggcgtgtattccccatgcatgtgggggt

SEQ ID NO: 676 - DNA, 9010 bp, Artificial Sequence
  Synthetic Oligonucleotide
ccttccatcccacgaatctgctggagagtcaacctcggatcgaacttttcggagaatcgcaactggtataggcggcgaacgacccgcatgcgctggtcctcgtcggcccacatgcgagcctgatgcaggaaattggcggaactgcgcgtctcgcccatgccgacggcgtagagccggacgccctcctcgccgcaccacgcgacgaggcacccgtgctccgcgaggacggagatggcggcgtgggtgatcgacacccccggccccagcatgaggaaggcgaggctcgcgcaggggacgggcgccttgccggattcgtcgtggatggcgatggcgcgcgcctcctggtctacgcggcaatgctcgacgtagagataactccagccgtcgctgaacttcggcaggatgtgcaggtccttgatcttcatggcccctcctggacgtgcttcgagtgcgggatgagcggcgccgtggaaaggaggccaaagccgaaagccttgccgggcccgacgccccggacgagggcttcgcggaagcggtcggcgtcgatcacggtgaggacgccttcgtagcgggcggagcggaggcgctgcccctttccatccggcgacttatcgcggtcggcgtcggtcacggtgagggcgccttcgtagcgggcggagcggaggcgctgcccctttctctccggcggcttgttcatgtaaacgtagcccggctgcaccgaggaagcgccttcgtcgatggaaaaccccatggcggcggagcgccggacgagccagccgaggagttcgccgggtgggaccggaacgcgcctgccgtgccgaccggcgcggcccttaagttcgtcggcggagagctcctgacgctcctccttgctgagggtcccgatcttcttcgtcggattcgccacgaggcggaagcggaggcgcgcccccgccggggggcgggggtcgaagggtttcgcgtcgggaggggccgcgaggagatggctggcgttgcggaaggcgtagtcccagttcggctcgatggcggattgcacgaggatggcggcgcggcctccggggagggggtcgatgcggaagaggaagcccgaatccgccgcgcggggcggattctcatgacctgcgccgaagtcgtccggccggtagggcgcgaggaaatcggggtcgtcggcggatcgcgccgccgaggggaacgccatgcaaagccgctggtgcacgcggtagacattgcgcagccacaggcgccctgggcgggggcggtccgggttttcgccggtgtcgatcaggagacaggaaagatgcatggctactccacctcctcgggggagaggcgccgccgtcgcgtctcgagggagcggaatttgacgatctccgcccgcttctcgatgatgaggtcgcgccagcgcgggtcttccggattgatgcggtccatgcccatgccttcgccgtattcgatcatggtgacggcgtcgtggcagaggcggcagagggagcgcaggtcctccatggcttcgtttcccccggcgcggcgataggtgatgtgctgcacggtggtcgcgggggccttgcagaagacgcagaggttgtggtcccggtcgagccgctcgcctcggcggcgcttgtattcggagtttttgtagttggcgcgcgggcgtgacggggaccgaggggcgctttgggcgggctcatccgcgatagggaccgcgctgcccggccccacactcagggactcccggatcacgaaacgggggctgtgtgagggcggggcgaaactgagggggacatcgaaccagacaggtgcgtcgtccggggcagtgggatgatcgggagagggcgcccagtcgtagatgcaggcaacagcttccggcggccggtccttcttcattcgcctgcgccaggggatggaagcgagcgcggggaggatgtcggggaaagcacccggcgggtgctcggtaatggggcgcgacggggggcaggacttcctgccgaggtaaagcggccagaatggggcgtggagcacggcgtcaagctcggcgacgagccgagaatcgccttggagggcgacgagaaaagaggcatcgcagaggtactcgcgccgggagagcatcgcgccgagcttgacgccgccttcggccttgcgcatcatcattttggcgccaaccgtgtggtaatcccaccagcggataccgggcgcatcgatgcgcacgcccatgcggagctccgagagcctggggaggcacttggcgggggtgtcctcgcgcgtgacgccgagcgccgcgcagagcatcccgatgacgcctgatttggttggggcttccgccgtccgccggacgacgaacttggattggtggtccccccatgcctgcatagcgccctcaaggcggaggaaaagggtgttttcattcatcggagctgctccagaggattttcggacattttcaccttttggacctcgtcccagtcgtggcccatggcgccgacaacggcccgaaccagctcgtcgagcgacttgcagttctgattggcgaggggttcgcctttcggccccgcgagcggatagcgcaggttaggcgagaaccagaagcgacgctccggggggccgaagcctgcatcaaggtcggaggcatactgcccgagctgcgcgatactctgggtgatgacgtcgcgattgcccgcttggactggggcggcaaaggcgtttgcgtagctgatgggggtattcgcggtgcgtatttcgacgagcatcccgtcgggcgggttgtgggccgcgaagctgttctgcttgccggtcgggttggagagcgccgccccgcaaaggaacgcccccacagtgtgcgcggcgagcttttcaacatcgtcgccgaagccctcgaggtttttgctcagctgctcccggtggatggagaaatacttgtagaagcaggcagacgcgaaaagcgcctcgtcgacgtagcccgctcccgcgtcttcgccggggatgtcgtcggcggccacgtagtagtccacctcggggcgggcttcgtgggtcgagatagcgtgcgcggcctggagcgccgcttcgactgtggcatcatactttttccagatttcggccccacttttatcgggttccagcatgcgtcccgagagcgccatatcgggcgcgaccgttttttcgactatgcgctgtgcaaactgcgctgcaagggccttggggtcgctaggcgttccgtttttcagaagagcgatcatttcgtcaatggcttggagagatacgtaaacgagcatcttactgtcgccggagcccgccgcgtcgtcatcggcggttttccctttcttgggcaggaagccgcactcatggaggactttttcggcttttttctccagggcggggtcgttggccctgtcggcgatcaacttcgcaagacggcgggtgcgaacgcccccgagcaactccctgaaggcgtctcccatgcggatgctgcgcttgaggcactggctggatatgcgggagcgtaggactcctccgaaatagcacgtcttaggggcgccaaggtcgtcacggttgaggttggcggggctgtggttctggatagtgtggatttcgatcagcatggcggttctccttttacttgttacttcccagggttgagaaaaagttcggcccacttgatgcgcttggattcgcgctcccaaagggagaggtcgtcggttagactcacccagtcgagggtggggacgctgtcggaggcggtggcggatgcgacgcagttgatggcccattgcagggcgggctcgagtgcggagaaggggagcaggagtaggcggtcgaaccgctcactgaaacgctccctgtcggggttctcgtatgggcgcagccggccaaggctacgggctagatgcgccctgcgggactgcgggaggggatgaaaggcatagagtttggcgatgagccacgccgtctcgcggcgcggcgcatggtcggtcttggcgcggaggggccaccagaggcccgcgaagaggtcgaaagcgtcgatggactcgtccaggccccgcccggcgtgcgcacggagcatcccgagatctccgggcttgaggcgggcaagggtttctatatactcggcggttgcgctcactttgttcctttcctgtctgtgcgttttggacgcttgccgggggagggagccttttctttcatgttcgggcaaaggtttgcaatctggttgcgtttctcaatggccgccgtggtgaatccggggaaagcggacctcgcgacggcttccatcatggggcggtactccgcgcccgcccgctgccatgcatcggggactcccgacgtcagcttgtccgcaagggaggagacgcgtgtttcgacgtgggggcggacggattcgaccatggcagcgacgtccgaatgctttttcccgcccgcggccttcctgggaaggctttttccttccttgcgccacttgtcgatttcctgcaggagcctgtcggcgtcgtccggtgggggagtggagggatagaaacgctctacagcttcgagatatttgtcgttttggacggtcgcaaatccgacgacccatagtttgcgcgcgggggaggctttgtgatccgcgagaagtccggccatgacccgcgcccactggtccgccgcggcgttgggagagcccagggcgtctccaggcttcaggatttcgtcgggggctccgatcacgtgaggatcgcgccaagccgcatccgtcttggtgcttccaactccctcgtaggcgatttttcgcacgaggagggcctttttcccgcatgcgatgcagggggcttccggcgcttcggggtcactcagccacacccgcctggggacccatgtgagtcccgtgagtaggggaatttcgccacttgggggaaggcgtaagtcggaggcatcccatgatggcgtcccaacggcggatgcttgccgccaggatagccgcagcgtctcggccagtgatcgtccgaaggagatgacgtaatagggcggcttcgcattgacgccgggagatttgccccgccccgccgacgtcgcaaacgcaggcagtcgcacgaggccgagtgcgcaacaggcgaggcagagaccatcccggttgtcggctgcgtgcctgaaatgccaaaagttcgtgccggtgggagtttcctggttgaggtagttcgcagtgctatcaggatttttcccgcactgatagaagcgcttgccttcaccgaggaggttgaagcaatctttattggcgctgagcctggagaaccactcgggagggagtggagcggtgaggttggcctcggcgccgtcgggcgggctgcccttgcaccagtagagcagtgcgaggaggagccgcaggatggcgactccgtccatgggattgctcgcggcgatgcatcggatgcgtccggctccagtgagggcttcgaggatgccgacgcgccggaattctccgtcgttcatcaggacgggaatccatctttcttcgaggaggttgtaattcattacggctccaagttgttgttatggttgaatcaatgaaactgctctgccgattcggggtggcaggcgctgcgaaacgctgcgggggatgtgcgacgctacgacagcctatcgtaaatcctatggcaggatcgcgaccgcaaccttccctggcattggtgaaaaacatacggaaacttacgctggtttgtgatgatgcgaatagaaaatatcgggttaagagaagggcgtcaaatatattgtgtatgctattggatggcatggcggagcagcaccccgctgtgaaagcgcaccacaggaggaagaggcactgctcaaccttgcccggaattgctctgtgggacggttttcaaacgttctaatgttttcccttcctactgggtgtcattagcctttcagacggtagatatgatggcttataatattctgatcgctttgaagagcgccatcgccagaacatgacgcagaagcatcaattgacggagccaatgaatgtgccttttgatggcgcgtcccatcgtagggggctaaatcatctccacatggctggcagggatgcaaaagtacgagcacagtgcaattcatttgtatcataataactcatagtcagatattccatttatgattatcgtatatgaagcgctaattccgcactctgtggcttgatcgggaatatttgcttaattcattgattttaaatgagtttattgagttgaggcatacactaaataaattattgctatagtcctctagacgaccatacattttggagtataattaaacatgagcggggagctgaagggtccagccaggaggggggaatgctgctgcctctgaaaaagctcggccttcttgacatttcggacctgttgctctcgccgcagccaccgccgccgcattatgggtttccggggaagctccatctactctggaagcggcggcatccgctctcggaaaagttgagggccatcaagtcgcatccttaaagatgatcgaggcggcgttgcgaaagggcgcgccgcccgcgtggaaatacatgcagcgaagatgctgcaagaggcagggacgcctcgaggaagtgttggcaattcagcttttgctctaaaggtataatggctgccgctttcagcagccagaaatgcaggatgaatatgaataagattttggagaagaaaaaactggcggacaagacatggctcttccgcgtggaggccccgatgatcgccaaacgtcgcaaggcggggcaattcgtcgtgttgcgcgtgtgggagaaaggcgagcgttttcctttgacaattgccgatgcggaccccgtggaaggatcgataactcttatttttcaatctgttggcaagagcaccatgctactgggtgaattagaggccggggatcaaatccttgatctcgtagggccgcttggacgccccacgcatgtcgaaaagttcgggaacgtggtgatgattggcggcgggataggcatcgcaccgacccacccaatcgcacaggcgatgaaacaggccgggaaccatgtcatttccatactcggagcgcgcacgaaagaattgctcatcatggagccagagatgcgcaaggcttcggatgagacggtcattgtaacagatgacggaagctacgggactaagggatttgttaccgatgccctgaaaaagcttatagattcaggcctgaaggtcgaccttgttctagcgatcggaccgccgataatgatgcgctctgtcgcggagcttacccgtccctatgggataaagacgcttgtttccctcaataccatcatgatcgacggcacggggatgtgcggtggttgccgcatccgctacaacggtgaaaaccgcttcgtatgcgtcgacgggccggagtttgacgcacacaaggtcgattttgccagcatgctgaagcgtcagcaggcgtatcgggacgcggagaagctttcgatggagcttctggaaaaggcggagagcaagccgggccatggcttcggggaagtcgggtgcaccttccaccgggcactgaggccggatggagcggacactgcaatggtgagcggaggaaactgacatgagtggaaatgcatcgcgcaacgaaaaactggaagcgttgctggagcggtttcccgagatgaagccgaaagacaagatggccctcgatcgccagcccatgccggagcaagctcccgaagagcgtcggagcaatatgctggaggtggccctcgggttcgacgacctcgcggcgcagctcgaatccctgcgctgtctggaatgcaagacgcatccgtgcgtggaaggctgcccggtcggggtggatattccggggttcatcgcgcgtctgcgggagggagatttcgagggcgccatcgccaagatccgagagaccaactgcctcccggccatcaccggccgtgtgtgccctcaggaaagccagtgccagctcaagtgcatggtggggaaaagcaagaaagacgtgaacgaggcggtttccatcggccgcctggagcggttcgtagcggattggaagcgcgcccagggtaagaccgaggcgctccaattgccgcccggaacgggacatcgggtggcggtggtcggatcgggtccggcggggctttccgccgcgggagatctcatcaagatgggccactccgcaaccgtcttcgaagcgttccacaagcttggcggggtgcttatctacggtataccggagttccgactgccgaagtgcatcgtccaggcggaaatagattacctcaagagtctgggcgttgagttccaggtgaacgtcgtcatcgggcagacgataacgttggatgaactcctcgaagaagaaggcttcgatgcggtcttcgtagctaccggggcggggctcccgcacttcatgcagattcccggcgaggagctgatcggggtctattccgccaacgaattcctcacgcgcatcaacctgatggaggcttacaagttcccggaagccgacacgcctcccatacgcctaaaaaacgtggccgtcctcggcggaggaaatgtcgcgatggattgcgcccgcacttcgcttcggatgggcgctgaaaacgtgtatctcgtctatcgccggtcggaagccgaactccccgcgcgggcggaggaagtccaccacgcgaaggaagaaggcgtgcagttccggcttcttaccaatgcaaccgagatacttgccggggacgacgggcgcgtcagggcaatcaaggctgtgaacatggagctgggcgagcctgatgcatcggggcgccgtcgccccgtcccggtcgcaggatcggagcatgagattgaagtggatgcggtcatcgaggccataggcaacagccccaatcctctcatcgccaacacgacgccggagataaagaccacgaaaaggggcactgtcgttgtggatgaagagacctgtcgaaccagcaaaaaaggggtcttcgcgggaggcgacatcgtctccggcgcggcaacggtcattctggcgatggggcaggggcgccgcg

SEQ ID NO: 677 - DNA, 8969 bp, Artificial Sequence
  Synthetic Oligonucleotide
agagcttgccgacgaacacgcccgcccgcggctcgatcatccaccggctgagttccccgcgcaggccgaccgggaccttctccaggatcagcacgaccatcaggtcgcccccagttcgttcgagggcgtccagagcggggcgggccgcgcgggatcctcatccatccacgcgtccgcgtcctcgtccgccccatcgcccagcgcggcgcggatgtcgggcacgatgcgcttgaggcgcttggtatcggcgaacgtgtccctcatcctcaaccgcacggcgcgttccaggtcctcggcgccctcggcggccgttcggaacgcgaccggtacggtgatctcggtcttgtagaggtcggcgatgtcgtacacgaacgagagctgcttgccggtgtggatgaagccgatggccgggctgtagccgcacgagaggatcgcggcgtgacagagcccgtagagacaggagttcgccgcggagagcgcgcggttcgccgggtcggcggcgttccagtcgtcgcgtccgtagaagcgcccagtccagggcacgccggtctcctcgctcaggcgcgcgtaggcacggcgcacgcgagcgccctccataccccggagcttctcgatggtggcaccctcttcgacgacttcgtcgaagcgcatccggtacatccggacggctacatcgcggcgcgtgtcctcgttcgacgcgagggcggcctggcggaggaggggcgcggcgctgcgcgtgccgccgatgccccaggcgtagaagcgcacgttctcctcgccgcaccagatcacgaggcagttgttctcggcaagggtgcggatggcggcatgcgtgatgcgggtgccgggcccgagcatcagcacgcagagcgtcgccacgggcacgagcaccttgccctgcgcgtcgtggacggagatggacttctggtcctgatccacgcgcccgtgctccaggtagaggtagctcagcccgtctcggaacttcggcagcgcgtgcaggtcatccatgacgcctcaccccacccgcgcgacggagagaaggccgaaaccgaggcccttcgcgctaccgatgcccttcctgagcgcgtccgcgaactggtccgcaacggtgacgcggagcagcccctcgaagagcaccgagtagaggcggatgggcggcttgtccccgggccggcccgacgacgcctggacccacccctgagtcgtgacccgcgcctcctcgaccgcgaagcccttgtcggaagcctggcgttcgagccacgcaagctggtcctcctcgcggagccaggccacgcgcttcccgtcgtccttgcggcgtcgcgtcgggttcgcgcgcaggcggaagcgatacgtccagtcgacctcgggccccgggtcgtacggccgcgtctcgggccgggccgcgaggaagtggtcggcgttgtggaaggcgtagtcccagtcgggctgggcagcggactgcacaaggatgatcgcccggccgacgctccgcgggtccaccctgaagaggaagccggcctcctcaccgcgctccacgcgcgcctgctcggggaagtcgtcggtccggaacggcaacaggaaccgcgggtcgcgcgcgcgccgtccggcggaggggaaggccatgcacagacgctgatgcacgcggtagggatcgcggagccagcgtcgcccggggcgcgggcgatcggggtccgtgccggtgtctatgagaagctgggacaggtacatggctactcctcctcctcggcgacctccgcgccgacgcgcgtcctccccgcccgcaaggagcggcggcgcgactcgagagaccggaagtccacgatctcgcgacgcttcgcgagcacacgctcgcgccagcgcgggtcctcggggttgatgcggtcgaggcccatgttcaggccgtactcgaccatggtcaccgcgtcgtggcaaagccggcagagggcgcggaggtcggcgaggtcctcgtccccgccggcgcgtcggtaggtgacgtgctgcacggtcgtcgcgggcgacttgcagagcacgcagaggccctcgtccgcggcgatccgcttcagccgctgctgcttgtacctctcgttgccgtagtcggcgcgcgggcgcggcggggccttggcgggcgtcaggagcgcctggccgaccgcggcctcaaccgagtcgcgcaacacgaggcgcggctcgtggacgggcggctcgaaggagacgggccggtcgtaccagacctccgcctcgggcggggcgacaggctccgaccgggacccgcgccattcgagcaggcacggaaggctccggcgcttgccgacgccccgggcctctccctggtggcgtggctcccaggcgacggcctcgagcgcgtcgcgaagcgtagggcacgtcgccgtaccctcgaggaccggcctcgcgggcgggcacgacttgcgacccaagaagacgggccaccgcgggcttgcgagagcgtcggcgagttcctcgatgagatccgagccgccgtgtagagcagcgagaaagctggcgtcgctgaggtactccctgcgactgacgagggtctcgatgtcgccggtcttcgaggtgaccttcaccttgcctccggccgtgcggatgccgatgccggcgccgccggtgtggtagtcccaccagcggaggcctggccggtccacgcggacgcccaaggcgaggccattgagttcgggcaggcgcttgcgcgcctgagaccatgtgaggcccatcgcgcagcacacaaggccgaggacgccggacttggtcggcgcgtccatcgtgcgacggacgatgagtttcgagttgtcgccccaagcttggaggggtccctccaggcgcaggtacacggtgttcggagcgtcgctcatggctacgccccctgcgctgaggcgacgaccttgtccacggctccgatcaggtcgtccagagaggcgacgaacgcgccgtcctcaacgaggggcctctcctgcttgtcatccacgtaggtcagagcgtatcgcccaccgggcgagaaccagaagcgctcggcgcggaggccgtagccgtccaccgtctcgtgcacgtactgcccgagacgcgcgacgctctcggcgaccagggggcgcgggcctctcagtgggacggggtcggcgaaggcgttggcgtaactgacgggcacgcagcggtcggtcttgacctccaccagaacgccctcgggcgggttgaaggccgcgaagctcttctgcttaccggtaggcgtggtgagcgcaagggcggagaggaagcggcgaagggtcagccgcgcgagttcgacatcgccggcgaggttctcaacgagacgctcccagtggatggagaagtacttgtagaagcacgccgaggcgaacatggcctcattcacgtgcccggcgccggtcccggaagcgcggtcgtcgacggccgtgaagtagtccacctcgttgatgacctcatgggtcgagatggcgtgggccgccgagagggcggcttcgacgtggaagtcaaccttgcggaaaaggccctcgccgtccagttcggtcatgcgcccgctcagcgccacgtcgggcacagaggccttgcgtccgaggatctcggcgaacgcctcgcagagttcgtcgggcttcttcttggccgccttggcttcgcggaccgcgtcggccatcgcggcgatcgccgactcgggcacgaacatgcggatggtgggcgcgttggcgtcttcgcgcgtggcggcgcgtttgactccgcccttctcgaacgcctcggccaccagcttcaggaggtcgtcgggagccgggctcgagccgtgagcttcctcggccacgagggtgatgagccgacgcgtgcggacgccgccgtcgcgctcgagcgccgcctggaactcgtcgctgcgccggatgctccgcttgaggcactggctggagatacgggcgcgggtgacaccgccgaagacgcacgtcttgggggcgccaaggtcatcacggttgaggttcgcggggctgtggttctgcaggacgtgtacctcgatcagcatgtcagctcctccgttcgatgagtccggcgatgttcaggtagtcctcggcccagatgtcgcgcacgtcccggcccttgcggtgggcgggcccgcggtcccagattgacaggtcgtcggtcaggcgagcccagtcgagccctttgcacgcgcccttcttcaccgcgccctcaacgagcgagagcgcccagtgcaagtggctctccaccgccgacagaggcgcgcgcaacagggcgtcgaagcgagcgcgatgccggcgacgcgcgtccgcgtcgcggcggagttcgagctgccccagaacggtcgcgaggctcggggggctctcggtcgcgggtgcgtgcgggatggcgaacgcgccgtagagcttggcgacgagccaggccacctcgcggcgcggggcgcgttggttccgctcacggagggtccaccagaggccggtgaacacgtcgaagccgggcaccgtctcgtctagcggcgtgccggccaggcgtcgcaggcgcgagcgctctcccgcctgcagctcgctgagtcctcggatgtactcctcagttgccgtcatcggatccctcgccttcctttcgcggcgtagcgcccttggccagcttcgcgagcgcgcgatccagctcacgccgagccgcaagctgagcctcacggcgtcgcaacggcgagccgggggtcgcacttgcgaccgatgcctccacggcgggacggaggcgttctccgacgcgctcgagccactgggccgggtcggcgccgcccacgtcgcccgtcgttcgccagtgctcgaagtcggcacggagcgcggcttcgagcgcgggcgtccacgcctcaagggcggtgatgcggttggggtgctgccgcgcggggttaggtgtgcctcggcgcagcgccccggcggtctggctcgcagccgagtccagcaacccgagggcctcggtctcggcggtccggcctgtcagcggcccttgtcgtagcgtgacggcggaagcgtcttggtacagcgccttgttggtggccggaccggcgacgaggatggctgcgggaggcccttccacgtcggccgagaccggcctagcaaggattgccaggctcgcgcggcgccagaaccgtgcgtgggtcgaggcgcgtcggcttggggcgggaaacccgagcgtcgtccgttgcgagcccgccttcgccttgcgccccgcgccccgccgcggtgtctccgcgtcctctgcgtcggcctcgtcctcgctgtcgctggccttggccgcgacgtcctcgaacaccagatgagggtcgtcagaccagaacttcttctgctgtcccgtagtctcgaacggcggcttccagcagcccgtgaacgccatgcccgcgatgacgggtcccgtgcgtccgcacttcgcgcacgtcgcgtcctcacccgagcagtctccgagccagaggcgccgcgagcgccacgcaaggaccgtgaccgcatcgaggtcgtcctcgtccggcggctcgtcgagcagccagggcggctcacgcttcggcggcccgtgggacgccaggttgagggcgaggctctcagagagggttgcgccgtgcgcgatggcgtacgcgggcgacgggccgttcaccgcggaggtgtacttcccaccggcgtaggcggacgcaaacgtcccgcaccggatgagcccgacggcgcagcacgccgggcagaagccgtagcgtccgtcgcgcacgtggcggaagtgcgcgatccgcgtctcggtcgggaactcctggaacaggtcgccgattgggcgctgaggggtaccgcggagcgcgcgatcctggtagaacctgggtccgtcgcctaacagctcgaacctgtctcttgccttgtccagcttcgccagccacgcgcggggaacgccgtccgcttccgcgagcgcgcctcgctccttctcggtcggttccggcttgcaccagagcagcaccgcgagcaggaagcggaagagggacacgttgtccatcgggttgggtgccgcgatctgccggaaccgtcccgcttcggtaagtgccgtcgtgatacccgctcgcataggctctccgccggcggtgagcattggaatccactgctcgtctatcaggttgtacccagacatgaaccacctcccagacaactgcggcgacacgctctgcccagatgcgctctgccacggccgcgttcgtcacggccgcagtgatgccggacccgctttccccctcacacggtcctcagcgagttcggacacctgacttcgggtgtgaggttacacatgcgggtgggagagaccttcttgggggcggtgggcggatcgcctcaggtgtggccggtggtccgcgccagggacggtgcggctacccgaggcggcctgaggggtgttcgtcgcgaggtgacggcgggccgcgcgcggaaggtccgccgagcgctgagcgagcgtctgtcccgggtcgggcgacctctcaccgaggccattcgatccggggcgtgtgcatcctgagaggagagtgcacgagtgcgtgtgagccgaaggggactgtgtaccgcgtttctcctgctcttccttgtggccggcctggtgtctctcccctgtgtgacaagctgcagcggcgagggaacgaccacatgggccatcgcccttatcacgaatccgacgacgttcgccgtcggtgcgacgaccacgatcaccgcgaccctcacgtgggacggcacggcccagcagggcgatgccgtgacgtggtcggcaagcccttccgggagtgtgacgttctccgcctggagcaccatcaccaacgcgtccggagaggccaccgtcaccgcgaccggagtgaccgcgggccaggtcacgatcaccgccacgggcccgacgggctgtaaggcgacggccgtcatcacggtgaacccggctccggcccccgccgtgacactcgcactctcaccggcgacgatcggcgagggagagaccaccacggcgatggcgaccgtgaccaacgccggcgtcgcggtcagcggtgaggccgtgctcttcgcgatcgaggatacgtcggttgccacgttcacgacggtgagcgcggccacgaccgacgctcaggggcatgcgagcgtgtcgatcacgggcgtagcggccggggcgaccggggtgaccgccacggcgctctcgacgacgagccaacgggcggccctgcaagtgaccggaggcccgcacgtggaccttgtcctcacaccggcctcgatcccgcagggcgaccaggtcacggcgaccgcgacggtcacgaacggcggggcgccggtggcgggcgagaccgtgaccttcgcgctcacggacgagcgcgtcgcgggcttcgcggaccagaacacggccgtcaccaacgcggcgggccaggcaagcgtcgtgatccacgcctacatcgccgggacgacgacggtgtacgccgaggccctctccacgacgagcgcggggcgggtcctgaccgtgacgccgtagcgcgggaggagtgtccgaagtgccctcatccgagacaggcgacggagcgctaggcgccgcggcgacggccgccgcgcgctggtgggacaccgagcgccacgcggagccccgggacgcccagtggctctcacttgctcgcgtgcgggagcggatgaaccgcgcgatctcgggcgacgaggcgaaggactggatcgagcacacgctcgagcgccacgttcgtgggggcctccccgttccgcgatgcgtgagcctcgcgtgcgggggcgggaagatcgagcggcggctcgcgggcttgggggctttctcgcggtgcgtgggtctcgatgtgagcgagggccagctcgagcgggcccgacgagccgccgaggaagcgggcatcgtcgggctggagtaccggctcgcggatctcgatgaggatgaggaactccccgaggcggagcttatcgtcgcccacatgtcgctccaccacgtcacccgactggaatcgctggccgagcgcgtggcgcgcgcgctcacgccggacggctgtttcgcggcgctggagtacgtggggccggaccggttcgacttccctccgcgccagattgccctcttcgagcacgctctgcacttgcttcccgagcgctaccgcgagagcgtcgcgtgggccaagcggggcagcctcggcgatggccgggcgcggggcgcatccgagtgggcgcgcgtactcctcgggaagctgcggagcggctccttcggcgctgcgatccggcggaggctgaagatgcggcgcgtcgcggccgagggcagcgcgttcgtgaagcaggaaatcccgacgacgcgaggggccgaactggcggccgtggagccttcggaggccgcgcgatcgagcgcgatcctcgccgcgttctccgagcacctggagatgatcgaggttcgtccgttcgggagcgctctcctgatgctcgttctcgatgacatcgccggcaacttcgcggacgacgacccgctggcgcaggcgctccttgagatgctcttcgcagtggacgacgcgctgacggccgccggctctctcagtgaggacttcgtctacttcgcggccaggcgacgggagtagcggttacggactggcgggcttgaagcccgcgctccgggaaggggccccaccaccaccggcgtccggtggtggtggggctggttcgacgtcagtccaccttcgccgagagtccctgagccatcgcgatctcctcggagtggttcacggtgagggctgggcggtgtgtcacgtagtcaatgagcgtcgccgcgccggggtggccgttgccgctctgcttcatgcctccgaacgggaggtggacctccgcgccgatggaggggaggttctcgtagagcagcccgacctccagctcatcgcggcagtagcgccacttgcggaagctctcggtgatgacggcggctgagagcccgtagttggtctcattgtggta

SEQ ID NO: 678 - DNA, 8969 bp, Artificial Sequence
  Synthetic Oligonucleotide
agagcttgccgacgaacacgcccgcccgcggctcgatcatccaccggctgagttccccgcgcaggccgaccgggaccttctccaggatcagcacgaccatcaggtcgcccccagttcgttcgagggcgtccagagcggggcgggccgcgcgggatcctcatccatccacgcgtccgcgtcctcgtccgccccatcgcccagcgcggcgcggatgtcgggcacgatgcgcttgaggagcttggtatcggcgaacgtgtccctcatcctcaaccgcacggcgcgttccaggtcctcggcgccctcggcggccgttcggaacgcgaccggtacggtgatctcggtcttgtagaggtcggcgatgtcgtacacgaacgagagctgcttgccggtgtggatgaagccgatggccgggctgtagccgcacgagaggatcgcggcgtgacagagcccgtagagacaggagttcgccgcggagagcgcgcggttcgccgggtcggcggcgttccagtcgtcgcgtccgtagaagcgcccagtccagggcacgccggtctcctcgctcaggcgcgcgtaggcacggcgcacgcgagcgccctccataccccggagcttctcgatggtggcaccctcttcgacgacttcgtcgaagcgcatccggtacatccggacggctacatcgcggcgcgtgtcctcgttcgacgcgagggcggcctggcggaggaggggcgcggcgctgcgcgtgccgccgatgccccaggcgtagaagcgcacgttctcctcgccgcaccagatcacgaggcagttgttctcggcaagggtgcggatggcggcatgcgtgatgcgggtgccgggcccgagcatcagcacgcagagcgtcgccacgggcacgagcaccttgccctgcgcgtcgtggacggagatggacttctggtcctgatccacgcgcccgtgctccaggtagaggtagctcagcccgtctcggaacttcggcagcgcgtgcaggtcatccatgacgcctcaccccacccgcgcgacggagagaaggccgaaaccgaggcccttcgcgctaccgatgcccttcctgagcgcgtccgcgaactggtccgcaacggtgacgcggagcagcccctcgaagagcaccgagtagaggcggatgggcggcttgtccccgggccggcccgacgacgcctggacccacccctgagtcgtgacccgcgcctcctcgaccgcgaagcccttgtcggaagcctggcgttcgagccacgcaagctggtcctcctcgcggagccaggccacgcgcttcccgtcgtccttgcggcgtcgcgtcgggttcgcgcgcaggcggaagcgatacgtccagtcgacctcgggccccgggtcgtacggccgcgtctcgggccgggccgcgaggaagtggtcggcgttgtggaaggcgtagtcccagtcgggctgggcagcggactgcacaaggatgatcgcccggccgacgctccgcgggtccaccctgaagaggaagccggcctcctcaccgcgctccacgcgcgcctgctcggggaagtcgtcggtccggaacggcaacaggaaccgcgggtcgcgcgcgcgccgtccggcggaggggaaggccatgcacagacgctgatgcacgcggtagggatcgcggagccagcgtcgcccggggcgcgggcgatcggggtccgtgccggtgtctatgagaagctgggacaggtacatggctactcctcctcctcggcgacctccgcgccgacgcgcgtcctccccgcccgcaaggagcggcggcgcgactcgagagaccggaagtccacgatctcgcgacgcttcgcgagcacacgctcgcgccagcgcgggtcctcggggttgatgcggtcgaggcccatgttcaggccgtactcgaccatggtcaccgcgtcgtggcaaagccggcagagggcgcggaggtcggcgaggtcctcgtccccgccggcgcgtcggtaggtgacgtgctgcacggtcgtcgcgggcgacttgcagagcacgcagaggccctcgtccgcggcgatccgcttcagccgctgctgcttgtacctctcgttgccgtagtcggcgcgcgggcgcggcggggccttggcgggcgtcaggagcgcctggccgaccgcggcctcaaccgagtcgcgcaacacgaggcgcggctcgtggacgggcggctcgaaggagacgggccggtcgtaccagacctccgcctcgggcggggcgacaggctccgaccgggacccgcgccattcgagcaggcacggaaggctccggcgcttgccgacgccccgggcctctccctggtggcgtggctcccaggcgacggcctcgagcgcgtcgcgaagcgtagggcacgtcgccgtaccctcgaggaccggcctcgcgggcgggcacgacttgcgacccaagaagacgggccaccgcgggcttgcgagagcgtcggcgagttcctcgatgagatccgagccgccgtgtagagcagcgagaaagctggcgtcgctgaggtactccctgcgactgacgagggtctcgatgtcgccggtcttcgaggtgaccttcaccttgcctccggccgtgcggatgccgatgccggcgccgacggtgtggtagtcccaccagcggaggcctggccggtccacgcggacgcccaaggcgaggccattgagttcgggcaggcgcttgcgcgcctgagaccatgtgaggcccatcgcgcagcacacaaggccgaggacgccggacttggtcggcgcgtccatcgtgcgacggacgatgagtttcgagttgtcgccccaagcttggaggggtccctccaggcgcaggtacacggtgttcggagcgtcgctcatggctacgccccctgcgctgaggcgacgaccttgtccacggctccgatcaggtcgtccagagaggcgacgaacgcgccgtcctcaacgaggggcctctcctgcttgtcatccacgtaggtcagagcgtatcgcccaccgggcgagaaccagaagcgctcggcgcggaggccgtagccgtccaccgtctcgtgcacgtactgcccgagacgcgcgacgctctcggcgaccagggggcgcgggcctctcagtgggacggggtcggcgaaggcgttggcgtaactgacgggcacgcagcggtcggtcttgacctccaccagaacgccctcgggcgggttgaaggccgcgaagctcttctgcttaccggtaggcgtggtgagcgcaagggcggagaggaagcggcgaagggtcagccgcgcgagttcgacatcgccggcgaggttctcaacgagacgctcccagtggatggagaagtacttgtagaagcacgccgaggcgaacatggcctcattcacgtgcccggcgccggtcccggaagcgcggtcgtcgacggccgtgaagtagtccacctcgttgatgacctcatgggtcgagatggcgtgggccgccgagagggcggcttcgacgtggaagtcaaccttgcggaaaaggccctcgccgtccagttcggtcatgcgcccgctcagcgccacgtcgggcacagaggccttgcgtccgaggatctcggcgaacgcctcgcagagttcgtcgggcttcttcttggccgccttggcttcgcggaccgcgtcggccatcgcggcgatcgccgactcgggcacgaacatgaggatgttggtcgcgttggcgtcttcgcgcgtggcgtcgcgtttgactccgcccttctcgaacgcctcggccaccagcttcaggaggtcgtcgggagccgggctcgagccgtgagcttcctcggccacgagggtgatgagccgacgcgtgcggacgccgccgtcgcgctcgagcgccgcctggaactcgtcgctgcgccggatgctccgcttgaggcactggctggagatacgggcgcgggtgacaccgccgaagacgcacgtcttgggggcgccaaggtcatcacggttgaggttcgcggggctgtggttctgcaggacgtgtacctcgatcagcatgtcagctcctccgttcgatgagtccggcgatgttcaggtagtcctcggcccagatgtcgcgcacgtcccggcccttgcggtgggcgggcccgcggtcccagattgacaggtcgtcggtcaggcgagcccagtcgagccctttgcacgcgcccttcttcaccgcgccctcaacgagcgagagcgcccagtgcaagtggctctccaccgccgacagaggcgcgcgcaacagggcgtcgaagcgagcgcgatgccggcgacgcgcgtccgcgtcgcggcggagttcgagctgccccagaacggtcgcgaggctcggggggctctcggtcgcgggtgcgtgcgggatggcgaacgcgccgtagagcttggcgacgagccaggccacctcgcggcgcggggcgcgttggttccgctcacggagggtccaccagaggccggtgaacacgtcgaagccgggcaccgtctcgtctagcggcgtgccggccaggcgtcgcaggcgcgagcgctctcccgcctgcagctcgctgagtcctcggatgtactcctcagttgccgtcatcggatccctcgccttcctttcgcggcgtagcgcccttggccagcttcgcgagcgcgcgatccagctcacgccgagccgcaagctgagcctcacggcgtcgcaacggcgagccgggggtcgcacttgcgaccgatgcctccacggcgggacggaggcgttctccgacgcgctcgagccactgggccgggtcggcgccgcccacgtcgcccgtcgttcgccagtgctcgaagtcggcacggagcgcggcttcgagcgcgggcgtccacgcctcaagggcggtgatgcggttggggtgctgccgcgcggggttaggtgtgcctcggcgcagcgccccggcggtctggctcgcagccgagtccagcaacccgagggcctcggtctcggcggtccggcctgtcagcggcccttgtcgtagcgtgacggcggaagcgtcttggtacagcgccttgttggtggccggaccggcgacgaggatggctgcgggaggcccttccacgtcggccgagaccggcctagcaaggattgccaggctcgcgcggcgccagaaccgtgcgtgggtcgaggcgcgtcggcttggggcgggaaacccgagcgtcgtccgttgcgagcccgccttcgccttgcgccccgcgccccgccgcggtgtctccgcgtcctctgcgtcggcctcgtcctcgctgtcgctggccttggccgcgacgtcctcgaacaccagatgagggtcgtcagaccagaacttcttctgctgtcccgtagtctcgaacggcggcttccagcagcccgtgaacgccatgcccgcgatgacgggtcccgtgcgtccgcacttcgcgcacgtcgcgtcctcacccgagcagtctccgagccagaggcgccgcgagcgccacgcaaggaccgtgaccgcatcgaggtcgtcctcgtccggcggctcgtcgagcagccagggcggctcacgcttcggcggcccgtgggacgccaggttgagggcgaggctctcagagagggttgcgccgtgcgcgatggcgtacgcgggcgacgggccgttcaccgcggaggtgtacttcccaccggcgtaggcggacgcaaacgtcccgcaccggatgagcccgacggcgcagcacgccgggcagaagccgtagcgtccgtcgcgcacgtggcggaagtgcgcgatccgcgtctcggtcgggaactcctggaacaggtcgccgattgggcgctgaggggtaccgcggagcgcgcgatcctggtagaacctgggtccgtcgcctaacagctcgaacctgtctcttgccttgtccagcttcgccagccacgcgcggggaacgccgtccgcttccgcgagcgcgcctcgctccttctcggtcggttccggcttgcaccagagcagcaccgcgagcaggaagcggaagagggacacgttgtccatcgggttgggtgccgcgatctgccggaaccgtcccgcttcggtaagtgccgtcgtgatacccgctcgcataggctctccgccggcggtgagcattggaatccactgctcgtctatcaggttgtacccagacatgaaccacctcccagacaactgcggcgacacgctctgcccagatgcgctctgccacggccgcgttcgtcacggccgcagtgatgccggacccgctttccccctcacacggtcctcagcgagttcggacacctgacttcgggtgtgaggttacacatgcgggtgggagagaccttcttgggggcggtgggcggatcgcctcaggtgtggccggtggtccgcgccagggacggtgcggctacccgaggcggcctgaggggtgttcgtcgcgaggtgacggcgggccgcgcgcggaaggtccgccgagcgctgagcgagcgtctgtcccgggtcgggcgacctctcaccgaggccattcgatccggggcgtgtgcatcctgagaggagagtgcacgagtgcgtgtgagccgaaggggactgtgtaccgcgtttctcctgctcttccttgtggccggcctggtgtctctcccctgtgtgacaagctgcagcggcgagggaacgaccacatgggccatcgcccttatcacgaatccgacgacgttcgccgtcggtgcgacgaccacgatcaccgcgaccctcacgtgggacggcacggcccagcagggcgatgccgtgacgtggtcggcaagcccttccgggagtgtgacgttctccgcctggagcaccatcaccaacgcgtccggagaggccaccgtcaccgcgaccggagtgaccgcgggccaggtcacgatcaccgccacgggcccgacgggctgtaaggcgacggccgtcatcacggtgaacccggctccggcccccgccgtgacactcgcactctcaccggcgacgatcggcgagggagagaccaccacggcgatggcgaccgtgaccaacgccggcgtcgcggtcagcggtgaggccgtgctcttcgcgatcgaggatacgtcggttgccacgttcacgacggtgagcgcggccacgaccgacgctcaggggcatgcgagcgtgtcgatcacgggcgtagcggccggggcgaccggggtgaccgccacggcgctctcgacgacgagccaacgggcggccctgcaagtgaccggaggcccgcacgtggaccttgtcctcacaccggcctcgatcccgcagggcgaccaggtcacggcgaccgcgacggtcacgaacggcggggcgccggtggcgggcgagaccgtgaccttcgcgctcacggacgagcgcgtcgcgggcttcgcggaccagaacacggccgtcaccaacgcggcgggccaggcaagcgtcgtgatccacgcctacatcgccgggacgacgacggtgtacgccgaggccctctccacgacgagcgcggggcgggtcctgaccgtgacgccgtagcgcgggaggagtgtccgaagtgccctcatccgagacaggcgacggagcgctaggcgccgcggcgacggccgccgcgcgctggtgggacaccgagcgccacgcggagccccgggacgcccagtggctctcacttgctcgcgtgcgggagcggatgaaccgcgcgatctcgggcgacgaggcgaaggactggatcgagcacacgctcgagcgccacgttcgtgggggcctccccgttccgcgatgcgtgagcctcgcgtgcgggggcgggaagatcgagcggcggctcgcgggcttgggggctttctcgcggtgcgtgggtctcgatgtgagcgagggccagctcgagcgggcccgacgagccgccgaggaagcgggcatcgtcgggctggagtaccggctcgcggatctcgatgaggatgaggaactccccgaggcggagcttatcgtcgcccacatgtcgctccaccacgtcacccgactggaatcgctggccgagcgcgtggcgcgcgcgctcacgccggacggctgtttcgcggcgctggagtacgtggggccggaccggttcgacttccctccgcgccagattgccctcttcgagcacgctctgcacttgcttcccgagcgctaccgcgagagcgtcgcgtgggccaagcggggcagcctcggcgatggccgggcgcggggcgcatccgagtgggcgcgcgtactcctcgggaagctgcggagcggctccttcggcgctgcgatccggcggaggctgaagatgcggcgcgtcgcggccgagggcagcgcgttcgtgaagcaggaaatcccgacgacgcgaggggccgaactggcggccgtggagccttcggaggccgcgcgatcgagcgcgatcctcgccgcgttctccgagcacctggagatgatcgaggttcgtccgttcgggagcgctctcctgatgctcgttctcgatgacatcgccggcaacttcgcggacgacgacccgctggcgcaggcgctccttgagatgctcttcgcagtggacgacgcgctgacggccgccggctctctcagtgaggacttcgtctacttcgcggccaggcgacgggagtagcggttacggactggcgggcttgaagcccgcgctccgggaaggggccccaccaccaccggcgtccggtggtggtggggctggttcgacgtcagtccaccttcgccgagagtccctgagccatcgcgatctcctcggagtggttcacggtgagggctgggcggtgtgtcacgtagtcaatgagcgtcgccgcgccggggtggccgttgccgctctgcttcatgcctccgaacgggaggtggacctccgcgccgatggaggggaggttctcgtagagcagcccgacctccagctcatcgcggcagtagcgccacttgcggaagctctcggtgatgacggcggctgagagcccgtagttggtctcattgtggta

SEQ ID NO: 679 - DNA, 8944 bp, Artificial Sequence
  Synthetic Oligonucleotide
cggcccccgcgcgaaaataactcaaaatggaacgattgcctgtttccaccgcgtcgtctccccgatcaggccctttggcgtacggcccaagtcggtaaatccaccaccgccattgtcgccaaaaccggccacagaacaagcggcatccctatgatcagaacggcggtccaaacgatatgtttcaggcaattgccggcaatacgccgccgggaccgcgcgcaaaagcccccgacgaggctgtacaaaagcctgttctgagccttgccaaaggaaaaacaccgattatcgcttcgagaactggaatcgacggcgggcgccgcgctggccgtatttcttgcgttccttcatccggctgtcgcgcgtgaggaacccgctttggcgcaggggtatttccaggctcggatcgaatttggccagagcccggcccaatcccatgacgatggccccggtctgccccgacgggccgccgcccgtgcatcgggccaagacgtccagcttgcccccggtgttggtcacttccagcggaccaaaaatcgacttgcggtcacgctcgccagtgaaatattcgttgagcgttcgcccgttcaccacgatcttcccgctgccgatcgcgatccgcacgcgggccaccgccgtcttgcgacgcccgatcccccagatgtacgacggcttgcccgccggtacggttacggccggttcggctgcgggcacggccacggcctcggtcggggtttcgctgctcgcaacgctctcgatggtcggtgtttcggtcatgaaaatctcattcgcacggtcacggcgcaaaccgccgccggggataattcctctctcacgccagtttcaacggcaccggctgctgcgcggcgtgcggatgctccgtgccgcgatacactttcagcttgcccagaatattacggcccattttgctcttggggagcatccttcgcacggccagttcgatcaccttctccggatgcaggctgttcatcgccttgtacgaatacagccgccgcccgccggcgtacgtcgaatacgtctcatattgaatctgctccgacttcttgcccgtgactttcaccttctcggcattgagcacgatgacaaaatcgccggtatccacgtttcgcgtatatgtcggccgatgcttcccctgcaggatgatcgcgatgcgggcggccatccgccccagcacctggtccgtggcatccacaacgtgccacttggctgtaatttcgcccgggtgggccagatacgtgctcatcgcgtttcctcgctgaccgccactgcggccggccaaataaaatccctcgccgcccgactctcccgccagacccggcaaaggatggggcatcgtaccgataccgccgatattgtcaagattggatgaaagttcccaaagccccaaatcgcggatcggccgcacagacgccatgacgccggattcaatacgcccctttgaccgcaggattcgactcgccaccgcgcggtcttccagccattccgccatggcgaccccgcgacaacccggccctgaaagccattcgcaacaccaacccccgccgcatgaccatcgccccgcccggttgcgaatgcctttcagggccgggttgaaagaccttttcgccgacttgcagcggcgaacgtggttcacccccacgtgcgtggggaagactcgacgacaagacgattgccagtgggaatcgcggttcacccccacgtgcgtggggaagactgccaacgcaatcccacccatgttgtcaaattcggttcacccccacgtgcgtggggaagacgccggcctcccaaaccgcgacatccacggtcacggttcacccccacgtgcgtggggaagacactaaccccattccctaaactaaccccattcctggttcacccccacgtgcgtggggaagacattgccacttctacgtctgtgtctcgcccgtacggttcacccccacgtgcgtggggaagacagccagtaggctcgacgggactttgacgccacctggttcacccccacgtgcgtggggaagacaagcggaaagatggactggcgatggctaacatcggttcacccccacgtgcgtggggaagacgtccttgtcttcgaccttggcccggagcttgccggttcacccccacgtgcgtggggaagactttatcctccccggcgcggcaaaggcgaaggtcggttcacccccacgtgcgtggggaagacagggtcgccagcatcgtcacgcgttgggcgttcggttcacccccacgtgcgtggggaagacatcttctgcccggcgaacggtgtccccgacggcggttcacccccacgtgcgtggggaagacattgccaattcgatatctgtgtctcgcccgtacggttcacccccacgtgcgtggggaagacactggaaattacttcatggcgcgggtttttgccagcatgatgccctcgaagtcctcgacggccttcttggttttcccgctggtttcaattgcgaatccttgctcggtcggggccgggtagatcattattgcggccccgcctttgagggaccggccgatccgatcccacagccgcagccgcacacgggcggaaacggtgcccacgaacaggccggtgtgcggctgaagcagccagcgggtcagttcgccccgcaatgacggcgtaacacgctgaagaatgaaaacaaccatgtggcgcctcccgatctggatcacgttcccggtgcggccggtgccattgccagaatttggccaacgggcgtttcggcgccgattcccgtcggcgtccaccaatccgccggcagtgctggatcgtcggcgtagtccgcttcggcggcctcggccagttccttgggcacggccagggcggcggcgatatccggaaggatgctcgccgccagcttcccttcacggaaacaatcgcggcaggccagtcttacctcgcgctccagattcatcgggttctgtgccgcgagtttgaacgctatcggcacgatgtatcgcgccttgtataagtccgcaacatcgtagacgaatgaaagctgcttgcccgtatggacaaaaccaagcgccggcgaatacccccccgacaaaatggccgcgtgcgccaacccatacaggcaggcgttggcggccgatagggcgcgattcaccgggtcggccgcgttccagtcctgtcgcttgtatgaccgtccctgccaggtgatcccgtgttcgcgcgccgcatccgcgtacgcctggcgcacgcggattccttctttgccccgcaactgctgaagggtcagacccggatcgggcagatcgtcaaaccgcatttggtacatgcgcacgaccacctgcaatcgcaggatggggtggctgacaagccgtgcttgatgaatcaggttccggctatgccgcgtgccgcccatgccctgggcatagaaccgcacgccgtgctcaccggcccacaggatcaggcagttattatcagcggccgtcttgaccgcctcgtgcgtgatcttcgtacccggacccatgataagaaccgccagcgccgccaccggaaccgacgtgatcccgtcggcccggtggacggcgatggctcgctcttcctgatccaccaccgcgtgctcgacgtacaagtaggtgagcttgtcgtcaaacctcggcagatcgtgcaggctcaactgcttattcatttgtcaaagagccttcccgcccccgccgctatccggccggagcgatggacaacagcccaaagccgaaggctttggccggccctattccgtgcgccaatgcctggcgaaatttgtccgcgtcggtgattttcagcattccttcatagcgcacggaccgcagtcgccggcccgcgccggcctcgtgggttttgctggcgtaggcgtagcccggatgcgcaagggtaagttcctcgacggcaaaccccgcgtccccggctcggcagtcgatccagtatcgcagcgatttctcatctccattgatgccaatgcgcttgccagcccatttctcctggatcggtttgccgtcccggtgcatcgactggcgtcgcgcacgtttcaccgcattggccaacaggcggaagcggaatcgctttccgcactcgattgccacttccagaaagtgcgacttcgccggctcggcagccagaaggtggcgcgcgttgtgaaaggcatagccccaatccggctggatcgccgacagcaccacgatcatggccccgccgccggggagaggatcgacgcgaaagaggaatcccgcgtcatcgtcacgctcgacatggacgtgcccctgagcaaactgcgccggatcgtaaggcttaaggaactgttcatcacccccacgacgatctttcgacggaaaggccatgcaaagccgctggtggacccgatagacattccgcagccacagccgccccgggcgcggccggtcggggttcgttccagtgtcgatcagcaacgtggaaagaaacatcactccacctcgtccgcttcaagccgccgacggcgcgtttcctgggaccggaaggcgatgatctcctgccgcttctggatgatccgctcgcgataggccgggtcctccgggttgatccggtccagacccatccccagcccgtactcgatcatcgttaccgcatcgtgacacagccggcacagcgagcgaaggtcttcctgcgcctcatcgcccccggcccggcggtaggtgatgtgctggacggtattggcgggcgatttgcaaaagacgcaaaggcgatggtcggcgtcgaggcgctgctgccggcgcttgcggtactctgtgttcgtgtagtccgctcgcgggcgcggaggagcaggcgtatgcgattgcagcggcacggcgtcgattcttacgtccttgtcgttgccaagggctagctgccggcgaataacaaatctggcgtcatggccgggcacatcgaacgaccgggccacgtcgtaccagatttccgcgtcgggcggggcaacatcccccggccgcgcgggccgccattccatgaggcaatcgaccgcttctggagggtgatcctcgcgcagccgccgtcgccaggggaccgatcgcagtgcggattccaggtcggagaattcacccacagccggctcgtcctttcgcccgagcaccggagcggatgcgggacagcatttgcgccccaagtagagcggccaaaccgggttcagcagcgcgctgtgcaggcgcgcaatcaagcctcgctcgccgcgcagcgcgacgagaaaactggcgtcacacaggtattcccgccgcgtcagcatcgcgcccggttttgtcttgcacggtccctccgcaatgcgcatctgcatccgcgcgccgacggtatggtagtcccaccagcgcacgccgggccgatcgacgcggacgcccaggccaagcgtgttgagctccgccaactcctgccgggcgtcagtccgcgaaacgcccagcgccgcgcagagcactcccaggattcccgactttgtcggcgcgccgcccgatctgcggatgaggaacttcgattcttgatcgccccatgactgcagcgggccttccaggcgaagcatgagcgtgtttccacccacgactacacctccgcgttgttcgtgaccgcctggacttggctccaatcaaatccgatctccttcacgacagccacgaccagttcgtccagagatctcatctgcctgcttgcgtctgtgcaaggcacttctctttgatcctcacaataggtcagcttgtaccggaggttcggcgagaaccagaagcgcgtgccactcctgccgtagccagcatccaggtcgtgaacatactgtcctaactgagcgacgctctgcgaaaccacgtcgcgcggccctttgctcggcacgggcgccgcgaatgcgttggcgtagctgattggagtgccgccgtctctcttgacctcgaccagcacgccgtcggggggattgtgggccgcgaagctgttctgttttccggttggattcgatagcgccgctccgcgaaggaacgcgccgaccgtatgtgccgcaagggcaacgttgcctttgagatttgcggtgagtgtttcccagtggatggagaagtatttgtaaaaacaggcggacgagaacattgcctcgtccacatagccagcgcctgcgtcgctgccggggacatcgtcggccgcaacgtagtaatcgacctccggccgggcttcatgcgtcgagattgcgtgggccacctgcaacgcggcctcaaccgtcgtgtccttcagcacgcccgtttcgagcattcgcccactgagtgccatgtcgggcacaagggtgagtgtggaaatcagcttgccgcaatcggccgcgagctggtcggaatcgccgtcgttgtcttgcagcagtttggcgatcccgtcgatcgcccccttcgtcgtgtaaaccagcatgtcgctcttgtcgtcgtccttcggatttatcccgcatttcttgagaattgccgccgcccgcttcttgacgtcggttttgccagtcaccttgtcggcaatcagcttcgccagctgccgcgtgcggacgccgccgcagagcagcttgaactgatcgctggtgcggatgcttcgcttgatacattggctcgagatgcgagagcgcatcacaccgccgaaatagcacgtcttgggcgcgcccaaatcgtcgcggttcaggtttgacgggctatgattttggatcgcatgaatttcaatcaacatggaatctccttggcagaagtcagttttcaacgcgcatgtattgttttgcccattcgcatcgtgtttcttcccgctcccagatcgacagatcatcggtcaggcgcacccaattcaagcccgatccgttgtcggcaatcagcgtaattgcccattgcaaagccggctcgatcaggcccaggggaagcatgagcaactcatcaaatcgctcctgacgccgccggttggcgtcatcggtggcagctttgagccgtccgagctgcaccgcgaggggtgcgtccgactgcggcaggcgacggtatgcgtacagcttggcaatgagccaggcgacttcacggcggggtgctttttggtttttcttccgcaacggccaccataggccagcgaaaagatcaaagccgtccacggactcgtcaagtggcaagcccgcgtgcgtgcgcagttgcccaaggtcgccgggcttaagcgtttccagcgtctcgataaattgttccgtggccgtcatgaagtgccgccattctctgccttcggtgcgcgcgcttcaacaggtggttttcgggtcttgtctggcgacattcgcgagatttcctggcaacgaccgacggcagcggtggtaaagccgggtgacaggcacttggcgacggcttccatcattggcgaatacacgcccgagccgccggcccaaacccgatcgtcgccgctgcataacttgtcgatatgtgcaaaggcttcagcttcgacgtcggggcgtacggcgtcaatcgccgggcgaatctccacgtgccgtcgtgcggaggatttcgggtacattcggcggctcaatcgcgcgccctctttctgccatagttccagcatcgcggctgacccttcgacgcccggcaacgcaccaaggcgcagcaagcggtccgtggcttcaaggtacttgtcattctggactgtggagaatccaacaacgcagcaggctccagcccgcaactcgcttctgccgcgaaggatcgctgcaacctggcccgcccattgcccggctgccccgtcgctggaaccaagggcattcgaggtttgcagggccatcgtcttttccttcgcggtcacatagatcaggtgcgggtcgtgccagacacgcccttcggccttgatgctgccctttccatcaaaaacgcatcggcgaatcagcacttcttttcgcccgcatgccgcacaaatcgattccggcatctccggttcgcccagccagatgcttcgcggaacccacgtcaatccgcgtagcagcggcacttcgccggcatccagcgccatgcggcccgggtcttcccattcgggttttcccaagtccgatccccattgtcgccacgagaggagcagagtcgccgctaggcttggcccgaggggcataacgtaaagcggcggcttggaattgatgccgggcgacttgccggtagcccgactcattcccttgcccgccgatgtggcgaacgccggcagtcggagcaggccgatcgcggcgcacgcgcggcaaagtccgtccacgaaatccgtggcgtgacggaagtgccatttgtttgcgccgctcggcacctcatgcagcaggtagtcgaccgtgtgatcgggtgtttgatgctggtacgccgtgttttgatagaaccgcttaccgtccccgagcaagttaaagcagtcccggcgctcgtcgagtttcccaaaccaatccgccggaaaccgcccgtcggccaggattttgtccttttccgccagtccctctggattgccccggcaccaatacagaatcgccagcagaaaacgcaacaaggcgaccctgtccatcgggttcggggcggctatctggcgaatttcgcccgcccggccgagcgtatcacggataccaagccgacgcgccgtcccatcggcgaaaaggaccggaatccacgcctcatcgagcagattgaacgtctccatcccgccatccccttgtcatttggggccatggtcccgccacatggggactctttcgccttgccgtgactaacgacgccatcaggataccaccaatcggcaacgaagccaagcggttgtaagccgcacgaaatcctttccttgcaatgaatcatttgtacggttaaagtaatgtgtgtgcgtaatgcgctgcggagagtgaatcgccgatggcggaaaagggcaaatgggcgatcgtatacccagcgggttgtcggcctactgtctactttccac

SEQ ID NO: 680 - DNA, 8791 bp, Artificial Sequence
  Synthetic Oligonucleotide
aggcgatggccgttgccatcgcgccccttattcacatagacgtaacccgcctgcaccgtggcggagtccttgatgatgcagaagcccggcggttcatcctttccctccacgcgaacgcgccaatccgcaagccattcgatgagctggtgggtcggcaccggaacgcgtttccctttgccttccttgttggcccatttctccaatggctttccgtcggctcccagcgagcgcttggagagacgcttggtcgggttcgcaaggagtcggaatcgaagacgctgccccgtggtaaaactcggctcgaattgcttcttctcgggcggagccgcaaggaggtagggggcgttgtggaaggcgtagtcccagtttggctctgcggcggactgtacgacaagcatcgcccgcccaatgggttgcgggtcgatgcgaaaaaggaatcctgcctccaccttacgtcctacatggacttgctcggcaaagtcctccggtttgaatggcttgaggaagtgtgcgtcatgggatattcggtccttggatggaaaggccatacaaaggcgctgatgaacgtgataaaggtttcgcagccacagccggccgggacgagggcggtcgggattgctgccaacatcaatcaggagacaggacatgtacatcgctattccacctcctcagcggccaggcgccggcggcgcgtttccagggagcggaacttgatgatctcgccgcgcttctggatgatggtgtcgcgccaccttggttcttccgggttgatgcggtccaggcccatgccaaggccgtattcgatcatggtgacggcgtcgtggcagtagcggcagagggaccgcaaatcgtctttacgttcgttgccgcccgcgcggcggtacgtgatgtgctgcacggtggttgcgggagacttgcaaaaaacgcacaagtgatggtcgtcgtccagccgctccttgcgtcggtttttgtactcggtgttggagtagtccgctcttggtcggggaggcgcaggggcacggctctgtgccggctgagctgcaagcgttacgccgtcagccccgacgtgcaattggtggcgaatcacgaatcggggttggtgcgagggcgggtcgaacgtgacggggacgtcgtaccagacgagcgcatcatcgggcgcctccggctgctcttctgtcggcttccagtcgagcaggcattccacggcttgcggcgtgggatcgtccttcagccgccggcgccaggggaatgatttaagtgctgtaagtaggtccggaaaatcgccgtcgggatgctccagcaaagggcgggaaggcgggcagcactttctgccaaggtagagggtccacttgggggctttgactgcggcctcgatttcagcgatcaggctcggctcgccctgaagtgcaacgagaaaggaggcatcgcagagatattcgcggcgggtgagcatcgctccaggcttgcttccaccttcggccgtgcgcatcggcatgcccgcgcccacggtgtgataatcccaccatcggactcccggcacgtcgatgcggacgcccatgcgcagcgccccgagagtggtgagccaaccttcggcggcttcggaccgggagacgcccaaggccgcgcaaagcatcccgatcacacctgacttggtcggggcctcggatgttcgccgaatgacaaactttgattgctggtcgccccaggcctggagagcgccttcgaggcgaagaaagagggtgttggcgctcatcaggccacctccgagttcacaaccactttctgaacctcctcccagtcatggccggtttccttgacgaccgcccggatgagttcgtcaagagacctgatgttgtttcctgcaacaggaatttctttgttgtcctcaacaatggtcagaggatagcggagattgggcgagaaccagaaccgcttcgtgggcttgccgtatccggtgtcgatatcgtggatgtattggccaagttgcgccacgctctgcgatatgatgtctcgttcgtcttgggttactgccttggcaaaggcattggcgtaactgaggggtgtgttcctgatttcaaccagcattccatcgggaggattgtgggcggcgaaactgttctgcttgcccgtggggttgaccagcgcggctcctcgaatgaaagcgccgacagtatgggcggccagttccttattgcccttcagatttttgattagggtttcgaaatcaatcgaaaaatacttgtagaagcatgctgagccgaacattgcttcgtctacaaagcctgcgcccgcgtcttcgccaggcacatcatcggcggccacatagtagtcaacctccgggcgagccgcgtgggtagagatcgcgtgggcaacttgaagagcggcctcgactgtggtcttaagccccttccaaacgtcgccgcctttgggtttctctccggcttcttcctgtgaacccatcttcgctttctttggctccaacattctgccgcagagggccatgtccggcgcgttcgtatgccgcgcaattatttcggcaaattgcttggccaattcgtgatcgttcttgcttgcattacttttcaaaagttcggccatctcatttatggcttgtttgcttacgtaaacgagtccagcgcttttgtcatcggccacggaatccccgtcatcgcctttcttcccttttttttcttttggggcaatcccgcagagttccaatattgtcattgccttctcaaatgcgcctgaatcgggaccgccgggggcgatcaattgcgccaaacggcgcgtgcgttttgcgccgagcaactgcttgaactcatcgctcatgcggatactacgcttgaggcactggctggagatgcgggagcgcagtaccccgccgaaatagcaagtcttgggggcgcccaagtcgtcccggttcaggttggccgggctgtgattttgaatggcgtgaatttcaattagcatgaatgttctcctttcaagttttcaaaaaatcctcggcccacttgagccgggtggattcgcgttcccaaatggaaagatcgtttgtcagtctcacccagtcgagcttgaggtgtttgccagcgatgaggtcaagcgcccaatgcagagctggctcgattttatcaaccggcaaggtcagcatcctgtcgaacctttgcgcgacacggtctttctccgggtctttgtccttacggaaacgcccaagctgccaggcaagcgtctggccgggtgaatgctcgatcggccggaaggcgtacagttttgcaatcagccatgccacttcacggcggggcgcccgctgattcttcgcgcgcagcggccaccaaagccccgcgaacaggtcaaagccatcaacagattcatcaagcccccgatccgcgtggttgcggaggagcccgaggtcacccgatttcaaatgggccaggatttcgacgtatttctccgttggagttggagtcacttgttccctcccttcttccggccggccctcccggccgctgcggtatctggccgcatgttcggtcttacgttggcaatctcgcgtcgcctccggagcgcagcggttgtaaaacctggtgaaagcgatttagcgacggcggccatcatcggactatattcgcgggccgcctgttcccacgcgtcgccgccttgagaaatcaactcccctagcttctcggagaccgtcgtttcgacatggggacgaactgcggcgattgtgggaggaatttcaagatgttttcgggaagtccctctcggtttggctttgcgagcgagcttccagccttctttccgccacctctcaatcgtttcgacactctccgcgacctgccgatcatctagcgtactcgagaggggaacctcatactccatcgcttccaggtacttgtcgttcttcacggtggcgaagccgacgatccataagtttcttttgccattcgcctttttcccaccaagaattcccgccgctatctttgtccattggccagccgccgcgtcggttgcaccaagcgcatcgctgggtttaacgacatcctcgccgtcactgatggtgtgcgggtcgctccagacgcggccctgaccatcgtcatccgtctttgtgctcccgataccggcaaacacacattggcgtatcagaggctgtttacgcccgcatgagatgcagttggcttgaggttccaccggattgtccagccacacgcggcgcggcagccacgttaatcctataagcagcggaacattgccatgtttcggaaggcttagatctggcttttcccacgtgggcattcccaggtccgagtccgacactttccgccacgagaggcgcagggtttcggcgagcgagacgccgaccggcatgacataaacaggcggtttttggttaaggcccggcggcttgccgcgtccccctgacgtagcaaacagcggcaggcgcaacaaccccgcagcgcagcatgccggacataagccatctcttttgtctgttgaatgccggaagtgccaaacgttcgtgccagtgggcacctcttgcatcaggtagttggcggaaagttttctctcttttccagacttggcattgcactgatagaagcgcttcccatcgcccagaaggttgaaacagtctcgatggtccttgagtttcttgaaccaatccgagggaaaggaggagatcgagtcttcgccgtccggcggactctccttgcaccaataaagcaacacaagcaggaaacgcaggatcgccaaacggtccatgggattgctggcggcgatttggcgaatccggcctgcttgagaaagcgcctcaataacgcccacgcggtcgctatgcccgtattgccacagaacgggaatccacttttcttcgagcaggttatagttcatggcaccctcctcccttttccttcgcaaaacgggggcagttattcataaggtcatcgccatgcggggcatccagcacctagacacccggttattcacatcgttcatggggtgtctagggctaggcacaaaatcctcgcaaacgcatggagacgggggatactatagcaccattcagcagcctgcaatcgggtgccatccgatggatcaacgttacatccgtatgttacgtggatgccggctcaatctgatggatgaagtctgcgatcggtttctataaaggggcactccaacatttcgatcacgatgcggtatgttcagccgacaccggagcctgaactagaggcgctttgaaagttggagcggttttaacttggatggtgagccgtgggggaatcgaaccctcaacctactgattaagagttgttaatgaacgtagaatcaataacttatacggagtgataccgagttgtatggagcggtaaaagggccatgattagaactgccgcttacgtcttggtatcactcagtaccgctatgtactggtcacagacggtggtcacaggcggcaagcggggcttttggtgcttgcccctagctttccccttcccattcgctcaacgcattcagaattgccagcagacgcaggcgccgggtggtttatgcgcacacccgagaagtagcggttgaaacccgtccaaattagtgatacaacctgagcacacatcggaggggaaaatgcgcacaatgattcttgtcctagcctgcatgtggagacgttgccagtagagcaacatcacaggtgtataagggaggatgaacatggatgctatggaaatcaagactgtaattctgccgcaaggggtaaaggcgcaatctgaccgcaatgcacgccggtacgggcagattctgcgggagctgttgaagttgaaaccggcaaacaaggccgatgctgtgccggcgttggcggtgccgagaagctactggacccgcgagaccccgcggcagattcaactggcgatccaacgggcggcaaaacggcacaagctggaaatcaaggtgaatgctcatggcgaggataccgtgtatatctggaggcaaaaataacatgagctggttccgcaaatccgctacggcaacacgggcagaagtgcaagttgcgctggtaccggaagtgctgagtacaccggtaccggaagcgctgagcgcggttgtgccggtgccggaagcgcaggttgtgccggtaaacgcgccgcagatcgttgccccggatctgtccctccggccgcagagtttgcaggagtacgtggggcaggagcacataatcgcccggttaaaggtggcgcttcacgccgcccgcgcccgcaatgctgccctgcctcacgtgctgtttcacggggcgccgggactaggcaagaccagcatatccggcgtgctggcaaaagaaattggcggcagtatgatcgtcacgtccggcccggtgctcgaaaagagcggggatatcgtgtctccgcttctagagctcaagcctagagatgtgctgtttattgatgaaattcaccgcatacccgcgaaactggccgaggtgctgtacggggcgatggaggattttacggtggacatggcactggaattcggcaccgagtcagaagtgatgcatttccggctgccaccgtttactctggccggcgcgaccacgcgggccggggatctggcggcgccgctgagaatgcggtttgggttgatctgcaatatggagttctacagactggaagaactgaagcgcatcatcaccaggtcggcggcaatattgggcatcgggctgagaagcggggcagcggaggcgattgcgcagagagcaagggagacgccgagagtggcgaataatctgctgctgagaatgcgggactatgccgcaatggaggggctgaccagggtgacggcggaattgattgagcggtcaatggaggcggaggggattgatacacaggggttggagccgattgaccggaggtatatgggggagctgtgcgggacgtataagggcggcccggttggactcgtgactttggcagccagtttgcaggagacagagaagacgctgacggagttggttgagccgtatctcatgcgggccggactgttgagcaggaccggcaagggaagagtggcgacggagaaggcgaaatctcaatttggaggttcatagtgggggatgataagaaggtaacagcggtgagactggaagagtggatgccacgggaagccgagggcattccttgtccttgcggcggatatgctgatcgggtggacacgacacctgaagaaagggaagaaatacaggcgggcgggtcctccccctgttccccaggatgttgcgaccgggcgtttgtgtgccgtatttgcaaggcacggatgttcgggaccgcagaggctccagagagcagcgaggggtagtatggcaaccccggcactcgcactcatcccggcacagacctatagccctcaggctattgtcgccaactcaggccagaccgcctcgatgcgctttctggagttcttcacggtgaatctgcgcaaccggaacacccgcgccgcttacagtcacgccgtctcgcgctttctcgattggtgcgatctccgcaatgtgaccgtattgaaccaggtgcagccggttcacgtggccgggtatatcgagcagttgggccagagtgccagtgtacctactgccaagttgcacctggcggcgatccgggcgctgttcgactggctggtgaccggccagattgtgcccgccaatcccgcccaagctgtacggggaccgcggctgttcacgcgcaacggacagactccgatactgggcagtgcggagttgagggtattgctcgacgggattaataccgcgacgccgatagggttgcgggaccgggcgctgatcggcctcatgctcttcaccttcgcccgcgtgtctgcggcggtcaatctggagttggccgactacacactccgggacggcaagcgatgggtccggttgcaggaaaagcgcggtacggtgaaccagatgccgtgtcatcacgtattgcaagaatacctggacgcctacattgccgccacagggatcactcagggcagcctattcaggtccgcaagcaaggacggtatactgaccggcaaccccctcagccgcattgacgcttaccgcatcgtgcggcgggccatgaagcgggcggggctcggtaatagcgccgccggatgccatacgtttcgtgcaagcggcatcacggcttatctgaaagccggaggtgcgttggaagtggcgcaggtgatggcaggacatgcggactcgcgcacgacccggctgtatgaccgccggcaggatttggtgaaagcggaagaggtagagagaatagacatataagaaggcaaccaacagcaggaggatgaaatgagcgaccgtctgatacgcgaagcgaggcaccggtcggggctgggagtacgttcgccaagtcacatttgtggacggccctgggatggaagcggaggaagtattcagcgagtgcttccgcctgggtgagacctgccccgtgtgaccgctggcagcctgccggcaatcatgtgaagggcacccctgcgcctgctttaggcatttccctacagtctgcaaccccacccctgcaacctaaccctttctgcctgccctctgaccgccagcccaaaagcatgagcatgggtcggcatgtaatctatataaataagtatagattaacgtgcgcgtgtgcatgtgacctgccccccaaaaactggaccagtagcaatgtgagtcttccggggtataacaagcccaggaggacgagcgatgaaatcaaaccggttcacggaggaacagatcattgggattctgaagcaa

SEQ ID NO: 681 - DNA, 8790 bp, Artificial Sequence
  Synthetic Oligonucleotide
aggcgatggccgttgccatcgcgccccttattcacatagacgtaacccgcctgcaccgtggcggagtccttgatgatgcagaagcccggcggttcatcctttccctccacgcgaacgcgccaatccgcaagccattcgatgagctggtgggtcggcaccggaacgcgtttccctttgccttccttgttggcccatttctccaatggctttccgtcggctcccagcgagcgcttggagagacgcttggtcgggttcgcaaggagtcggaatcgaagacgctgccccgtggtaaaactcggctcgaattgcttcttctcgggcggagccgcaaggaggtagggggcgttgtggaaggcgtagtcccagtttggctctgcggcggactgtacgacaagcatcgcccgcccaatgggttgcgggtcgatgcgaaaaaggaatcctgcctccaccttacgtcctacatggacttgctcggcaaagtcctccggtttgaatggcttgaggaagtgtgcgtcatgggatattcggtccttggatggaaaggccatacaaaggcgctgatgaacgtgataaaggtttcgcagccacagccggccgggacgagggcggtcgggattgctgccaacatcaatcaggagacaggacatgtacatcgctattccacctcctcagcggccaggcgccggcggcgcgtttccagggagcggaacttgatgatctcgccgcgcttctggatgatggtgtcgcgccaccttggttcttccgggttgatgcggtccaggcccatgccaaggccgtattcgatcatggtgacggcgtcgtggcagtagcggcagagggaccgcaaatcgtctttacgttcgttgccgcccgcgcggcggtacgtgatgtgctgcacggtggttgcgggagacttgcaaaaaacgcacaagtgatggtcgtcgtccagccgctccttgcgtcggtttttgtactcggtgttggagtagtccgctcttggtcggggaggcgcaggggcacggctctgtgccggctgagctgcaagcgttacgccgtcagccccgacgtgcaattggtggcgaatcacgaatcggggttggtgcgagggcgggtcgaacgtgacggggacgtcgtaccagacgagcgcatcatcgggcgcctccggctgctcttctgtcggcttccagtcgagcaggcattccacggcttgcggcgtgggatcgtccttcagccgccggcgccaggggaatgatttaagtgctgtaagtaggtccggaaaatcgccgtcgggatgctccagcaaagggcgggaaggcgggcagcactttctgccaaggtagagggtccacttgggggctttgactgcggcctcgatttcagcgatcaggctcggctcgccctgaagtgcaacgagaaaggaggcatcgcagagatattcgcggcgggtgagcatcgctccaggcttgcttccaccttcggccgtgcgcatcggcatgcccgcgcccacggtgtgataatcccaccatcggactcccggcacgtcgatgcggacgcccatgcgcagcgccccgagagtggtgagccaaccttcggcggcttcggaccgggagacgcccaaggccgcgcaaagcatcccgatcacacctgacttggtcggggcctcggatgttcgccgaatgacaaactttgattgctggtcgccccaggcctggagagcgccttcgaggcgaagaaagagggtgttggcgctcatcaggccacctccgagttcacaaccactttctgaacctcctcccagtcatggccggtttccttgacgaccgcccggatgagttcgtcaagagacctgatgttgtttcctgcaacaggaatttctttgttgtcctcaacaatggtcagaggatagcggagattgggcgagaaccagaaccgcttcgtgggcttgccgtatccggtgtcgatatcgtggatgtattggccaagttgcgccacgctctgcgatatgatgtctcgttcgtcttgggttactgccttggcaaaggcattggcgtaactgaggggtgtgttcctgatttcaaccagcattccatcgggaggattgtgggcggcgaaactgttctgcttgcccgtggggttgaccagcgcggctcctcgaatgaaagcgccgacagtatgggcggccagttccttattgcccttcagatttttgattagggtttcgaaatcaatcgaaaaatacttgtagaagcatgctgagccgaacattgcttcgtctacaaagcctgcgcccgcgtcttcgccaggcacatcatcggcggccacatagtagtcaacctccgggcgagccgcgtgggtagagatcgcgtgggcaacttgaagagcggcctcgactgtggtcttaagccccttccaaacgtcgccgcctttgggtttctctccggcttcttcctgtgaacccatcttcgctttctttggctccaacattctgccgcagagggccatgtccggcgcgttcgtatgccgcgcaattatttcggcaaattgcttggccaattcgtgatcgttcttgcttgcattacttttcaaaagttcggccatctcatttatggcttgtttgcttacgtaaacgagtccagcgcttttgtcatcggccacggaatccccgtcatcgcctttcttcccttttttttcttttggggcaatcccgcagagttccaatattgtcattgccttctcaaatgcgcctgaatcgggaccgccgggggcgatcaattgcgccaaacggcgcgtgcgttttgcgccgagcaactgcttgaactcatcgctcatgcggatactacgcttgaggcactggctggagatgcgggagcgcagtaccccgccgaaatagcaagtcttgggggcgcccaagtcgtcccggttcaggttggccgggctgtgattttgaatggcgtgaatttcaattagcatgaatgttctcctttcaagttttcaaaaaatcctcggcccacttgagccgggtggattcgcgttcccaaatggaaagatcgtttgtcagtctcacccagtcgagcttgaggtgtttgccagcgatgaggtcaagcgcccaatgcagagctggctcgattttatcaaccggcaaggtcagcatcctgtcgaacctttgcgcgacacggtctttctccgggtctttgtccttacggaaacgcccaagctgccaggcaagcgtctggccgggtgaatgctcgatcggccggaaggcgtacagttttgcaatcagccatgccacttcacggcggggcgcccgctgattcttcgcgcgcagcggccaccaaagccccgcgaacaggtcaaagccatcaacagattcatcaagcccccgatccgcgtggttgcggaggagcccgaggtcacccgatttcaaatgggccaggatttcgacgtatttctccgttggagttggagtcacttgttccctcccttcttccggccggccctcccggccgctgcggtatctggccgcatgttcggtcttacgttggcaatctcgcgtcgcctccggagcgcagcggttgtaaaacctggtgaaagcgatttagcgacggcggccatcatcggactatattcgcgggccgcctgttcccacgcgtcgccgccttgagaaatcaactcccctagcttctcggagaccgtcgtttcgacatggggacgaactgcggcgattgtgggaggaatttcaagatgttttcgggaagtccctctcggtttggctttgcgagcgagcttccagccttctttccgccacctctcaatcgtttcgacactctccgcgacctgccgatcatctagcgtactcgagaggggaacctcatactccatcgcttccaggtacttgtcgttcttcacggtggcgaagccgacgatccataagtttcttttgccattcgcctttttcccaccaagaattcccgccgctatctttgtccattggccagccgccgcgtcggttgcaccaagcgcatcgctgggtttaacgacatcctcgccgtcactgatggtgtgcgggtcgctccagacgcggccctgaccatcgtcatccgtctttgtgctcccgataccggcaaacacacattggcgtatcagaggctgtttacgcccgcatgagatgcagttggcttgaggttccaccggattgtccagccacacgcggcgcggcagccacgttaatcctataagcagcggaacattgccatgtttcggaaggcttagatctggcttttcccacgtgggcattcccaggtccgagtccgacactttccgccacgagaggcgcagggtttcggcgagcgagacgccgaccggcatgacataaacaggcggtttttggttaaggcccggcggcttgccgcgtccccctgacgtagcaaacagcggcaggcgcaacaaccccgcagcgcagcatgccggacataagccatctcttttgtctgttgaatgccggaagtgccaaacgttcgtgccagtgggcacctcttgcatcaggtagttggcggaaagttttctctcttttccagacttggcattgcactgatagaagcgcttcccatcgcccagaaggttgaaacagtctcgatggtccttgagtttcttgaaccaatccgagggaaaggaggagatcgagtcttcgccgtccggcggactctccttgcaccaataaagcaacacaagcaggaaacgcaggatcgccaaacggtccatgggattgctggcggcgatttggcgaatccggcctgcttgagaaagcgcctcaataacgcccacgcggtcgctatgcccgtattgccacagaacgggaatccacttttcttcgagcaggttatagttcatggcaccctcctcccttttccttcgcaaaacgggggcagttattcataaggtcatcgccatgcggggcatccagcacctagacacccggttattcacatcgttcatggggtgtctagggctaggcacaaaatcctcgcaaacgcatggagacgggggatactatagcaccattcagcagcctgcaatcgggtgccatccgatggatcaacgttacatccgtatgttacgtggatgccggctcaatctgatggatgaagtctgcgatcggtttctataaaggggcactccaacatttcgatcacgatgcggtatgttcagccgacaccggagcctgaactagaggcgctttgaaagttggagcggttttaacttggatggtgagccgtgggggaatcgaaccctcaacctactgattaagagttgttaatgaacgtagaatcaataacttatacggagtgataccgagttgtatggagcggtaaaagggccatgattagaactgccgcttacgtcttggtatcactcagtaccgctatgtactggtcacagacggtggtcacaggcggcaagcggggcttttggtgcttgcccctagctttccccttcccattcgctcaacgcattcagaattgccagcagacgcaggcgccgggtggtttatgcgcacacccgagaagtagcggttgaaacccgtccaaattagtgatacaacctgagcacacatcggaggggaaaatgcgcacaatgattcttgtcctagcctgcatgtggagacgttgccagtagagcaacatcacaggtgtataagggaggatgaacatggatgctatggaaatcaagactgtaattctgccgcaaggggtaaaggcgcaatctgaccgcaatgcacgccggtacgggcagattctgcgggagctgttgaagttgaaaccggcaaacaaggccgatgctgtgccggcgttggcggtgccgagaagctactggacccgcgagaccccgcggcagattcaactggcgatccaacgggcggcaaaacggcacaagctggaaatcaaggtgaatgctcatggcgaggataccgtgtatatctggaggcaaaaataacatgagctggttccgcaaatccgctacggcaacacgggcagaagtgcaagttgcgctggtaccggaagtgctgagtacaccggtaccggaagcgctgagcgcggttgtgccggtgccggaagcgcaggttgtgccggtaaacgcgccgcagatcgttgccccggatctgtccctccggccgcagagtttgcaggagtacgtggggcaggagcacataatcgcccggttaaaggtggcgcttcacgccgcccgcgcccgcaatgctgccctgcctcacgtgctgtttcacggggcgccgggactaggcaagaccagcatatccggcgtgctggcaaaagaaattggcggcagtatgatcgtcacgtccggcccggtgctcgaaaagagcggggatatcgtgtctccgcttctagagctcaagcctagagatgtgctgtttattgatgaaattcaccgcatacccgcgaaactggccgaggtgctgtacggggcgatggaggattttacggtggacatggcactggaattcggcaccgagtcagaagtgatgcatttccggctgccaccgtttactctggccggcgcgaccacgcgggccggggatctggcggcgccgctgagaatgcggtttgggttgatctgcaatatggagttctacagactggaagaactgaagcgcatcatcaccaggtcggcggcaatattgggcatcgggctgagaagcggggcagcggaggcgattgcgcagagagcaagggagacgccgagagtggcgaataatctgctgctgagaatgcgggactatgccgcaatggaggggctgaccagggtgacggcggaattgattgagcggtcaatggaggcggaggggattgatacacaggggttggagccgattgaccggaggtatatgggggagctgtgcgggacgtataagggcggcccggttggactcgtgactttggcagccagtttgcaggagacagagaagacgctgacggagttggttgagccgtatctcatgcgggccggactgttgagcaggaccggcaagggaagagtggcgacggagaaggcgaaatctcaatttggaggttcatagtgggggatgataagaaggtaacagcggtgagactggaagagtggatgccacgggaagccgagggcattccttgtccttgcggcggatatgctgatcgggtggacacgacacctgaagaaagggaagaaatacaggcgggcgggtcctccccctgttccccaggatgttgcgaccgggcgtttgtgtgccgtatttgcaaggcacggatgttcgggaccgcagaggctccagagagcagcgaggggtagtatggcaaccccggcactcgcactcatcccggcacagacctatagccctcaggctattgtcgccaactcaggccagaccgcctcgatgcgctttctggagttcttcacggtgaatctgcgcaaccggaacacccgcgccgcttacagtcacgccgtctcgcgctttctcgattggtgcgatctccgcaatgtgaccgtattgaaccaggtgcagccggttcacgtggccgggtatatcgagcagttgggccagagtgccagtgtacctactgccaagttgcacctggcggcgatccgggcgctgttcgactggctggtgaccggccagattgtgcccgccaatcccgcccaagctgtacggggaccgcggctgttcacgcgcaacggacagactccgatactgggcagtgcggagttgagggtattgctcgacgggattaataccgcgacgccgatagggttgcgggaccgggcgctgatcggcctcatgctcttcaccttcgcccgcgtgtctgcggcggtcaatctggagttggccgactacacactccgggacggcaagcgatgggtccggttgcaggaaaagcgcggtacggtgaaccagatgccgtgtcatcacgtattgcaagaatacctggacgcctacattgccgccacagggatcactcagggcagcctattcaggtccgcaagcaaggacggtatactgaccggcaaccccctcagccgcattgacgcttaccgcatcgtgcggcgggccatgaagcgggcggggctcggtaatagcgccgccggatgccatacgtttcgtgcaagcggcatcacggcttatctgaaagccggaggtgcgttggaagtggcgcaggtgatggcaggacatgcggactcgcgcacgacccggctgtatgaccgccggcaggatttggtgaaagcggaagaggtagagagaatagacatataagaaggcaaccaacagcaggaggatgaaatgagcgaccgtctgatacgcgaagcgaggcaccggtcggggctgggagtacgttcgccaagtcacatttgtggacggccctgggatggaagcggaggaagtattcagcgagtgcttccgcctgggtgagacctgccccgtgtgaccgctggcagcctgccggcaatcatgtgaagggcacccctgcgcctgctttaggcatttccctacagtctgcaaccccacccctgcaacctaaccctttctgcctgccctctgaccgccagcccaaaagcatgagcatgggtcggcatgtaatctatataaataagtatagattaacgtgcgcgtgtgcatgtgacctgccccccaaaaactggaccagtagcaatgtgagtcttccggggtataacaagcccaggaggacgagcgatgaaatcaaaccggttcacggaggaacagatcattgggattctgaagca

SEQ ID NO: 682 - DNA, 8783 bp, Artificial Sequence
  Synthetic Oligonucleotide
tgtattccaccccgccgtagctataggaaagggtgaagctgccccggggcgggatggccaccatggtgctgaacacgggaagttccggctggccgggttcgcaggtgccaagcgcgccttccatgcggatttcccggacgctttggcctccgtcttcgccggcggaaaagctgagggcgggcacggaaaccgcgagtttaagctggctgccggtagaccgcgcgaccgagaacgggcttgctgtttcggcgttcagagcggcaaggcagagcagcgccaacatggtgagtgacaggatccttttcattgtatcatccttgtatcgtcaaatcaaaaacctggagttgaggctccaggttatggttgcgttttttgcataaaggttttcttttactttgttcatttgatggcatagatcaggacaccctggtcccgggaggctacgaccagttttcccttgttgaatttggcgttgttggtgtagccggcggatcgaaggttctgcttcaggatgggactgctgggattgctgatgtcaaagaggtagatgccgccactgcctgagctaacggcggccagactgcccataatgtcgatgctggtggcgtagccggtggtgtcgaaggtatgcaccagcaagggttcggcgggcgcaccgatgttcaccacgttcaggccgccctggcggctggcgacgtaggcataattccccgcgaccttcacctgcagggcctggccggggagcgcgatttcgctcaccttctctttggtggcgcggtcgtaaatgaccaatccgcgctgttcggcggccacatagatgtagttgtccgtggcgtccattcccgaagcggtggcgggagtggtgatcacgtaatctgtgcccagatagagtccgccgttgtagcgaacgtacatcaggttgcgtccggctccgaaaaagccctggacgatattgtcatccacaggggcctcaatggcgctgaaagaaatcgattgcaggccgtcagtgccgccggtgatggaatctatcagcctgagcgaatcgggatcggagtaatcgacaatacggattttgtccgcgctcacatactcgcccaggaagagcagtttgtgctcgccgactgccgagatattgcggatgttcaccagggtggcgtccgcgctggggggatagatatccgtccaccaatgctgagagtaatccgtggcatcgatcacggaaatgccgccctggtcctgggccacaaaaatgctctcgttgtcaaaagacaggtccacgggattgccgaccacctgcacctgcttgagcaggctgaggacgtcctggtcctcccaggcgggattgcgccgcgagcatccgcaaaggatgagcagcaccgccgcgaacagtacgatctgctttttcaccatgttcaaatcctcccaggggaataaaatttatgattatgcatatagtagatgcaagaatcgttccgaatctgccacaataactgcggattcctttcccaaagcctttttcgcccacggacaggccgtttgccccttcccactaacatcccgtaaacctccccttaaattcccgcccggccaatgggaactcagcgggaagtattttagatgtgtatgggatggggcaaatggggcttctattgatagtgggtatcaaaatgggaggaagtccacaaattgcgcgaattcatacgaattgcttttccagttacgctaccaactgtggtagataacctaaaataaaggacttacttcccaatcgggcaagtaatccatatgtttggagcccgaaggtcccagaacgattggccgacggggacatcgaccttcctgacgctggcgtcgagcgaggcacgagcatggacgccagcaacatctcctgtagtccatactcgcaagctcgctgcactccaggctcaccaacgttggaaggcaaattcacaaattcacaaccggtaaatatggcttgtgaatttgcaacctgctgatagacgggtaattatgaggctaattcacaaaaaaggggtctcttatacatccgcggaagccgattgtaaacaggatatgatgtatccacgctaccagtctataatacatatagaaatagtatatataatatataatagtattatatattattatatattgatattatatcatctctaccttcccttcatctcttgtttgcggcatgagccactgcaaaccggcattctcccctggtccggctggatataagagataagcgtattttgtgaatttgtcccccaactcactgtgccacaataacacacggattcacaagccatatttaccggttgtgaatttgtgaatctgaccttgccggccttaaggaagtttgaaattagagccctattttggacttgacaaattattccttggtaaatttggtgtataatagctatggggcataatgatgttagcctgtggaacggcctctgtaaaggatcaacaagctatcaaccctccccatgcgacaggagcttcaatgtattataatttgacagacaaaccctggatcagtgtgctacagcttgacgggcattctgccaggctcggcctggctgaggtcctgcgaaaagcacacacactgcgtttggcttacggcaatccgatggaccgcatgtccgttttccgtttcctcctcgccctgggctattggtgttttgccaatacaaaacaagcgccggtatcagataagccactgcctcaggcatggacggactggcttgaacaaaaccaagaatatttcgaattgttcggtgatggccccagattctaccaatccccaggaacatccagaatacgccccagcacggaccttatccacgagcttcccacggcaaacaatttctggcacttccgccatgtgaccgatttcatcgatggcatttgcccagcttgctgcgttaccggtctgctgcgcctgccactctttaccaccgtaggcggcagcggaatcggagccggcatcaacagaactcctcccttctatgccatctggcagggtgatagtctgtcggaatcgatattcctgaattgggaacccacttcccggttgggtgttcctgcctggctgaacccgtttggatcccaaaacgagaaggatgtagccttgctgactggcctcacctggctgccccgcaaggtattcctgcttggcccggtgtcagacggagcaaaatgcagcgcctgcggagaagagcatgagcctctggtctatgcctgcaacaatgaggcggtgaaagtgcctccgaaccttgtctggaacgaccctcacgcgatttaccgggatgacaataatggcctgactgcccaggtggctctgatgtccggggacaaatacactttcgctaacagggattggcataaacccctggtcggcttcttacgggcgaaaggcatgtctcggaccgccacgctgtttttagtgggcttcacaagcgttcaagccaaatgtgtggacgtttgggaaaagaccattgccctatccggaaaaacaagctccgaggaactgctggaccagatatccgaaagagcctactccctgcacaggatgaggaaacaagaccgccggggcgattacaaggaatccgtgggaatcaccgccgtggcggacatcatcccgcacgtagagcatcgggttgacgtccattcgggcgagatggtggaaaacagcggcaatgtctggcaggaagcggatgaagattacggattcttcatgaagcgttttgccgtttctctagtgccggaaattacggttgccgccaagcttgaacgagaacaactggctcggcgcaagccctggcccctaaaaccaaaatcaattaaaaaaccttcatccggaggcgataatgaatgagagcaccgtgaaatttgttcggagcctgggcgaactcaaagagggcgacctgggcttgctcagaaagctcaggggtcgccgtctggatgaatccctgccgggtttcgacctgttttccggcctgtggtggccactccgcagtataagccccaaaacccccaggcggaaggtggtctggctagtcaccaagcttttcgcggaattccgctttgagcaaaagaaaggcgccagcctgccttggctcatgggcagaatatgccgtggacttaaagaagaaaaagagttcccacgtgttttagccaggttcgaccgcttgctcacgctcgagttgaaccaactggaggaaccgctggcgcaagtgctcgcgattttaaaaagacatgacattgccagtctggactgggttgccctcatcgatgacctctccgcttgggaacgggaatcaaacagagcgatatggtcagacacatttatttcagcatttaataatcagcaaggaggaatcaaatgttgattgaaatacacatgatccaaaaccacagcccggccaacctgaaccgggacgacctgggcgcgcccaagacctgttatttcggtggggtgttgcggtcccgcatctccagccagtgcctaaagcggagcatcaggatgagcgatgaattcaaaaacttgctcgggggtatccgtacccgtcggttggccgagttgattacaaaagctacaggacaggactgcaggaatcaggcagaggaagttctgaacaaagccggtttgaaacacgaaaacggacatagtaagatgctggtgttcatgacccggaacaagatcgatgcccttgctcaaattgtcaccagcgaaggcctgagtgttgcagagaaagccaagaaagcggcagatgtaatatcgggggcaatacattcccctgacatcgctctgtgcggaagaatgctcgagcccgataccaaggacaagaacacagacaaggtcaagtgggaaaataccactgttgaagcagccctgcaggtgtcgcacgccatttcaacccacatcgcccgcccagaaatagattactatgtagcagctgatgacgagcctggcgacgacacaggtgctggattcatagacgaggcgatgtttgcttcggcctgtttctacaaatattactcaattgattggaataccttgataatcaacctccagggtaatgaaaagttggcagctcatactgtcggagcctttatccaggccgctgcactcactaatcccagcggaaagcagaacagctttgccgcacataaccttcccgatggaatattggtagaaataaaagagacacctgtcagctatgcaaatgcctttgtgcgaccggtgggaatcgttaaggattctgacttggtagaacaaagcattggccaactggccaactatgtgaaggatataagtgccggtttcttccctggacagatgaaaggcaacgctctgtggttctcgcccaatggacgttatcccctaaagcctcaacagggcacgctggacataaagccagtttgcaacctgctagaacttgttcgcgaagcagttgagatgttgggttttgaatgggatgatgtaaaaaacgagaaagtagagagttgaaatgtcttctccgcctaataccctgttcctgagattggaggctccccttcaggcctggggaagcaatgaggccaaattcgccgtgcgcaggacagccgacgcgcccaccaaatccggagtggcaggcctgctctgcgctgccctgggaatcagccgggccgaagccggacagtattggctgggtgaaattgccaaattgcgcatgggggtgcggatagaccgcccgggcatccgctggtgggattaccatactgtgggagcggagcagaagctgcgcatttctgacctgaaaatgcccaacggcctagttctggttggcactgccctggccaaaaacctgggcgcggacaagatcaaatccaaacccggggctttgctctcccgacgcgagtatttggctgatgccagcttcctggttgcgctccagggtgaaccggatatcgtggcacaactggctgaagcgctgaaaaaaccagtctggacgctttatctggggcgaaaatcctgtcccccctcccgtccggtggatgaacacccgccagggttttatgccagtctgaaagaggctttgcggtcgatcccggcgcaactgagggaaaaaggcgaaccgatacctgacagtgttccctgtgtgctcgactgggttccggcccatgatgacgtgcacgctccgccgaacgccgaagcgcattacgacgtgccggtgtcctttgagcctccccaccacttgccccggctggtgatccgctgtaacctgccattggaccgcaacttcgaggcagagaccgtgctttccggcaaagcctggcaaccgccccgcaaccgggcaaattacgacaatcctgaatacaaaagggtccgcgctgagcgtttggtgatggacaatgccgcctgcatgttctgcaaggcacccgccactactgtgcagcacgtgaattaccgacgcgccggaggcagcgagaagccggaggacttgcgcgccctctgccgcctctgccacgatgcctgcaccatgctggaatatggcagcggcatgaccatggaccgcatagatccctgtgaccccgcctggcgtgagcgcatcttggccaaacgcgaggaaataatcaaattccgctcgctggagcagcgcaggcgcaaactcgatccgaaggaggagaacggatgatgtatctatcccaactgctcatcgacacaggcggcaaccctgaccggccaaggcccgggcgcttgtggctgaacaatatctataatgtccaccggcggctcagcatggctttccccatgcgcaagcgcaaggaaggagacccgaggtttctgcagccctttgaccccgcagattttgaaaagcgccagttcctctttcgggtggacaacaacaccgatggagaaaatcaaagggcgatggttttggtgcagtcgtccctgccgccggattgggactgggctttccagaatgccacgggatttttggcagcccctccccaggttaaggaatacgatccccagttctcagcaggtcagcggctgcgcttccgcatcctcgtgaatgccagtgtcaaacgcaaaatcgacgagttgcgggaaggacccggaggaaaggaaaaaacgggaagggttctgcacaaacgggtcgcccttacctgggacacaaattccaacccaaaggatgcggtggcgcaatggtttgccgccaaggctggcagactgggcttcacgcccggggagaccgaactggtaagcctgggctgggtatacggttccaaaccggagccccggggaaattcgccccggcgtgagaacgaataccgtcccctgagataccgttccgccctgctggaaggttatctgacagtggatgatgcctttctgttccgggaagccttggaaaaaggtatcggcagcgccaaaggaatgggcttcggcctcctttccgtggttccggcaagtgatgcgtaacagagaccttcacctaatgccaaaaatgcgggaccgcttcacctatctctatgtggagcatgccaaaatagacaaagaacaacaggcaatcgcctttcacgatgccatgggctccactcctgttccctgcgctggactggccctgctgatgctggggccaggcgtatccatcacccatgcggccatccttgttttagcagaatgcggctgtttggtggcttgggtgggggaacagggagtccgcttttactcatccgggacagggaccacccgtagttccgccaaccttatgcgtcaggctgccgcctggtcaaatcgagatacgcatctgcggatagttcgcagaatgtatgaattgaggttcaaggaaaaactggacccaaccctctctcttgaacagataaggggaaaagagggagcgagagtacgggatacctatttcagactttcaaaagaattcgatgtgcccatgagtgcgaggaattacgacaggagcaactggaataaaaccgaccccatcaacagagccctgtccgttgccaattcctgtctctatggcatctgccacgccgcgatagtggccgctggctattcacctgccctgggtttcgttcatactggcaaacaactgtcatttgtttatgacattgccgatctttataaaatggaaacctccgtgcccgcggctttcatagccacagccgcaggggtcgataacctggacagaaggacacgcattgcctgccgtgaccagttctatcaatttggtctgctaaagaagatagtggccgacattcacgcccttttcggtattctggaaacttcggacgatgagccagaccttgctgatgtcgatccagccgtgccaggcgggctttggaacccagatgataaagtgagccccggcggcttgtcatggggtctggatgatcctggaggccatgatgatggttctggtgcttgaaaaagttccctctggcctgagaggagaaattacacgctggctcctcgaaatcaaggctggagtatttgtcggtcaggtatcggccatgataagggaaaagctgtgggacaaggccaggtctggttgtgccggtggaacttgtatcatgatttacagcaagcattgcgaacaaggctttggaattgagttttggggtgccgcggaaaggatagtgacagaatgggaaggattgaaattgatgaccaagcatccgtgatccatacttgaagcctgttcaatggcctcaaagcgtctactttcgaagtgtgttccccacctgcgtgggggtgaacc

SEQ ID NO: 683 - DNA, 8768 bp, Artificial Sequence
  Synthetic Oligonucleotide
tgcttcagaatcccaatgatctgttcctccgtgaaccggtttgatttcatcgctcgtcctcctgggcttgttataccccggaagactcacattgctactggtccagtttttggggggcaggtcacatgcacacgcgcacgttaatctatacttatttatatagattacatgccgacccatgctcatgcttttgggctggcggtcagagggcaggcagaaagggttaggttgcaggggtggggttgcagactgtagggaaatgcctaaagcaggcgcaggggtgcccttcacatgattgccggcaggctgccagcggtcacacggggcaggtctcacccaggcggaagcactcgctgaatacttcctccgcttccatcccagggccgtccacaaatgtgacttggcgaacgtactcccagccccgaccggtgcctcgcttcgcgtatcagacggtcgctcatttcatcctcctgctgttggttgccttcttatatgtctattctctctacctcttccgctttcaccaaatcctgccggcggtcatacagccgggtcgtgcgcgagtccgcatgtcctgccatcacctgcgccacttccaacgcacctccggctttcagataagccgtgatgccgcttgcacgaaacgtatggcatccggcggcgctattaccgagccccgcccgcttcatggcccgccgcacgatgcggtaagcgtcaatgcggctgagggggttgccggtcagtataccgtccttgcttgcggacctgaataggctgccctgagtgatccctgtggcggcaatgtaggcgtccaggtattcttgcaatacgtgatgacacggcatctggttcaccgtaccgcgcttttcctgcaaccggacccatcgcttgccgtcccggagtgtgtagtcggccaactccagattgaccgccgcagacacgcgggcgaaggtgaagagcatgaggccgatcagcgcccggtcccgcaaccctatcggcgtcgcggtattaatcccgtcgagcaataccctcaactccgcactgcccagtatcggagtctgtccgttgcgcgtgaacagccgcggtccccgtacagcttgggcgggattggcgggcacaatctggccggtcaccagccagtcgaacagcgcccggatcgccgccaggtgcaacttggcagtaggtacactggcactctggcccaactgctcgatatacccggccacgtgaaccggctgcacctggttcaatacggtcacattgcggagatcgcaccaatcgagaaagcgcgagacggcgtgactgtaagcggcgcgggtgttccggttgcgcagattcaccgtgaagaactccagaaagcgcatcgaggcggtctggcctgagttggcgacaatagcctgagggctataggtctgtgccgggatgagtgcgagtgccggggttgccatactacccctcgctgctctctggagcctctgcggtcccgaacatccgtgccttgcaaatacggcacacaaacgcccggtcgcaacatcctggggaacagggggaggacccgcccgcctgtatttcttccctttcttcaggtgtcgtgtccacccgatcagcatatccgccgcaaggacaaggaatgccctcggcttcccgtggcatccactcttccagtctcaccgctgttaccttcttatcatcccccactatgaacctccaaattgagatttcgccttctccgtcgccactcttcccttgccggtcctgctcaacagtccggcccgcatgagatacggctcaaccaactccgtcagcgtcttctctgtctcctgcaaactggctgccaaagtcacgagtccaaccgggccgcccttatacgtcccgcacagctcccccatatacctccggtcaatcggctccaacccctgtgtatcaatcccctccgcctccattgaccgctcaatcaattccgccgtcaccctggtcagcccctccattgcggcatagtcccgcattctcagcagcagattattcgccactctcggcgtctcccttgctctctgcgcaatcgcctccgctgccccgcttctcagcccgatgcccaatattgccgccgacctggtgatgatgcgcttcagttcttccagtctgtagaactccatattgcagatcaacccaaaccgcattctcagcggcgccgccagatccccggcccgcgtggtcgcgccggccagagtaaacggtggcagccggaaatgcatcacttctgactcggtgccgaattccagtgccatgtccaccgtaaaatcctccatcgccccgtacagcacctcggccagtttcgcgggtatgcggtgaatttcatcaataaacagcacatctctaggcttgagctctagaagcggagacacgatatccccgctcttttcgagcaccgggccggacgtgacgatcatactgccgccaatttcttttgccagcacgccggatatgctggtcttgcctagtcccggcgccccgtgaaacagcacgtgaggcagggcagcattgcgggcgcgggcggcgtgaagcgccacctttaaccgggcgattatgtgctcctgccccacgtactcctgcaaactctgcggccggagggacagatccggggcaacgatctgcggcgcgtttaccggcacaacctgcgcttccggcaccggcacaaccgcgctcagcgcttccggtaccggtgtactcagcacttccggtaccagcgcaacttgcacttctgcccgtgttgccgtagcggatttgcggaaccagctcatgttatttttgcctccagatatacacggtatcctcgccatgagcattcaccttgatttccagcttgtgccgttttgccgcccgttggatcgccagttgaatctgccgcggggtctcgcgggtccagtagcttctcggcaccgccaacgccggcacagcatcggccttgtttgccggtttcaacttcaacagctcccgcagaatctgcccgtaccggcgtgcattgcggtcagattgcgcctttaccccttgcggcagaattacagtcttgatttccatagcatccatgttcatcctcccttatacacctgtgatgttgctctactggcaacgtctccacatgcaggctaggacaagaatcattgtgcgcattttcccctccgatgtgtgctcaggttgtatcactaatttggacgggtttcaaccgctacttctcgggtgtgcgcataaaccacccggcgcctgcgtctgctggcaattctgaatgcgttgagcgaatgggaaggggaaagctaggggcaagcaccaaaagccccgcttgccgcctgtgaccaccgtctgtgaccagtacatagcggtactgagtgataccaagacgtaagcggcagttctaatcatggcccttttaccgctccatacaactcggtatcactccgtataagttattgattctacgttcattaacaactcttaatcagtaggttgagggttcgattcccccacggctcaccatccaagttaaaaccgctccaactttcaaagcgcctctagttcaggctccggtgtcggctgaacataccgcatcgtgatcgaaatgttggagtgcccctttatagaaaccgatcgcagacttcatccatcagattgagccggcatccacgtaacatacggatgtaacgttgatccatcggatggcacccgattgcaggctgctgaatggtgctatagtatcccccgtctccatgcgtttgcgaggattttgtgcctagccctagacaccccatgaacgatgtgaataaccgggtgtctaggtgctggatgccccgcatggcgatgaccttatgaataactgcccccgttttgcgaaggaaaagggaggagggtgccatgaactataacctgctcgaagaaaagtggattcccgttctgtggcaatacgggcatagcgaccgcgtgggcgttattgaggcgctttctcaagcaggccggattcgccaaatcgccgccagcaatcccatggaccgtttggcgatcctgcgtttcctgcttgtgttgctttattggtgcaaggagagtccgccggacggcgaagactcgatctcctcctttccctcggattggttcaagaaactcaaggaccatcgagactgtttcaaccttctgggcgatgggaagcgcttctatcagtgcaatgccaagtctggaaaagagagaaaactttccgccaactacctgatgcaagaggtgcccactggcacgaacgtttggcacttccggcattcaacagacaaaagagatggcttatgtccggcatgctgcgctgcggggttgttgcgcctgccgctgtttgctacgtcagggggacgcggcaagccgccgggccttaaccaaaaaccgcctgtttatgtcatgccggtcggcgtctcgctcgccgaaaccctgcgcctctcgtggcggaaagtgtcggactcggacctgggaatgcccacgtgggaaaagccagatctaagccttccgaaacatggcaatgttccgctgcttataggattaacgtggctgccgcgccgcgtgtggctggacaatccggtggaacctcaagccaactgcatctcatgcgggcgtaaacagcctctgatacgccaatgtgtgtttgccggtatcgggagcacaaagacggatgacgatggtcagggccgcgtctggagcgacccgcacaccatcagtgacggcgaggatgtcgttaaacccagcgatgcgcttggtgcaaccgacgcggcggctggccaatggacaaagatagcggcgggaattcttggtgggaaaaaggcgaatggcaaaagaaacttatggatcgtcggcttcgccaccgtgaagaacgacaagtacctggaagcgatggagtatgaggttcccctctcgagtacgctagatgatcggcaggtcgcggagagtgtcgaaacgattgagaggtggcggaaagaaggctggaagctcgctcgcaaagccaaaccgagagggacttcccgaaaacatcttgaaattcctcccacaatcgccgcagttcgtccccatgtcgaaacgacggtctccgagaagctaggggagttgatttctcaaggcggcgacgcgtgggaacaggcggcccgcgaatatagtccgatgatggccgccgtcgctaaatcgctttcaccaggttttacaaccgctgcgctccggaggcgacgcgagattgccaacgtaagaccgaacatgcggccagataccgcagcggccgggagggccggccggaagaagggagggaacaagtgactccaactccaacggagaaatacgtcgaaatcctggcccatttgaaatcgggtgacctcgggctcctccgcaaccacgcggatcgggggcttgatgaatctgttgatggctttgacctgttcgcggggctttggtggccgctgcgcgcgaagaatcagcgggcgccccgccgtgaagtggcatggctgattgcaaaactgtacgccttccggccgatcgagcattcacccggccagacgcttgcctggcagcttgggcgtttccgtaaggacaaagacccggagaaagaccgtgtcgcgcaaaggttcgacaggatgctgaccttgccggttgataaaatcgagccagctctgcattgggcgcttgacctcatcgctggcaaacacctcaagctcgactgggtgagactgacaaacgatctttccatttgggaacgcgaatccacccggctcaagtgggccgaggattttttgaaaacttgaaaggagaacattcatgctaattgaaattcacgccattcaaaatcacagcccggccaacctgaaccgggacgacttgggcgcccccaagacttgctatttcggcggggtactgcgctcccgcatctccagccagtgcctcaagcgtagtatccgcatgagcgatgagttcaagcagttgctcggcgcaaaacgcacgcgccgtttggcgcaattgatcgcccccggcggtcccgattcaggcgcatttgagaaggcaatgacaatattggaactctgcgggattgccccaaaagaaaaaaaagggaagaaaggcgatgacggggattccgtggccgatgacaaaagcgctggactcgtttacgtaagcaaacaagccataaatgagatggccgaacttttgaaaagtaatgcaagcaagaacgatcacgaattggccaagcaatttgccgaaataattgcgcggcatacgaacgcgccggacatggccctctgcggcagaatgttggagccaaagaaagcgaagatgggttcacaggaagaagccggagagaaacccaaaggcggcgacgtttggaaggggcttaagaccacagtcgaggccgctcttcaagttgcccacgcgatctctacccacgcggctcgcccggaggttgactactatgtggccgccgatgatgtgcctggcgaagacgcgggcgcaggctttgtagacgaagcaatgttcggctcagcatgcttctacaagtatttttcgattgatttcgaaaccctaatcaaaaatctgaagggcaataaggaactggccgcccatactgtcggcgctttcattcgaggagccgcgctggtcaaccccacgggcaagcagaacagtttcgccgcccacaatcctcccgatggaatgctggttgaaatcaggaacacacccctcagttacgccaatgcctttgccaaggcagtaacccaagacgaacgagacatcatatcgcagagcgtggcgcaacttggccaatacatccacgatatcgacaccggatacggcaagcccacgaagcggttctggttctcgcccaatctccgctatcctctgaccattgttgaggacaacaaagaaattcctgttgcaggaaacaacatcaggtctcttgacgaactcatccgggcggtcgtcaaggaaaccggccatgactgggaggaggttcagaaagtggttgtgaactcggaggtggcctgatgagcgccaacaccctctttcttcgcctcgaaggcgctctccaggcctggggcgaccagcaatcaaagtttgtcattcggcgaacatccgaggccccgaccaagtcaggtgtgatcgggatgctttgcgcggccttgggcgtctcccggtccgaagccgccgaaggttggctcaccactctcggggcgctgcgcatgggcgtccgcatcgacgtgccgggagtccgatggtgggattatcacaccgtgggcgcgggcatgccgatgcgcacggccgaaggtggaagcaagcctggagcgatgctcacccgccgcgaatatctctgcgatgcctcctttctcgttgcacttcagggcgagccgagcctgatcgctgaaatcgaggccgcagtcaaagcccccaagtggaccctctaccttggcagaaagtgctgcccgccttcccgccctttgctggagcatcccgacggcgattttccggacctacttacagcacttaaatcattcccctggcgccggcggctgaaggacgatcccacgccgcaagccgtggaatgcctgctcgactggaagccgacagaagagcagccggaggcgcccgatgatgcgctcgtctggtacgacgtccccgtcacgttcgacccgccctcgcaccaaccccgattcgtgattcgccaccaattgcacgtcggggctgacggcgtaacgcttgcagctcagccggcacagagccgtgcccctgcgcctccccgaccaagagcggactactccaacaccgagtacaaaaaccgacgcaaggagcggctggacgacgaccatcacttgtgcgttttttgcaagtctcccgcaaccaccgtgcagcacatcacgtaccgccgcgcgggcggcaacgaacgtaaagacgatttgcggtccctctgccgctactgccacgacgccgtcaccatgatcgaatacggccttggcatgggcctggaccgcatcaacccggaagaaccaaggtggcgcgacaccatcatccagaagcgcggcgagatcatcaagttccgctccctggaaacgcgccgccggcgcctggccgctgaggaggtggaatagcgatgtacatgtcctgtctcctgattgatgttggcagcaatcccgaccgccctcgtcccggccggctgtggctgcgaaacctttatcacgttcatcagcgcctttgtatggcctttccatccaaggaccgaatatcccatgacgcacacttcctcaagccattcaaaccggaggactttgccgagcaagtccatgtaggacgtaaggtggaggcaggattcctttttcgcatcgacccgcaacccattgggcgggcgatgcttgtcgtacagtccgccgcagagccaaactgggactacgccttccacaacgccccctacctccttgcggctccgcccgagaagaagcaattcgagccgagttttaccacggggcagcgtcttcgattccgactccttgcgaacccgaccaagcgtctctccaagcgctcgctgggagccgacggaaagccattggagaaatgggccaacaaggaaggcaaagggaaacgcgttccggtgccgacccaccagctcatcgaatggcttgcggattggcgcgttcgcgtggagggaaaggatgaaccgccgggcttctgcatcatcaaggactccgccacggtgcaggcgggttacgtctatgtgaataaggggc

SEQ ID NO: 684 - DNA, 8735 bp, Artificial Sequence
  Synthetic Oligonucleotide
cacccccacgcgcgtggggacaacggatacggacgaggttggaatgtgcgcgccgccggttcacccccacgcgcgtggggacaacttctgcgacaccacacccatatcaagctacatcggttcacccccacgcgcgtggggacaacaccccaagaaataattcccctgggaaccgtaccggttcacccccacgcgcgtggggacaacttcaaactggcgttctttataagatgcagaagcggttcacccccacgcgcgtggggacaacgaaccctgcctgtaactacactcacgactccccggttcacccccacgcgcgtggggacaactttcagcggcaatgcgaatcgccgcgagctgccggttcacccccacgcgcgtggggacaactttggggtataaggccgctgtgctgcccgatgcggttcacccccacgcgcgtggggacaacacatccaagtgcttggtcttgatattgttttgcggttcacccccacgcgcgtggggacaactggggtacggtgatcctgcctgcggctgggaacggttcacccccacgcgcgtggggacaactccgcgaccttctcctccaacacggcccgctgcggttcacccccacgcgcgtggggacaacatcggtcgagcagaaggtgcaagccaccattacggttcacccccacgcgcgtggggacaacgcatcggccttggcctcagccttaacctgcgccggttcacccccacgcgcgtggggacaacgtgatcgaggaccgtgccttcaaagttctcccgcggttcacccccacgcgcgtggggacaacccgcagtctcacaagcgcgcgtcggccccagccggttcacccccacgcgcgtggggacaacatcgccagcacgcgccccgcgccctcggaggtcggttcacccccacgcgcgtggggacaacctaagtggattcgccttgccactcgccgataccggttcacccccacgcgcgtggggacaacatcaagcgccagccccggcacatgcagcatatcggttcacccccacgcgcgtggggacaacttctttccagcccatgaaaccttcagccccggcggttcacccccacgcgcgtggggacaacacttactaaattattgattctgcggcatgcgaacgagaaaaaggccctcgaagtcatcgatgacccgagctgtttggccccaggttcggactcgaaagccctgttcattgtcgcttgaatagataatcaagcacccgcctcccttggcctggctgcaggctttttcccagagccgatcacggaccatggcggagacgcgtcccacgaacactcccgcctgaggttccaaaaaccagcgagtcagctcgcctcgcaaccctggggggacgcgctcaagaatcaggaccaccatcgccgggctccgtttcaccgatttcgggggctagcaggcggccgccttcgacctctccttccagattgtcccagaggaagccgggggcggcggcatccaggtcgaaggtagtgtcccaggccgtcgcttttgccagcatcaacgccctttggacatccgggatgattctctccagaagccgcgtggatacgaactgatcgcggcaggtgatgcgcacccggcgttccaactgtcccgtcccctcggcggcggcgcgaaatgccactggaacggtaatttcagccttgtacaggtcggcgagatcgtagacgaaggacagcatcttgccggtgtggataaacccgagtgcgggcgaaaaacctgctgacacgatggcagcatggcagattccatataggcaggagttagcggcggacaaggctcggttggcagggtccgccttgctccactcatcgcgtttatagctgcggcccgaccacgtgatgccggcttcctgggcggccttggcgtaggcatcgcgcacccgcacgccctccatgccgcggatttgctggagggtcagggcagggtcgaacttctccgaaaatcgcaactgatagaggcggcgcaccacctgcatatggaaaccctggtccgcccacagcctcgcctgatgcaggaagttggccgcgttgcgcgtctcgcccatgcccacggcgtagaagcggactccctcctccccgcaccaagccaccaggcacccatggcccgccaacacggagatggcggcgtgagtaatcgagacgcccggacccaacatcaggagagccagattggcacaggggaccggcaccttcccggcttgatcgtggacggcaatggcccgctcttcctgatcgacgtggcaatgctcgacgtacagataactccacccgtcactgaacttgggtagaacgtggagatcttgaattctcacagagcctccagcccgtgctgtagcgtcgatctccgatcgacggcggttgtagcgtcgatctccgatcgaccggggttgtagtcgatctccgatcgacgttacggcggtcggagaccgccgctacaaaaccaggcgatggatctcaccctggtacggccaatcttccgggcgcttgactaaaccggcccggaccggattctgccggacatattcatatttctcccgataggattcttgcgatctcaggacgtgatcgaaaaagtctttctcccaatgtgtgccctcgccctcatcttcccggaggactttggataaatccccgcgcagcgccttgatccatttccctaaaggtggggactcacgacaaaagccggcgaaaagatggatgtgatcaggcatgatcatgaagaacccgacccaaacaagaaaatcgctcgcccgttcggagaatctcgtgaattcccggtgaatcgcaggatttgccaacgagcgtttgcggtcctgcgtacacagcgtgagatagtagattgggctgcccgtatagagccagtccagtcgccgcaagcggggtttgaatttcatattggctcgatctccgctcaagaaatgttgcacggatccccgatcgacaagggattgtagcgtcgatctccgatcgacgtaccggcggtcggagaccgccgctacagcgagagcggcgccacggaaagcaggccgaagccgaaggctttgccgtgcccaacgccgcccacgatggtttctctgaagctgtccgcgtcctcaaccgtaagcgtcccctccaataacgccgagcgaaatttcatgcggccgcccgtcggcctcgggtcggatcggtctcctgcgccccacccgatctgcaagacccggaaagtttccacttggaatccaccttggccgcccttgccggcgaaccattttcgtatcacatcgtcgcggttctggtccttgtcccaggtcagcgccacgcgtttgccttgggccttcgggcggccccgcttatctgtcccctctcgcgtcctcgtaagatcaacgccctctgtgctggtttttatcttcttactcagattggcgcggatacggaagcgaagccgctgacccttctcaaagcgggggtcgaattcctgcacctgagggggagcggctagaggattcagaagaaaacgggcgttgtggaaggcgtagccccagtcaggctttacggcagagttagactggacgaggatcacgacccgcccgcccggttgcgggtcgatgcggaagagaaagccggagtcgccgtcacgtcttacatggacctggttgttggcaaagtccgcgggtttgaaaggcttgaggaagtggggatcgtgggatattcggtctttggatggaaacgccatgcaaaggcgctggtggacgtgatggaggtttcgcagccagagccgcccgggcctggggcggtcggggttggtgccgacgtcaatcaagaggcaggagaggtacatggctattccacctcctcagcggcaaggcgtctgcggcgagtctccagagagcggaacctgataatctcttcccgcttctcgatgatcttgtcgcgccaacggggctcttcggggttgatgcggtccaagcccattccgagcccgtactcgatcatggtcacggcgtcgtggcagaggcggcagagggagcgcaaatcgtcccggagttcgccgccgcccgcgcggcggtacgtgatgtgctgcacggtgctggcgggagacttgcaaaaaacgcacaagtgatagtcgtcgtcgagccgctccttgcgtcggtttttgtactctgtgttcgtgtaatccgctcttgggcgcggaggcggtggcgtgtcgctctgcggtggctgcaccgcaagtgttacgtcgccgtccgctccgacgcgcaactgcctgcggatgacgaatcggggttggtgcgacggcggctcgaatgtcaacggcacgtcgtaccagacgagcgcatcatcgggcgcctcgggctgctcgttggtgggttcccaatcaagcaggcaatcgacgggtcgcggctggggatcgtccttcagccgccgacgccaggggaccgattcgagggcagaaagcaagtcggggaattcacctcccggatgctccagcagagggcggcaaggggggcagcactttctgccgaggtagagtgtccacttgggcgctttgattgccgcctccagttcctcaatgaggtccggttcgccctgaagagcgacgagaaacgaggcgtcgcaaaggtattcgcggcgggtgagcatggctccggacttggttcccccctcggcggtacgcatcggcatccccgcacccaccgtgtgataatcccaccagcggacccctggcgcatcgacgcgtacgcccatgcgcagccgggccagccttggaagccagccttcgcgggcctctggccgggaaacgcccaatgccgcgcaaagcatcccgatgacgccggacttggtcggcgcctcggccgtgcgccgaatgacgaacttggattgctgatcgccccatgcctgaagaggaccttcaagccgaagtagcagcgtctttgcgctcatggggcacctccggattcaggaccactttcttggcctcctgccagtcgtaaccgatttccttgagtacagccgctatcagttcgtcaagagacttaacatctttgtcggcaagcgggacctcacgctgtttctgttttccgtcttcgctctccgtggtggtagccgtcaacggatagcggagatttggagagaaccagaaccgcttcgtcggcttgccgtatcccgtatctatgtcgttcacataatgggcaagctgcgccacgctctgcgagatgatgtcccgttcgccctgaggagccgccggtttggcgaaggcgttggcgtagctgatgggagtgtttctgacttccaccaacatcccgtcaggagggttgtgcgcggcaaaactattttgttttcccgtggggttggccaaggccgcggcgcgaatgaaggcgccgacggtatgggccgccagtttttcgtgattcgtcccgaagggcttcaggtttttgaccagcgtttcccaatgaatggagaaatacttgtagaaacatgccgaaccgaacatggcttcatccacgtaacctgcgcccgcgtcctcgccggggacatcatcggcggcgacatagtagtccacctcgggccgggcctcatgggtggaaatggcatgggcgacttgaagcgatgcctcaaccgtcgtgtctttgaggactcccgtttcaagcatcctgccgctcagcgccatgtccggcacggcgacggattcactgatgagcttgccgaactccgctgccaaggcctcgtccgtttttccgtcgccctgctggaggagttcggccatgcgtgtaatcgcctcttgggtggtgtaaaccagcatcttgctcctctcagcactttcctgttcgtcttctccttcctgtttttttgctttcttaggctccagcccgcaggctttgagaatgttctccgctcgcttcctgacgtctttgcccgtcaccttttccgcaatctctttcgccaactggcgggtgcgaactccgcccagcaattgtctgaactcctcactcatgcggatgctgcgcttaaggcactggctggaaatacgggagcgcaagactccgccaaaaaagcaagtcttgggcgcgcccaggtcatcccggttcaggttggccgggctgtgattctgaatggcgtgaatctggatcaacatgactctcctcctcttggacagttcaaaaattcctcggcccatttgagccgggtggattcgcgttcccagatggaaagatcgttcgtcagccgcacccagtcgagttcgaggtgcttggaagctatgaggtcgattgcccactgtagggcgggttcgatttcagcaagcggcagcgtgagcatcctgtcgaagcgttgctcgaaacgctgccgcgctgttttctcgcccggccgggatcgcccgagctggcgagcgagggtctcgcggggtgaatgctcgaggggccggagggcgtagagtttggcgacaagccaggccacctcacggcgaggcgcccgttgggtttgcgcccgcagcggccaccaaaggcctgcgaaaaggtcaaagccctctaccgattcgtcgagcccttgcccggcatggttgcgcaagagcccgagctcaccgggtttcagtcgagtcagaacttcgacgtactgctccgttggagtcacttgtcccccccttcgtctttgttgtttctctttggccgcatgtccggctttacagcggcaatttcttgtcgcctccggagggaagcggttgtgtagcccggggaaagcgatttggcgacggcggccatcaacggacgatattcctgggccgcctcttcccatgccttaccgccttctgcgatcatctcgtcgatttttccggaaaccgttgcctcggcttggggacgaacagcggcgactgcggagagaatttcaaggtgtcctctgtttcgtgaagtctctcgcggtttggctctgccaacgagcttccagccttccttctgccacgcctggatttcttgcaaactcgcctgaaccttcacgtcgtcgagcgcggccaagaattgaatctcccgctcggctgcttccaggtatttgtcgttctgcactgtcgcaaagctgacgacccacaacttactgttccccttcggcttttccccgcacaggattcccgccacgaccttcgtccacttcccagccgcagcgtcggccgggccaagcgcgctgaaaggcttcacaatctcgtcgccttcgctgatggtgtgcgggtcgttccagattcgtgccagactgccttcgcctgtctttgtgctcccaatacccgcaaagacacattgacgtatcagagcctccctgcgcccgcaggcgatgcagttggactctggtgtctccggagtgtctaaccagacgcgccgcggtacccacgttaatcctatcaataatggaacattgccgtgttgagggaggcttatgtccggattttcccatgtgggcgtgcccaggttcatctccgacgtcttccgccatgagaggcgcagggtttcggaaaggcagtcgcccatcggcacgatgtagatcggcggtttttgattgacgcccgggggcttgccgcgcccggccgacgtagcaaagagcggaaggcgcaacaagcccattgcgcagcatgccggacataagccgtttctgaaatctgtcccatgccggaagtgccagaagtttgtgccggtcggcacttcttgcatcagatagttgacggacagcttcttctcaagtcggttaggcttgcgttggtaaaaccgcttcccatcgccctgaaggttgaaacagtctttgttgtcatcgagtttcttgaaccaatcagagggaaacgaagaaatcgagttcttgtcgtccgggggattccctttgcaccaatagagcaacgcaagcaggaaacgcaggatggccaggcggtccattgggttgctggccgcgatttggcgaatccggcctgcttgcctaagggcctcactaatgcccacgcgaccgctgtgcccatctttccacagaacgggaatccacttttcttcgagcaggttgtactccacggcttcctccttgcctgggcaagaggcgggtggcaggcccgtcgcgccccggggggaccggaccgtccgctgcgtagctaccacaggacaatcatggcgaaggtatacacccgggacgcggcaaaggcaaggcccgaagaccacgacaacggttatcgcgtccgcttagcccacacttcacaggctgcaaggcgcgccgttgactaagcgcagaagctttgatgcctccgcggcgttccgattcggagggaatcttgcgatcgatttcgcgggtggcgcatacgtcccgacgggtttttgtcgggatgtatgcgcccctcggcatgtcgacaccttcatagcctcttgtccatgctcaagatcgaaccatcattccagaaatagaacctcccgccgcagcgcgaccacggccagtcgcccgggtgcttgaccagcactcgtttgacgggattgtcgcgcctgtgattcaatttctcgtctcgcttcttggggctccagatgttcatgtcgtagaacccaccccaacaatatatcgtccctgtggcgcatacatcccgacaaaaagaagctgtgaaaaaatcaagaaaatcgaaaaattaagaaattttcttgtcttagctatacagctatgatatattagcctctgaccgcacttccggcgggga

SEQ ID NO: 685 - DNA, 8724 bp, Artificial Sequence
  Synthetic Oligonucleotide
ctgtttctggttgcgaacctcatgtgccggcagttctaaaaacggcgaccggtaaggaaataaaatatatccgcaaggatgaggcccgcaggatgcttgccgtgctccagggacgagacaggctgattgttcagatgctctggcatacgggtctaaggacggcggagcttctttccataagggtttccgacatagactttgaacagaataccatcactgtcaggacgctgaagaagaaaatgaccctcccacgaaaggccaaagtgataaaggccgagatcagagttcttgagctggccctaaaggaaaatacacaggatgagactagtcgagaccggctggctgctataagagcatgtctggccgcgtttgagaggcagcctcccgctctacggttcaggactatacctgtttactcccctctcaccgagcagatagcctcttatgccaaggccaagggcctcgataaggactatcctctgttcaccgtaagtcgcatgacggtctatcggatcgtgcgcaaggccggggcaagggccgggctggattctgaccgggccaatccgcaggccttcagacacggctttgccatcaatgcagtcctggcaggagttccgccgctcctgctgcaacagtggctgggacatgtgtccgtaaggacaaccctcgtctatactgaggccctcagacgggataccaaggactatctgcttaggatggcgttttgaggtcgagctatgtttttgaggaaagccagctttgttttgttgtttcttttgtgggcatccgccgccttttccggggagcctgattccgccggaggcatagacattggctcatttctttcgggcgttttctccggccagatggagctgctggatattcgcagccgacaggaatacacccttttacacgcaggcttcggtctgcatatccctgccagcgagcttcccgacaggctgtcggaattgccgactggcaagatactggtcgtcgtctgccacacccatacccgatcgcctcgtgtcgccgcctttctcgggcagaaaggcttccgcgccgtgtggcttcaaaatggccttgtaggtctggctcactttttcactagcgcgaatgcggagcagctcggaacagccctgggctacgcggaaccccgcaagggtgtccagaagatcatcgagcgtcatcgtcaggaattacagccatttacatccgtcgtcaatttgacgacaccttcttcgcccagcgacaacaggggcggaggcccgcagcagaccaccatcattgacacggacggccagtacatgatcgcgctcctggcaaacacgcccaaggccgccgacttccgaatcttcgtggtcggcatgttgaaggccctggagcgccgggaattcattcccctctcacaggccctcgcctggcaggaagagcagtcccggcttttcgattacctcgccctgtccaaatccgtcaacctccgcaaatacagaaatttcctccgctaccgcgacatgggcctctcccagagggagatcgggaagctcctggacgtgagcgaattcaagatgtcgggcaataaggagatttcaggacgagaggtagatgcagttcagtcagagggtccacattaagatgacaaacgaggaaataggcagactcttaaacaacgcagtgccgcacatgaaggggaattcgaaacaccgcgatcccactgtcgacttgcggttgtgaaatccacagcaaaaagggaaaggaggaaaaatatatggtccttcctgtaacacaagggacttacaacctgcttgaagaaaagtggatacctgtgctctactgtgatgggaagacagatcacgtcggtatctacaaggcgctgtcagacgcccgcaggatcaggcagatagccgccagcaatcctatggacagggtggcgatactgcgctttctgttggccctgcttttttggtgtatacgcaacgagaagttttcacttgcggacttggacgagaaaagtgccgacataccggagaactggcttgctaagctgaaggaaaacaggtccgcgttcaatctgctgggcgacagtaaaagattctaccaggacgaattgttgaagggcaaggaatctcggcccatcggcgatctgctcgtcgagttccctggagcggattcggtgaatcacatgcgccacgttgtgcatgacggttcctacgggttttgccccgcgtgttgcgcaatgggaatcttgcaactctcggtctgggctccggccaacaggttttatcctgcatcagtcaacccgggctctgcggcctacgcattcattgaagggaagaacctgttccaaaccctttgcacgaaacttccagaaacaaatccgcaagctgatcaggctccatggttgggcaacaaggagccgaattcacctgatgcagtaaccatgcttgcctggcggcctcgcaagttgtggttgaatgttggacgtgaaaatggccattgtgcgaactgcggcagtttcggcgagctgataaccagcctgtgcaacgaaggcggttggccgacaccaacaacaagcagccaggagtttgctaaggcggttgaaacagagttcaagaatctcggctacagagcgaaagacaaagcaaataggaacgccaaaaaggtcgtgaagatggcatcactcattcgcaaatgcaggatggatgatttgcgcaaggcatgtagacagagcaatccaaagccccaagcggcggctccaacgacgcagaaggatgagcaagaaatcgctctgttgtttcatcagttgattttgaagaacgacaaaagcgcgcaaaaggcgatcaagtctctcactgaggaaccaaatgaggaggaacagaaggcgttagaggatggagacatgcgggcaaagaagttctgggacgctgatccccatctgctgagggatggcgagcccatatccctgcccggattgggggcggatgtggccatgcactcttcacagttttggcgcgacgcactccgtttgcagcgagggcaggttggaagggtcacggccatcggtccggtcgtcaacaagttcacgttccaggatggcgtttccatatctttgccggaagcctctgacgatgtcaaacgccgagccaatctgtctgccgactgcggcggcgagttgcgagacctgcttaagcaggtgacgcaaaatcccctccggcagcaccccgaaattggcgcatccgtcaagcttctgacgccaaatgccgaggctcagattcgtgaccggctgagccggaccaatgcctcgccgggcgataatgcaaccaaagacaaggcattcctgcgtgaagtctatgcgccggtggtggagcaggttatcgcttctgtaacacctggctccccgctccgtcggcgtgccgcgcgtaatcacacccaagccctgctgaacaaaaagatcaaagagctggtggacaatccggatcatctgtcggaagcaggtatgcatgcagcagtgccttgcaaagcgaaacgcggccgcaagaagggaggatcaaaatgagccagaccgctgaatacatcaagaggctttcagatatgcaagaaggggaactctcggtgctgcgccgtctggccggacggacgctcgatgccacgcttcagggttttgacctcttcacgggtctttggtggccattacgggcgaaaagtcagaactgcccgcgccgggagccgtcatggctcgttgctaagcttttcggggccttccgcattccgcatatccggcccgattcaggcgctggtccccttttgcccgaggtcctgggccgctgcgaaccgaatggcaaggctgacatagagtgtttccgaacacgattcgacagtctgctttgttcatccttgtcgtctctggagccgcatttgcggtgggcgctgggagagatcgcacgggccgtcgccgggcatgtgcctcatgcgcgggatgtgaagggcatcgactgggcgcaactcctcgatgatctctctatctggggccggggtgaggagcaccgccgcggacgcgatgttcgcgacatctgggccgaaacgtatcttaacgctactaacttccatgcccatgtagggcacaacgaaagatgaaaatggtcaataggttggaagtattttcatataaattcaaaagagaggagagcatagaaatgttgatcgaaatccacatgatccagaatcacagcccggcaaacctgaaccgggacgatcttggtgtgcccaagacctgcatcttcggtggcgtaacccgggcgcgcatctccagccagtgtctcaaacgcagtatccgccgcagcccggagtttgcggccgctttggacagggaaggtggtatccgcacgcgccgattggcgaatgtgctggcccgtgtcgcctatgctggagacttcgacatgactcccgaaaagttgaccaatcttctccaagcacaacccgtcgagaacgaagagatcaacagactcgatgccattgcttcggacgccttgcaactgggcggggtgaaggcgaaaagcaagaagaagagcaaaagcgacgaagagaatgaaggcaacggtgatgatacgagcgccgaggcacattccaagatgcttctcttcctctctacgaacacaatcgggaagatggcaaaagacctgaaggacaaaccgacggcaaaggggcttgccgagaaattcaagaaatacattgccgaaaaccccgccgcccccgacatcgccctgaatgggcgcatgactgaggttgcaaagaaaagtgtcttcagtgatttgaactttacggtcgaggctgcgctctccgctgcccacgccatttcaactcacgcggtcataaacgaggtagactatttcaccgctgccgacgaccttcccggacctgatgcaggtgcggctcatgtcaacgagactatgttcaactccgcctgcttctacaaacattttataattgattttaaacagttgaagaagaatttgagaaatgatggagaacttgcacgcaagacggtgcaatgtttccttgaagcagccgccaaagccaatccctcaggcaaacagcacgcatttgcggcattcaatttacccgacggagttctggtcgaggtcaaaaccaagtcagccactccggtcagctatgccaacgcctttgccgatccggtaccggaaagagccgaacgcgctttgatcggtgaaagcattgccagacttggtcagtatgtccacgacatcattacgggttacggcatcgaggctgaccgtttctggttctctcctaacctgcttcaccccctgacttggattgacaaaagcagaaaggaacacgagcaagaacaatccgtcgtcggtaccaatgagttcggccagttcggcatgtttgtccagagggtcatggagaaggtcgtatcagccgaaaagtcggcggaggacgcggaatgaaagaagccaaaacactcttccttcgtcttgaaggactccttcaggcctggggcgacacctccaagttcgtcctccggcggaccatggaggcgccgaccaaatccggcgtgctgggccttatctgctgcgccatgggcctgtcgcgtcaggcggcccgggaacgcctgccggagctcaatacacttgcgatgggtgtgcgaatagatcggcccggcatacgttggtgggactaccacacggtaggagcagaagtcggcctggcaaccgccgggggcaatgttaaaaccggtgctcagggcacgctcatcacgcgtcgagaatacctgaccgacgccagttttttagtggcgcttcaaggtgatccggacctgatctctgatgtcacagaggcgattgaatctccgaagcggcctgtctttcttggccgcaggtcctgtccgccgtcggtgccgatactcgaaagacccggtgagggcgaagggtggaaaaatcctgacgactacggcgacctgacctccgcgctgaactccgtcccgtggcatccgctgtgcgccgatgataaaacgccgcagaaagggacggtccaaactattttggaatggcggccagcctcggaaggagacatcgcctctgaagaggcggaagtatggtacgacgtggcggtttgcttcgacccgccggtccacatgccccggtttgtcctacggagcagtgtctcgccagtagtcggcaaagcgttgcaggaatttccccatgcaccgccgcggccacgcgcagactataggaactctgaatatcgccagcgccgcgaagagcgattaaggaaggactccggggtgtgcgtcttctgtaagtcgcccggtcctcgcatgaccgtccaacatgtgacataccgaagggcagggggaaacgaaacccttgaggatcttcggtctctttgcggtctatgccatgatgccgtcaccatgctcgaatatggaatgaatatggggctggaccgcatcaacccagaggacattcgctggcgggatctgataatccaaaagcgggccgatataatcaaattccggtcgcttgcagccagacgccgttatctttctgccgaggaggtggaatgatgtactgttcgagactgctcattgatacaggcacaaaccccgaccgtccgcggcccggtcgattgtggttgaggaaccgctatcacgtccaccagcggctttgtatggcctttccatccacatcacgaaaggccgaagatccggacttcctcaaaccattcaattcggctgcgtttggtaacggtcaagtccacgtgaagcgcgccatggatgtaggatttcttttccgcattgaccctcttcccaacggccgggcgttgatcatagtgcagtctgctctaacgcccgactggggctatgcttttcacaatgcgagccatcttctggcagcccccccagaggtggaaccattcgagccgaatttttcgaagggtcagttccttcgcttccgtctgtcggcaaatccgaccagacgtttgagcaagcattcacccgatgcaaaagacaactctatcgggaagcgcgttcctgttccggccgacaaacttattgactggcttgtccgtcaggcgggctcggcaggattcctagtaaggcgggacgttacaacttttacgccagggtatgtctatattagcaaaaatggcaagggccagcgtctattctcggttctttacaacggcctccttcaggtcattgacccagatgcctttcggcagacatttgtcagcggtatcggttcaggtaaagccttcggtttcgggctcctttcggttgcaccgggtaatagtgaaggcttaggacacacagtatgagagttcaggacttgcacgttttgcccaagttcagcgacgggtggagctacctctacgtcgagcattgccgcgtcgaccaggaagaccgcgccatcgccatccacgacaaatccggcaaggtgcctgtcccctgcgccaatctggcgctgctcatgctgggcccgggcgtctcaattacgcatgccgcaatctctgtgcttgccgaccatgggtgcctggtcacctggtgcggcgaagagggaatccggttttacgcggttggaatgggtgagacacggagcgcagcgaactttctccatcaagcgcgggcttgggccgatgtggattttcgtctgaaggtcgtgcgctgtttgtatgagatgcggtttgccgaaacgtttgatccggagctgaccctgcaacagatccgcggtatggaaggcgtgcgtgtccgggatgcttatgccagtgccgccaaggaaaccggcgtgccatggtcaggtcgcagctaccggcgtgacaaggggaacgatgcagatccggttaacagggccttgtcggcggccaattcatgtctttacggcatctgccatgccgctattgtctcaagcggattctcgccagcgctcgggttcatccatacgggcaagatgttatccttcgtttatgatatcgccgacctttacaaggcagaaacaactattccagcggcatttcgtgctgccgcagaagataaagaggggctggaacgacgtgtacgagtcatgtgccgcgacctttttgtatcaacccgacttctggagagaatcattcctgacatacaaaacgctctaatgttgccgaagaaaagagcgaccggtgagcagaccttcgaccaggacgcagcccttccaggctcgttgtgggaccctgcgacaggagaagtgcagggcgggtacgcctatccgttggaaacagatgaaatggagtctaacgatggtggttctgattcttgagcgtgtgccgcctgggttacggggtgaattgacaaggtggtttctggaaccgaaagcgggtgtctttgtgggtagggtttcagccatggtacgcgaaagactttgggagaaagcctgcgaccaatccaagggaggaggatgtttgatgattcattcgagcgacaatgagcagggttttcggtttcgtagttggggagagatggcgcggtcggtcgaagacttcgaagggctttttcttgtccgtgtgccgtaattacaggctttttttagtattgtccccacgcacgtgggggtgaaccggacggctcagaagtaagcctgagctttgacacattgtccccacgcacgtgggggtgaaccggaatgcctgtttcaaatggttctcggcctcggcattgtccccacgcac

SEQ ID NO: 686 - DNA, 8724 bp, Artificial Sequence; identical to SEQ ID NO: 685
  Synthetic Oligonucleotide

SEQ ID NO: 687 - DNA, 8716 bp, Artificial Sequence
  Synthetic Oligonucleotide
gaccggttcatccccacgtgcgtggggaacacaatttcatcatccacaacgcctatctctagctcggttcatccccacgtgcgtggggaacactcttcttgctgctcttcttcttgttcctcttccggttcatccccacgtgcgtggggaacaccccccggccctggagggcgaccccgcactcgtcggttcatccccacgtgcgtggggaacacgcgcgacccatgtctcgccggtgtccttcgcccggttcatccccacgtgcgtggggaacacgttataggtgcgtagggaagtcgggcgtgctacggttcatccccacgtgcgtggggaacacacaggccgtatcagtttggttgtgtccggcgtcggttcatccccacgtgcgtggggaacacgagcgaatgtaatggaacgttcctgcaactcgcggttcatccccacgtgcgtggggaacacgttcagcccgaggcggatgcgggcgcgtctgaaggttcatccccacgtgcgtggggaacacgttctatgcgctcttgccacgtcattgctctccggttcatccccacgtgcgtggggaacacgcggctaactttgctactcgcgggtccatgtccggttcatccccacgtgcgtggggaacactggattttgtggcgtccacgagaaccgcgattcggttcatccccacgtgcgtggggaacactttgcgcgcgccctcggtggctttgtcccccgcggttcatccccacgtgcgtggggaacacgtgcaacgcgagagaagaggcttggcgtccgccggttcatccccacgtgcgtggggaacacccgagttcatacgccaggcgacggtcgcggagcggttcatccccacgtgcgtggggaacacgcgtgtagtacaggtagtatagggaaaaggtacggttcatccccacgtgcgtggggaacactcccatgcctcgtccgcaaggcgcgtcctattcggttcatccccacgtgcgtggggaacacttgggacttcgaaggcgatggtgtcaatcattcggttcatccccacgtgcgtggggaacacacattgcattttaaggctctcgtggctttgttaccagttgaagtccctcccagtcagtcacatggcgcttcgtgccgccccagaagtcgatcttgaagccctgttccgtattggaactccaaatcagcatgcaggcgccgtctttcacgctcccacacgccttctgccacagtctttcgcggaccatggcggacaccgtaccgacgaagacgccggtatgcggctcgaacatccatcggctgagttcgccccgcaacgaagcaggcacgcgttcgaggatcatcaccatcataacggcagttcctcctgcgtgggcggctcaccgccatactgcaccccgcccggcgtcacgcccctttccgggtcccacaggtccccgggtctggccgggtcgctgtcgaaatcccccgtgggttcttcttccggcggcgcaaacgccagcacgtaatcgatatcatccacgatacgcggcagaagattcttctgcgcgaacgtatcacgacaccgcaggcgcacctcgcgctcgacgttcttctcgaccgacgcggcggcctgaaaagccgcgggcacggtgacgtccaccttgtagaggtccgcgatgtcgtagacaaacgacaattgctttcccgtgtggatgaacccgagcgccgtggaataccccgccgccacaatcgccgcatgggagacaccgtacaggcacgagtttgccgcggatagcgcccgattcaccgggtccgccttcgcccattggccgcggtcatacgaccgcccgcgccagggcacgccgctttcgagcgaagcgcgggcatacgcctcccgcacccgcacaccttccatcccgcgaatctgttgcagcgtcaggttcggatcgacatcctgctcgaagcgcatctcgtacatgcgccgcaccacgtgcaagcgactctgacggtgcgtgcacagactcgcctgatgcagcagcttatccgcgttgcgcgtcgtgcccgtacccgccgcatagaagcgcaccccctgttccccgcaccagacaaccatacagcccgtgtccgccagcgttgtaatggccgcatgcgtgatcttcgtgccgggacccagcatcaacaacgtcaaattcgcgcacggtaccggcgtcaccccgtactgatcatgcaccgcaatcgctttttcttcctgatccacccggcagtgctcgacgtacaggtaactccacttatcgcgcaccttcgggatttcgtgatagtcctttgttctcatggcttcccccttttcccaagttcgtggcacgggcgtcccgcccgtgtcttcaacaccgtaggcaacatcctcacgccgctctcacacgattcaactgtcaaagaacccgcgctgcaacgccgcgccaatcagcgcggcgcaaccgaaagcaaaccaaaaccaaacgccttcgccgaaccgatgccggcggcaatagcatcggcaagcgctttctcgtcctttaccgcgaaaatgccttcgagaagcgcggaccggaacttcatccgctcgcctttgccgggccgaaacgcgtttacccaaccgatttgaatcacttcgcatttccgcagttcgaagccgttccgtggcccctttctcgcaaaccagggaacgatgacctcgtcaggccgctggtccttctcccacgtcagcgcaatacgcttgccctgtgttcgcgggcgtccttctgtgtccgtcttctcccctgtcttgcgatacttcacgcttttcttgctcaagttgacgcgaatgcggaagcagaactcctgccccgtcgcaaacgttggactatattcgcgcgtttccgcttcggcggcaaggaacgtgcgcgcattctgaaaggcatagcgccaattcggttccgaccccgacaggaccacgattactgcgcggggacaattgcgctcgacgctattgtccacacgaaagaggaagcgcggggccgcgaagcccttcggattgaagggggcaaggaactccggatcggccgtgcgttgcgcctcggtgggaaacgccatccaaagccgctggtgcacatggtaaacatttcgcagccacagccgccccggccgcggccggtccggattgtcgccaacattgatcaagaggtgcgacaggtacattattcgacctcctctgccgccagtctccttcgccgcgtctccagggaccgaaagcgtatgatctcgtcccgcttacgaataatcgtgtctcgccatcgctgttcctcgggattgattctgtccagtcccatcccgaggccatattcgatcattgtcacggcgtcatggcacaggcgacagagtgaacgaagttcctcaatttgttcgtcgccgccagcgtgccgataagtgacatgctgtacagtcgtcgcggaagacttgcagaagacacagagatgcttgtcacgatctaatcgctcttggcgaacccgccggtactgtgtattcccgtaattggcgcgtggccgcggcgggcgcggagtcctgcgttgggttggctctccggtctccacttgaccgtccctgcccaactgcaattgccttcgagaaacaaaccttggtcgatggcttggcggttcaaacgaaatcggtacgtcataccagacttccgtctccggcggtgcttcgctttcctgggcagtcggcacccaatcgaacagacaatccacggattcagggacttcgtcaccttcatatcgcggccgccacggaaggaacgctagggccgacaagagatcggagcacgtcactgactccgcctctgccactggtcgcgagacggggcagcattttctccccaagtacagcggccataccggattccgcaaggcgccggccaactcctcgatcaccggcggatcgccctgaaggacaacaaggaaactggcgtcacacaagtattcgcgcctggtcagcatggtgtccgccttcatcccgccctccgccgttctcatgcgcattccggcgccgacggtgtggtaatcccaccagtgtatgcccggcctgtcgcaacgcacggccatttgcagtgccaccagtcgcggcagccgctcgcgtgacgcttcgactctaggcacacccatcgcggcgcataataggccgagcaccccggacttcgttggtgcgtccgtcgtgcggcgaataacaaacttcgactcctgattgccccatgcctgcatagggccttcgagccgtagaaagagcgtgtttccactcatggggccacctcggaacagactacggcttgctgcacttgttgccagtccaacttcgggtcaatacccttaatcaccgcctcgatcaaggcatccaaagacttgtagctgtttggagtaagggaacgctccgtgtccttctcaacattcagggaatacctctcattaggcgagaaccagaaacgttcccgaggcggaccataacccgcttccaggtcgtaggcatactggctcaattgcgcaatgctctgcgagatcatgtcccgccccccgtcgagagacaccggtttcgcaaacgcattcgcgtaactgattggcgtgtccttgaactcgataagcatgccatccggtggattgtgcgcggcaaaactgttctgctttcccgtcgggttggtcagcgcagcaccccgaatgaatgccccgaccgtatgtgcggccaactccaagtagccttgaagattctcgaccagcatctcccagtggatagagaagtacttgtagaagcaagccgaggcaaacatggcctcgtccacatagccggctcccgcgtcgtcccctgggatatcgtcggcggcaacgtagtaatccacttccggccgcgcctcgtgggtgaaaatggcatgcgctacctgcaaagcggcttcaacggtggtatctttaagcacgcctgtctccagcatccgcccactgagcgccatatctggaaccgcggtccgcgtggcaattagtttgccgaattcctcggccaacttgtcatcgctcttgccagtgctggcttgaagtagccgggccatttcttcaatcgcgtcgcgacttgtatagaccagcatcttgctccgttctgaaccactctgctcagattcctccttcttcgatttcttcggcttgagaccgcaaatctccagaatcttctcggcgcgcttctgaacctctggcccgccttctatccgatcagtgatcaactttgccagttggcgcgttctcactccaccacaaagcaccctaaactgctcactcatgcgaatacttcgtttaatacactgactggaaattcgagagcgaagtactccgccaaagtagcacgtcttcggcgcgcccaagtcgtcccgattgagattcgcgggactgtggttctgaatcacatgcatgtcaatcaacatctttcaaccctccgttgttagcaataaactgttccgcccaccgaaggcgggtactctctcgttcccaaatggaaaggtcatcggtcaacttgacccaatcaagtttaagttccctgtcgctgatttccatcaacgcccaacgtatcgcaggctcaatctccgcaaggcttgagacaaggagttggtcaacaagcgcccggaatcgctcgcgcttatctgccggaacgtgaagccaacactggcgaagttgacgcccgagtacttggccgtcagcgtgctcgattggacagcatgcgtagagtttcgctataagccaagccacctgtcggcgcggcgcgcggtgattcttgtcccgcaacggccaccatagcccggcgaagaggtcaaatccctctactgattgatctagcccttgtccggcatgtgtccggagcaggcccaaatccccggacttcaagttgcttagtgcctcgatatattgctccgtaggactcatcgcgcacctcccttctttcgtctctcttctttcgtgactttcgttgcacgccacacatccggcatcagcgcgcccatttgccgtcgccgttgcacggcttgcacagtaaaccccggcgacaatgacttggatacagcgctcatcattggccggtacgtttcggctgcttcctgccacttctcgtcgccaccgacaacaagttggtccgtgaggcccgatacaagcccctcgacatgtggacgtatcgccgcaacgacgctcactgctctcttctcggacttgcctcttttctcgggccgctcgatggcttggatacgcgcctctagactgcgtccttgcgcttgccaccgcgtgaatcgcgcgatgacctctgacaactcctgaacgtcgaaaggcagatcaacaacggcttccattgcctccaagtatttgtcgttttgcacagttgagaaacccaccagccatacgtgcgcccgagttccttcgattgcgtctgcccacccaaggcttgtgatatccccgttctcccgctgtgcaaccatacttgcggcaattcttgcccattgccccgctgcggcatcaggagcgcccaaggcatcactcgcatgcatcgatgtgacgttacctttggaatcgcgaacgtaaataacgtgcggatcgctccacagccgactcgattcaccgtcgcctgtcttcgtgctgccgactccagcaaatacacatcttcgaacaagcgtttcctcccgaccacaggaaatgcattggtcagaacaattttcgggatcatccaaccatactcgtcgcggcagccatgtcagcccgaccagtgtcgggacggcgcccgttggtggaagctctacgtttacggactcccacgcaggtgtccccaagtttggttgctcacaccatgaaagccacaatgtcgtggccagcgaaggccccacgggaactgcatagagtggtggtttagcgttgatgcccggtggcttgccgcggccaccagatgtcgcaaacaacggcagccgcaagagcccgaccgcacagcaagcaaggcacaatccgtttgctccatcccttgagtgtcgaaaatgccacgcattccggccagtgggaatctcgtgaatgaggtagtttgacggaagcttcgtttgtactgcctcgccacatttcctaatctgaaagaaccgtcttccctcgcccaggagattgaagcattctcgattctcttcgagtttggcaaaccactctgctggaaacgacttgggcaagtccgcgttcgtagtttcaggtggacttcccttgcaccagtacaggatagcaagcaggaaacgaaggatggctactcggtccatcggattagtcgcggcgatttgtcggattcggtgcgcatgctcgaatgccttgagaatcccgacccgcttccattctccgttcgcgtagaggactggaatccagtcttccttcaagaggttgtagttcatggcggcctccgagttacgggacagtttgcgggtatcgtggcgcggcttgcgcggcggtgacatggagcctcgcacccgtggcgcgcggcgcgccaacgaagcctggcggtccttccagtgcgggcataatcgcccccctctccatcgaatcgattaccgcaacagtactacggttagatgcatcctgtcaagagggtccgcgcgctactgtccaacgtaggtggaagttgtgtgcaacatgtgtggacatgccgcccacttcccgcttcccgcttcccgcttcccacttctcacttcccacttcccacttccccccaacccccgtccgcaccttgtagaccgtcgtgcgcgcggtcacatacagcgtcataccgtccgcgtcgccgaaggcgcaattcgccgggatgtgggggaactcgatttgctccaattgttcgccctccgggctgacgacggtgaccgccttcccgcccgtggtccagacgttcccgcgcgcgtccacggccatgccgtccggcgagaacaccttgaagaacacccggtcattccgcagcgatccgtcctccgccacgtcaaacgcgcgaacgtggcccccttccgtatccgcgacgtagagcgtcttcccgtccggcgacagcgcgatgccgttcggcttcttgaaatcccgcgcgagcgcccgcacctcgcccgaggcgtccacccggaacacgccgcagaagtccaattccgcgttcggccccttaagcccgccctccagcccatacggcgggtccgtgaaatacaccgcgccgtccgcggcggccaccgcgtcattcgggctgttgaaccgcttcccctcgaaacggtccgccaacacagtaaccgttccatccttttctgttcgcgtcacacgccggttccggtgctcacacgcgatcagccggccccgcgcgtccacgatcaacccgttcgactgcccgctgggctggcggaacaccgacttgtccgcgcggtagatcgtgtccgccggaatgtcgctgaagatcaacccctcggacggcagccagaccggcccctccgtaaactgaaacccctccgccaccacctccacttcaccggcaaccagcccgccggaatccggcgcacccagaacaaaaagcgcaagcaaatcaaacatggccgcgaacctccctcttctcgggtttcaagcctatgcgcgtttcccgccgcgcatcatgccacaaccgcctggggcgagacacgcacccgtccggcgcgcgccccatttacggaccttccggc

SEQ ID NO: 688 - DNA, 8706 bp, Artificial Sequence
  Synthetic Oligonucleotide
gaaaagtgtgggcggtccctgccgttttcgcgaacgcgttggaattctgcgcggagggccgtccgttagacgcagcgctggcgcacgctttcgggaaacctgtcgcaccgtcggtttgcgaagcagtttcccgtttcgcccaacaccatccggcgctcgatttggcagcgtccccagaggccaagccttcgccgcttcccgtcaagcgcgcgatccgccccagctggctgatgcttgagatcacaaatgcgtgcaacttatgctgtcgccactgctatgtgcctgccgatttctcgacagccgatgtgaatagccccacacttccgacctcgcgctggatggaattgctcgcgcaagggcgcgcgatcggatttcgatcggttcaattgacgggtggagaacccacgcttcatcctgacctctcgccattgttgcgaaccgccttcggtctcggctaccggccggtggcgcttttcaccaacctgatgcggctcagcgacgatctgctcgctgttctcagcgagatcctggcgcaggttcacagctcgctttactcccacgacgccgaaatccacgattccatcaccggccagaaaggcagtttcgctcgcacccttcaaggattgcgccgcgttctcgctgcggagatcgaaacctacgtcagtgtggcgctcctgcagcagaattgggcgacgcgcagggagaccatttcctttctgaaccatcttggccttgcttcggaccacatcaaagttggctgcgcaaggccccagggtcgcggggccgatctttcgctgccggtcgcccaatcgttctggccgcgcaagctcgacgagtgggccgtggaagacaacacccacctggtcgccaacacatgctgggcgggaagaacggccatcagcgccaagggggatgtgtatgtgtgcgtgggggaacgcacgccgttggggaacgtgacctcggccccgctcaagccgattgtcgaaagcccggcgatgcgccgtctgtggcagatcacgctcgatgatgttcccgaatgctcgcaatgcgaatttcgctatggttgtttcgattgtcgggccgatgtacacttgctcaccggcgacctgtggggccgcgatcccacctgcggctataacccgaaaaccggccggtggcgctgtgaggaatccgctatggaagacagaccgaaacgcaaagacgacttgttggtcgaggacatggagggcgatctggtcgttgcggactttcgcaagtccgagatgcacgtgttcaattccatggctgccgttgtctgggacctgtgcgacggccatcggacggtggaaatcatcaccgatctgctggccgaccattttggaatccccgccaatagcgtgcgtcacgatgttgtgcggattgtgagcgagtttcgcgcaaaggacttggtcgaatagccacgcgtgggagcgccggcggcccgccggtgatttggactacatgttggcgcaactgccgcccgaacttcatctcgcctgtttgctttgtcgcccgactctttccgacgccgtgctcgaatcggcgcgcgagaccgtcggttccggcctggactgggattgctttctcgattttgttctgtggcagaggatttttccgcttgtttcgcagcacgcctccggagcgttggcggacgcgattcctccacgggttcggagcgagctgcgcgcttacgccattgcgaacggcaagcgagcggatgcgatggcaaacgaattggccgccgtcctcctcgcgctcgataacgccgccatccgtgctgttccactgaaaggacccgtcctgatcgaacggatttggggcgacagccggctgtgcgtcagtcacgatcttgacattctggtaaaggccgacgaagcgcggcgcgccaccgacgttcttgccaaacgcgactatcatccggatgacacctatctccggggattcccgtcctggagatttggcagtcgctcgctgccgatggtccgttctcctgaaatcgcgttcaccatgcgaatagaccttcatacagcggttgcgagcgagtggatccgaagtccgctcggcgccgattctctctgggagcgattgcaacgaggcgagtttcggggcgcacccatccggctgctgcccgacgactggaatctgctgcttgtggcgctgcacgctctgggccattcgttccaggcgctgcgctgggcggccgaactgcatggcttgatggaaatctgcggcgcgacgtggcccgccgttttgaatcttgccgagagactgcgcgttcgcgacgaagttgttttggcgcggaaggtctgcgacatgattctcggcgaagaaatcgtccgaccggaggcagccagccggctcctccttcgtttggcgggcggaccgtttgggccgccgccgtctcggctggcggaccgccggctccaagtggccgttcggcggcgaatgacggcaaaacttgcctatctggggtcggccttgtttcgcccccttcccagcgatgtcgcctttctgcctttgccttcctggttgatcggagcctactatctcgttcggcccattcgtctggcgatgaaatactttctggctttcccgctgctgacggtttggaaacgcctctcgggacgcgggcgatcaagcgacgacttcgttcaggatcggatttgtaggagaactccgggatggaaacagagtggtgcgcagtagggctcacaggtcgtagaggccatcatcataggaatactcgccgccgttgccttcgcgctcgccgcccaatccgagaagatcgccatactcttcctcgattttttcggggtcttcgcccgcttcgaggcggcggagggcttccttcatttcaagaccgccctggtcgcccacgatctcggtcatgcgccgcagaaaggcgccgagctggcgtgggtcgcgttcgtcgagcgattccgcctgttccatcaagtgaaacatttcgcgctcggcgcgcgcccgctgagccggcgacattttcgcaaacggatcgtccaggtcgggcgtctcgccacacggaggcccattgtcactgtcgggggcgccgggctcgctgccgtgggccgaacttccctggtccaatgttttcgacgagcgcgcgaccgcgaaacgcgacagaacgcgctccatgtcgctgtggtcgcacttcggacaggaaggcaccttcgagtcgcccacgcgccgggcaaaaaactggaagatgctgcgacagtgatggcacgcgaactcataaatcggcatggcactcgaacttccgcaatcggattctacgttttcccccgcccccccccaaacactgcggcttgatttcttatcgctgattccccctggaaggcaagtgcttaatcggggccgtcgccatttttccacgtggctgggccggctttgtttcttcgcccacccggcaacagtgccaagatgcgcccatgctttccctcgcccgcatttttttattgactaatcagcggcttgtcaccttcattgttacatcgggggcactggagatgatcgtccaccacgccgacggcgggacactcgtcgcctcgctcgcgtgaaaacacgcgcaggcgaatagcaggattttgtagaatgtccccgaaataatctttgacctgtcgggagaactgaggatgaacgaatttaatctgctgaccaagccatggattcccgtgctctgggccgacggccgctgggacgagaaacaacccccgcgcgtgggaatcaaacagaccctgatcgaggccgggcgaatccgacaaatcgccgcgagtaatccgatggatcgcgtggcgattctgcggtttctccttgcgctgctgtattggtgcaaaggcaatccgccggacaacccgaacgagattttgagcgacacgttcccctcggattggttctcgaaactcgatgacaacaaggactgcttcaatctcttgggcgcggggacgcgattctatcaagaccggggcgcacaacggtgccgaggcgttacagacctgatccaggagatacccacgggcaacaacttttggcatttccggcactcgacggacaaggtggatggcctttgccccgcatgttgcgccatggggctgctgcgactgccgctattctccgtgagcggcctgcccaacctgaaggccgggatcaacggcaccccaccggtttatgttgtgccttggggcatgtcgctgctggagacgcttctcgcaaactgggcgccatgcaggcaacttggcgtgcccgcatgggttcaacccgacattcgcccaactccggatgaggatgtgcccctgcttacgggtttgacgctgctgtccaggcgggtttggctgcatgatcccgaaccgtccggcacatgcattggttgcggagcagaaaagacagcactcattcgaacatgcgagtttcaaacggctggccaacaaaagaatgaccgctggaacgatccccatgttgtctattcggacgagacgccacggaaatctccgaaagcgccggacctgacgactgcgggcagattcaaaatggaccggccgtggcctgatctgattgcccgcatagtggaaacgggcaagttcggttctggagacaaacctacatcgcttcttgttgtcgggtttgccactgaccaggcaaagaacattgatgtctgggagcggactattaccatgccgccgggagcatcaatccaagaaacagctgcctccttaatactgcaatggcaaaaagaaggcgcaggacttattccaagtcttgttcgtaacatcaagccaccaatcgagaaagccggttcccgaaagcatgtcgagattccgccaatggtggccgccattcgccctcatgtggagaacgccgtctccgcgaaagcgggcgacctgattgtcggcactggtgaggcatgggaacaggcggcgactgaatatcggccgatgatggagatgatcgcaaggtcgctatcccccggcttcacgacggcggcggttgaacggcggcaaaagatcgccggagcgataccggacatgcggccaaaaaccaaagccgtcaaggagtcgaagaaaggaggggacaagtgagtgcgaccgagcagtacattgacgttctgacacgactgaaaagcggcgaccttggcctgctgcgcacgcacgcgggacaaggactcgatgaatcggtcgacgggtttgatctgttcgcgggtctgtggtggcctttgcggcagaagaacgagcgagcaccccggcgcgcagtggcctggctgattgccaaactctacgccttttgtcccctaccgcaatcgcccggcgatacgctcgcgcgccaactgcgcaagtgccagccacatggagaggctgcgagtgaacgattccggcagaagttcgaccggatgctcatcatgccgctcgacaaaatagagccagcactgcgatgggcgcttaacgaggtcgcttcgaacagtcagaagctcgattgggtgaggctgacggacgacctttcaatctgggaacgtgaaaccacccgcctcaagtgggcggaacaatttctgggaaccgacgaaagggggcagtcatgctaatcgaaattcacgccattcagaaccacagcccggccaatctgaaccgggacgacttgggcgcgcccaagacctgttatttcggtggcgtcttgcgctcgcgcatctccagccagtgtatcaagcacagcatccgcacgagccacgagttcaaggctctctgcggcggcattcgcacgcggcagttggcgagattaatcgccgaaaaggttgaaggcaaggccgatgcaaagaagcgcgcggcaaagattctcaaggagtgcggcattgcgccaaaagatgaggacaggagcgacatgctcgtttacacaaccctcgaggcgatcagcgagatggccacgctcttgcagcaaggagttggaaaatccgatgaaatactggctcaagagtttgggacgctcatcagcgagcgggtggccgtgccggacatggccctcagcggcagaatgctggagaccggcatcctgaaagataccaccgttgatgccgctttgcaggtggcccatgcgatttcgacgcacgaggcgcgcccggaagtagattactatgtcgccgccgatgacattcccggcgacgatgcgggagcgggctatgtggacgaagccctgttcggctcggcctgtttctacaagtatttctcgatccactgggaacaactggtcaagaatctcgacggcttccagggcaacaaggagcatttggccgcgcacacgatcggcgcgtttattcgcggggccgcgctggtcaaccccacgggcaagcagaatagtttcgccgcgcacaatccccccgatggaatcctgatcgagatcaaggacacacccatcagctacgccaacgcctttgccagccccgtgcccgccaagggcgagcgcgacatgatctcgcaaagtatcgcgcaattgggccagtatgttcacgatctggataccggatacggcaagccgcaaaagcgcttctggttctcgcccaatcttcgctaccccttgagggtcgtagagaacaaacgggagatcgatcttgccgagaagaacatcaagtcgctcaacgatctgatccccgccgtgatcgccgccatcgggtttgactggacggaggtgcaaaaggtggtcgtcaattccgaggtgacccaatgagcgcgaataccctctttctacgcctcgaaggccctttgcaggcgtggggcaatcaggaatcgaagtttgtcatccggcgcaccgccgaagcaccgaccaaatcgggggtgatcgggatgctgtgcgcggcgttgggcgtttcgcgacccgaggccgccggcgagtggcttccgaagctcagcgacttgcgcatgggcgtccgcgttgacgcgccgggagtgcgctggtgggactatcacaccgtcggcgccggcatgaaaatgcgtactgccgagggaaaaaccaaggacggcgcgatgctcacgcggcgcgagtatctgtgcgacgcctcgtttctcgtggcgctgcaaggcgagtcgcctctcatcggcgaacttgaggctgcgctgcgaacgcccaaatggacgctctatctcggaagaaagtgctgccccttgtcccgtccgccgctggagcatcagccaggcgtttatctcgacctgatctccgcgctcgcatccgttccgtggcgcccgcgcctgaaaaatgaccggattcccgaaaccgtggattgtctgctcgactgggtgcgtacgcccgaacagcccgaagcgcccgacgatgcgctcgtctggtatgacgttccgctgacgttcgagcccccgtcgcatcgccctcgttttgtcatccgccagaaactgcgtgtgggacaggccggcgaggtcagcatcgccgaagaacccgcgcagaacttcacgccgcggccgcttcgtccgcgagccaactacggcaacaccgaatacaagaagattcggcaggcgcggctcgaccgcgactatcatctctgcgtcttctgcaagtcgccagcgacgaccgtgcagcacgtcacctatcgccatgccggcggagaagaacgcctcgacgagttgcgctcgctgtgccgcttgtgccacgacgccgtgacgatgatcgaatacggcctgggcatggggttggatcggatcaatcccgaagaggaatggcggggggacctgaacatacggaacctgatcatccagaaacggcgggagatcatcgagttccggtcgctcgaaacgcgtgagcgattgttcgcaaggcaagaccccaaactcgccgccgaggaggtggaataatgtatctctcgacgcttctcatcaatgtgggggacaaccccgaccggccgcgccccggccggctgtggctgcgcaacctccaccgcgtacaccaacgtctgtgcatggctttcccgtcagccgcgcgcaaggacaatgaccccaacatgctcacgccctttgcccccgagcactttgctgccggtcatgtccatgtcgaacggaacggtcaggtcggtttcctcttccgcattgatcctcagcccggcgacggcgttgtcattcttgtgctttccgcgctcaagccggattgggactacgccttcgggctgaagcccggtttggttgacccgcgcacgggacgtccaatcggcaacgcgggccacctcctggccgcgccgccatcggagccgcgccccctgaaactggcgatcaatgccggcagccgattccatttccgcctcgtggccaaccccgtcttccgtgtccgcgagaagtcgctagacgcgcgtggtaaccgccttgagccgaaatgggtcggtaagcgagtcccggttcccggtgacgaagcatcgttgcgcaattggctggagcggcgtgccgcgcgcgccggattccttctgaaggatctcacagttatacagtgcggctacgtatatgtgaacaagacgcgcgaggcagccggcggccagcgtctgcgctccgtgcggtatgaggggctgctggaagtcacaatgccggacgagttccgcgagacgcttgcccgcggcatcggtccagccaaggcgttcgggtttggtctgctctcgattgccccggtccgctgaatcggcgggtcgaggggaggttcttt

SEQ ID NO: 689 - DNA, 8595 bp, Artificial Sequence
  Synthetic Oligonucleotide
catatagtagatgcaagaatcgttccgaatctgccacaataactgcggattcctttcccaaagcctttttcgcccacggacaggccgtttgccccttcccactaacatcccgtaaacctccccttaaattcccgcccggccaatgggaactcagcgggaagtattttagatgtgtatgggatggggcaaatggggcttctattgatagtgggtatcaaaatgggaggaagtccacaaattgcgcgaattcatacgaattgcttttccagttacgctaccaactgtggtagataacctaaaataaaggacttacttcccaatcgggcaagtaatccatatgtttggagcccgaaggtcccagaacgattggccgacggggacatcgaccttcctgacgctggcgtcgagcgaggcacgagcatggacgccagcaacatctcctgtagtccatactcgcaagctcgctgcactccaggctcaccaacgttggaaggcaaattcacaaattcacaaccggtaaatatggcttgtgaatttgcaacctgctgatagacgggtaattatgaggctaattcacaaaaaaggggtctcttatacatccgcggaagccgattgtaaacaggatatgatgtatccacgctaccagtctataatacatatagaaatagtatatataatatataatagtattatatattattatatattgatattatatcatctctaccttcccttcatctcttgtttgcggcatgagccactgcaaaccggcattctcccctggtccggctggatataagagataagcgtattttgtgaatttgtcccccaactcactgtgccacaataacacacggattcacaagccatatttaccggttgtgaatttgtgaatctgaccttgccggccttaaggaagtttgaaattagagccctattttggacttgacaaattattccttggtaaatttggtgtataatagctatggggcataatgatgttagcctgtggaacggcctctgtaaaggatcaacaagctatcaaccctccccatgcgacaggagcttcaatgtattataatttgacagacaaaccctggatcagtgtgctacagcttgacgggcattctgccaggctcggcctggctgaggtcctgcgaaaagcacacacactgcgtttggcttacggcaatccgatggaccgcatgtccgttttccgtttcctcctcgccctgggctattggtgttttgccaatacaaaacaagcgccggtatcagataagccactgcctcaggcatggacggactggcttgaacaaaaccaagaatatttcgaattgttcggtgatggccccagattctaccaatccccaggaacatccagaatacgccccagcacggaccttatccacgagcttcccacggcaaacaatttctggcacttccgccatgtgaccgatttcatcgatggcatttgcccagcttgctgcgttaccggtctgctgcgcctgccactctttaccaccgtaggcggcagcggaatcggagccggcatcaacagaactcctcccttctatgccatctggcagggtgatagtctgtcggaatcgatattcctgaattgggaacccacttcccggttgggtgttcctgcctggctgaacccgtttggatcccaaaacgagaaggatgtagccttgctgactggcctcacctggctgccccgcaaggtattcctgcttggcccggtgtcagacggagcaaaatgcagcgcctgcggagaagagcatgagcctctggtctatgcctgcaacaatgaggcggtgaaagtgcctccgaaccttgtctggaacgaccctcacgcgatttaccgggatgacaataatggcctgactgcccaggtggctctgatgtccggggacaaatacactttcgctaacagggattggcataaacccctggtcggcttcttacgggcgaaaggcatgtctcggaccgccacgctgtttttagtgggcttcacaagcgttcaagccaaatgtgtggacgtttgggaaaagaccattgccctatccggaaaaacaagctccgaggaactgctggaccagatatccgaaagagcctactccctgcacaggatgaggaaacaagaccgccggggcgattacaaggaatccgtgggaatcaccgccgtggcggacatcatcccgcacgtagagcatcgggttgacgtccattcgggcgagatggtggaaaacagcggcaatgtctggcaggaagcggatgaagattacggattcttcatgaagcgttttgccgtttctctagtgccggaaattacggttgccgccaagcttgaacgagaacaactggctcggcgcaagccctggcccctaaaaccaaaatcaattaaaaaaccttcatccggaggcgataatgaatgagagcaccgtgaaatttgttcggagcctgggcgaactcaaagagggcgacctgggcttgctcagaaagctcaggggtcgccgtctggatgaatccctgccgggtttcgacctgttttccggcctgtggtggccactccgcagtataagccccaaaacccccaggcggaaggtggtctggctagtcaccaagcttttcgcggaattccgctttgagcaaaagaaaggcgccagcctgccttggctcatgggcagaatatgccgtggacttaaagaagaaaaagagttcccacgtgttttagccaggttcgaccgcttgctcacgctcgagttgaaccaactggaggaaccgctggcgcaagtgctcgcgattttaaaaagacatgacattgccagtctggactgggttgccctcatcgatgacctctccgcttgggaacgggaatcaaacagagcgatatggtcagacacatttatttcagcatttaataatcagcaaggaggaatcaaatgttgattgaaatacacatgatccaaaaccacagcccggccaacctgaaccgggacgacctgggcgcgcccaagacctgttatttcggtggggtgttgcggtcccgcatctccagccagtgcctaaagcggagcatcaggatgagcgatgaattcaaaaacttgctcgggggtatccgtacccgtcggttggccgagttgattacaaaagctacaggacaggactgcaggaatcaggcagaggaagttctgaacaaagccggtttgaaacacgaaaacggacatagtaagatgctggtgttcatgacccggaacaagatcgatgcccttgctcaaattgtcaccagcgaaggcctgagtgttgcagagaaagccaagaaagcggcagatgtaatatcgggggcaatacattcccctgacatcgctctgtgcggaagaatgctcgagcccgataccaaggacaagaacacagacaaggtcaagtgggaaaataccactgttgaagcagccctgcaggtgtcgcacgccatttcaacccacatcgcccgcccagaaatagattactatgtagcagctgatgacgagcctggcgacgacacaggtgctggattcatagacgaggcgatgtttgcttcggcctgtttctacaaatattactcaattgattggaataccttgataatcaacctccagggtaatgaaaagttggcagctcatactgtcggagcctttatccaggccgctgcactcactaatcccagcggaaagcagaacagctttgccgcacataaccttcccgatggaatattggtagaaataaaagagacacctgtcagctatgcaaatgcctttgtgcgaccggtgggaatcgttaaggattctgacttggtagaacaaagcattggccaactggccaactatgtgaaggatataagtgccggtttcttccctggacagatgaaaggcaacgctctgtggttctcgcccaatggacgttatcccctaaagcctcaacagggcacgctggacataaagccagtttgcaacctgctagaacttgttcgcgaagcagttgagatgttgggttttgaatgggatgatgtaaaaaacgagaaagtagagagttgaaatgtcttctccgcctaataccctgttcctgagattggaggctccccttcaggcctggggaagcaatgaggccaaattcgccgtgcgcaggacagccgacgcgcccaccaaatccggagtggcaggcctgctctgcgctgccctgggaatcagccgggccgaagccggacagtattggctgggtgaaattgccaaattgcgcatgggggtgcggatagaccgcccgggcatccgctggtgggattaccatactgtgggagcggagcagaagctgcgcatttctgacctgaaaatgcccaacggcctagttctggttggcactgccctggccaaaaacctgggcgcggacaagatcaaatccaaacccggggctttgctctcccgacgcgagtatttggctgatgccagcttcctggttgcgctccagggtgaaccggatatcgtggcacaactggctgaagcgctgaaaaaaccagtctggacgctttatctggggcgaaaatcctgtcccccctcccgtccggtggatgaacacccgccagggttttatgccagtctgaaagaggctttgcggtcgatcccggcgcaactgagggaaaaaggcgaaccgatacctgacagtgttccctgtgtgctcgactgggttccggcccatgatgacgtgcacgctccgccgaacgccgaagcgcattacgacgtgccggtgtcctttgagcctccccaccacttgccccggctggtgatccgctgtaacctgccattggaccgcaacttcgaggcagagaccgtgctttccggcaaagcctggcaaccgccccgcaaccgggcaaattacgacaatcctgaatacaaaagggtccgcgctgagcgtttggtgatggacaatgccgcctgcatgttctgcaaggcacccgccactactgtgcagcacgtgaattaccgacgcgccggaggcagcgagaagccggaggacttgcgcgccctctgccgcctctgccacgatgcctgcaccatgctggaatatggcagcggcatgaccatggaccgcatagatccctgtgaccccgcctggcgtgagcgcatcttggccaaacgcgaggaaataatcaaattccgctcgctggagcagcgcaggcgcaaactcgatccgaaggaggagaacggatgatgtatctatcccaactgctcatcgacacaggcggcaaccctgaccggccaaggcccgggcgcttgtggctgaacaatatctataatgtccaccggcggctcagcatggctttccccatgcgcaagcgcaaggaaggagacccgaggtttctgcagccctttgaccccgcagattttgaaaagcgccagttcctctttcgggtggacaacaacaccgatggagaaaatcaaagggcgatggttttggtgcagtcgtccctgccgccggattgggactgggctttccagaatgccacgggatttttggcagcccctccccaggttaaggaatacgatccccagttctcagcaggtcagcggctgcgcttccgcatcctcgtgaatgccagtgtcaaacgcaaaatcgacgagttgcgggaaggacccggaggaaaggaaaaaacgggaagggttctgcacaaacgggtcgcccttacctgggacacaaattccaacccaaaggatgcggtggcgcaatggtttgccgccaaggctggcagactgggcttcacgcccggggagaccgaactggtaagcctgggctgggtatacggttccaaaccggagccccggggaaattcgccccggcgtgagaacgaataccgtcccctgagataccgttccgccctgctggaaggttatctgacagtggatgatgcctttctgttccgggaagccttggaaaaaggtatcggcagcgccaaaggaatgggcttcggcctcctttccgtggttccggcaagtgatgcgtaacagagaccttcacctaatgccaaaaatgcgggaccgcttcacctatctctatgtggagcatgccaaaatagacaaagaacaacaggcaatcgcctttcacgatgccatgggctccactcctgttccctgcgctggactggccctgctgatgctggggccaggcgtatccatcacccatgcggccatccttgttttagcagaatgcggctgtttggtggcttgggtgggggaacagggagtccgcttttactcatccgggacagggaccacccgtagttccgccaaccttatgcgtcaggctgccgcctggtcaaatcgagatacgcatctgcggatagttcgcagaatgtatgaattgaggttcaaggaaaaactggacccaaccctctctcttgaacagataaggggaaaagagggagcgagagtacgggatacctatttcagactttcaaaagaattcgatgtgcccatgagtgcgaggaattacgacaggagcaactggaataaaaccgaccccatcaacagagccctgtccgttgccaattcctgtctctatggcatctgccacgccgcgatagtggccgctggctattcacctgccctgggtttcgttcatactggcaaacaactgtcatttgtttatgacattgccgatctttataaaatggaaacctccgtgcccgcggctttcatagccacagccgcaggggtcgataacctggacagaaggacacgcattgcctgccgtgaccagttctatcaatttggtctgctaaagaagatagtggccgacattcacgcccttttcggtattctggaaacttcggacgatgagccagaccttgctgatgtcgatccagccgtgccaggcgggctttggaacccagatgataaagtgagccccggcggcttgtcatggggtctggatgatcctggaggccatgatgatggttctggtgcttgaaaaagttccctctggcctgagaggagaaattacacgctggctcctcgaaatcaaggctggagtatttgtcggtcaggtatcggccatgataagggaaaagctgtgggacaaggccaggtctggttgtgccggtggaacttgtatcatgatttacagcaagcattgcgaacaaggctttggaattgagttttggggtgccgcggaaaggatagtgacagaatgggaaggattgaaattgatgaccaagcatccgtgatccatacttgaagcctgttcaatggcctcaaagcgtctactttcgaagtgtgttccccacctgcgtgggggtgaaccgcggattcgccaagcttgtccctaccgtgatgcgtgttccccacctgcgtgggggtgaaccgaagagcggttttgggcgtataacggcccgcttgtgttccccacctgcgtgggggtgaaccgcctctgggccttagctccgcacaggacaagcagtgttccccacctgcgtgggggtgaaccgctgagaccgctcgctccctgtccgtcattgacgtgttccccacctgcgtgggggtgaaccgtggggtgggggcggttgcccgccccgttccccgtgttccccacctgcgtgggggtgaaccggcaaccaaccgcataggcatagcgaaatcaaggtgttccccacctgcgtgggggtgaaccggacatctggaaagattgggtggcaatggcgatgtgttccccacctgcgtgggggtgaaccggtattcttgcccatcatggaaatgccgtgtccgtgttccccacctgcgtgggggtgaaccggtagctcaactacaagcggcgagccgaacctagtgttccccacctgcgtgggggtgaaccgactgccgctgctccagagtttatgaaacctctgtgttccccacctgcgtgggggtgaaccgatgttcgccggagaggcgctcgactacaccgagtgttccccacctgcgtgggggtgaaccgccctgaagatacaggagcagattgaccaggaagtgttccccacctgcgtgggggtgaaccgaacccaatgaacatggtgtaaaggaaatagaggtgttccccacctgcgtgggggtgaaccgaggtctgagtagtctgcgggccccaggatgaagtgttccccacctgcgtgggggtgaaccgtgatccggacggggctgggcgcggcggatgccgtgttccccacctgcgtgggggtgaaccggtggcttacatcagcctggtgaagaagccggcgtattccccacctgcgtgggggtgaagcggtagaagaacgttccggcaaacagagacgccagtattccccacctgcgtgggggtgaaccgggcgacacaacctctaccatacccgagggtcagtattccccacctgcgtgggggtaattccatttctgccggcgcacagacggcgccgggcagtccctgataatcgcttacttcagcagcagcatcctgatggttttggtttcgctggctgtgctcacccgggcgaaatacacaccgctggccactccccttccggtttcatcacgtccgtcccagcgcagc

SEQ ID NO: 690 - DNA, 8556 bp, Artificial Sequence
  Synthetic Oligonucleotide
cattcggttcacccccacatgcgtggggaactcgggttagaagaagtaaaggctaactatcacgccggttcacccccacatgcgtggggaactcctatactatatatatcgctgatatcgttgttacggttcacccccacatgcgtggggaactcacataatgttggtagtgtcataaccctgcctccggttcacccccacatgcgtggggaactcattatgtcggccttgaagatgagggatttttccggttcacccccacatgcgtggggaactctttcggatatcctttcatatttcacccctatgcggttcacccccacatgcgtggggaactcaggccgtaagcaagccgctcaatagcagtttccggttcacccccacatgcgtggggaactcgcgcaacttaaaagcggcatgactaaagcctgcggttcacccccacatgcgtggggaactcttcagtaagaaggaattccatgtaccggctgacggttcacccccacatgcgtggggaactcaggcgatatcttaaccattctcgggtccgccgcggttcacccccacatgcgtggggaactcgatggatcgtgtcccaatggtgatgataacctcggttcacccccacatgcgtggggaactcgttatggttaatgtgtctggctggcgtgttgtcggttcacccccacatgcgtggggaactcttgcgacgtacggggactcaatcgatcggaaacggttcacccccacatgcgtggggaactcggttgccgcagggtaagtgttgctatctctgtcggttcacccccacatgcgtggggaactcgtcgatataatcaatatgaagattgacgccgcccggttcacccccacatgcgtggggaactcggaggagccactgtccagggtgatagacgatccggttcacccccacatgcgtggggaactccatggtcaaacccttgacatagtctccagcatcggttcacccccacatgcgtggggaactcgctgaattgctgcctatcatatttacgctaaccggttcacccccacatgcgtggggaactcaccttctctccacattctttgcacttgaattgcggttcacccccacatgcgtggggaactcccggacggattgatgatgttgcccgtgccggtcggttcacccccacatgcgtggggaactccccacattccgggcagggatcatccagtttatcggttcacccccacatgcgtggggaactcttgaaatcacagaggaaaagtacagcgacttacggttcacccccacatgcgtggggaactccaacatatgaacggtgacactccagagggttcggttcacccccacatgcgtggggaactcctcaccgttgacggcacgttggaggacaacgacggttcacccccacatgcgtggggaactcgacatacatggccccgctattggccccgttcacccggttcacccccacatgcgtggggaactcgccccggttaagaccggccatttgagagctttccggttcacccccacatgcgtggggaactcgatatccggtgcaaaaccttaaacccccaggacggttcacccccacatgcgtggggaactcaagagcgcaagctggcgtttcttagcggcctgcggttcacccccacatgcgtggggaactcgggtcgtgttcaggggtactcttgcagtccaccggttcacccccacatgcgtggggaactcatgcaacacctaaagcacaggtaacggccatacggttcacccccacatgcgtggggaactcacgcccgggataggtttgccatcgtacttatacggttcacccccacatgcgtggggaactctctggaaaactgtagctaatcgaaaatggttccatatttaactaagttgtcttagtgtcaacagctttgtgtgattgcattaaagcaatcccttcataatccacaaatttacgctccctctcaccagattgacgataagaaaacccctgcgggttatgctctgtccaaacctgcattactgtacccgttccccccaatttttttatagatcggttccagagttcatccctaatcctggcgcttggattaccaaggaatatccctgttttcggttccagaagccagcgtgacaatgcgcccttcaagctcatcggcactttctccaatatcatcactaacacctaacacctccgcaatatccggtattattctttccataatcttgtgttcataaaaagcggtacggcattccatgcgaatggcccgttccaggtcaggcggcttttgagaaaccatcttaaaagctaacgggattgtaatctcggttttgtataaatcggccatatcgtaaacaaagcttaacatcttgccagtatggatgaatcctagtgccggtgaataaccggctgatagtataccggcgtgacagattccataaaggcaggcatttgcagtagaaagtgcgcggttgatcgggtctgccttgctccagtcagtctggtcataacggcgccctttccattcaacaccatattgagttgatgccgcagaataaatgcgccgcacgcggataccctccatgccgcggatactttcaaggctgaccacaggttgtatagattcattgaagcggaatcgatacatgcgccaggccacttccattctttttatctcatcggaagccagtcttgcctgccgtatcagccgccgcgcactgtaagtgccacctatgcttgcggaatagagccgtataccgtcctgtccagtccaggctaaaaggcaattatttgcggataatgattttactgcggcatgggtgatggtggtacctgggccaagcatgaccacactcaattgatcaattggaactcttgtcactgattcgccctgatgaaaattcaatccatcagagtcaacgtctattcgtcccatctccagataaagataactccagcggtcctggaagcgcggcaattcatatagcgtacggatggtcagtcactccccatagcgatagttaacaatccgaggccgaaagctttaccggcaccgacgcctcgcattacggaatcacgaatagattcaggagcaattacctggagtttgccttcaaagcgggcatagaataagcgcttaagccgcccatctttctccccatccgctttaatatcggcaccgttacgatcacccttatctttgaaagcctccacatatcccgtatgcacgttggtgagtttctccacctcgaagccacatcgcattgcgcgggaggtaagccatgcctcaagctcattcgcaggcacaggcaccctcctgccgaagttgtttttcccctcagggcgattttccttatctttctttcgcgtggcgttagccatcaggcggaagttgagaatctgtccatcccgaaattgcggatcatatggcttcatctgtgggggtgcagccagaaggtacgtggcattgtgaaaagcatattcccaatctggtttcaacgcagattgaacgatgattacgggattgccgtttgtcctggggtcgagccgaaaaagaaacgcctggtcagccgtacgctgtccatgaacatgctgaaaatcatcgggacgaaaacactttacgaagtcagggtcattttctttgcgttcagaagacgggaatgccatgcacaaccgctgatgaacacggtacatattgcgcagccacagcctgccgggccgcggtaggtccgggttatctcccacgttaataagcaggtaggataaatacatatctattcaacctcctccggactgagcctccggcgacgggtctccaatgagcgaaacttgataatcttctggcgattagtgcttatcagatcccgccactgtgaatcttcagggttaatacgatcaagtcccatacccaaaccgtactccaccatagtcacagcatcgtggcaaagccgacatagcgagcggaggtcatcctgcgtctcttctccaccggcacggcggtacgtaatatgctgtacagtattagcgggcgctttgcaaaaaacacaaagaccgaagtctgcttccaatcgctccgcgcgagccctccgatattgagtgtttgtatagtccgctcgcgggcggagtggtctgggtgtttcgttctgcgctggcttttctgcaatactgacatcagtcccgatttgtagttcgcggcggataacaaggcgaggggcacaagaaggtggctcaaaagttagagggctgtcataccagaccagagtgtcaaagggcacttccgcctgtcctgctgtcggctgccattcaagaagacaaccaaccgtctgaggtgcaggatccgtctgaagtctccgccgccacggtacagactttagtgctgtgagcaggtcagggaaataatctgccgtgtgttcaagcaatgggcgcgaggggggacagcatttacgccccaggcatatcgtccatcttgggttctctatggctgcctctaatgtggcgatgagatttggctctccctgtagcgccacaagaaaagaagcatcacataggtactcccgccttgtgagcatggccacggatgtccccgcctcctttacagctttccttttaccggctgtacgcatctccatgcctgcacctacggtgtgatagtcccaccaacggacaccgggttgatcaacccgaacgcccatccttatagtatttaatttgggcagccactccgaggatgcttgggctcttgagacaccgagcgctgcgcagagcattccgcttactccagattttgtaggcgcttccgccgtacgacggacaacgaacttggattcatggtcgccccatgcttgaagagggccatcaagcctcagaaacagggtattggcattcatggattcaccgatgaatttatgaccgctttcttaaccttttcccagtcaaaaccaattgctttgatcacatcctgtataagcacatccattgatttggtggggctgtcaccaagggatacttcctgcttattctcaattactgttaaggggtatcgtagattaggagagaaccaaaagcgttgttgcggcttgccaaaaccggtgtccaggtcgtgcacatattggcccaactgcgcaatactctgcgagattatgtcccgttcgccctgagcaaccggtttcgcaaaggcgttggcgtagctgataggtgtttttctgatttccactaagatgccatccggataattatgcgcggcgaagctattctgcttgcccgttggattcaccagggctgccccgcgaatgaaagtgccgacagtatgggctgctaagttagtatccccatttaggttcttgaccagtgtttcccattgaatagagaagtacttgtagaagcaggccgaggcgaacatagcttcaccaacgaagccggcgcccgcatcggctccggggatatcgtctgcggcaacgtaataatccacttcggggcgggcctcgtgagtagagatggcgtgcgctacctgtaatgcagcttcaacggtagtgcccaggtcatcccataccccttgtacagactcacttggctccagcatacgcccacacaaggccatatcgggagcaagaacgcgttcagcgattatcttggagaattcccttgcaagttcgtccttgcctttcccgctctttctctgtaggagactggccatttccttgatagcatcacgtgtggtatagataagcatcttgctcttgtctttctctgtcttgaacccgcaatctgagaggattgtctcagcgagttccctctcttttggtccgcccttgacttcgtccgctatcaatttcgccaattgtcttgtgcggacgccgccgagtatctctttgaactcatcgctcatgcgtatgctccgcttgaggcactgactggaaatgcgtgagcggagaactcctccaaagtagcagctcttgggtgctcccaggtcatcccggttcagattggccgcactatggttctggatcatgtgaatttcaataagcatggttcctcctttaataatttagaaattgctccgcccatttgaggcgggtcgcttcgcgttcccaggcggacaggtcgtcggtcagccttacccagtcaagagttttgtcgtggtaagctatgaccgataaggcccaccgcaattcaagttctaccttgcccagctgtaataaaagcaactcatcaaatttcttttgaaaccgttttttttctcgcttttcatttggcaagtagtgcgccagtcggcgggcaagcgtatcaccggtcgattgcgggatcggtgaaaaggcataaagcttggcgacgagccaggccacctcccggcgtggtgcaaactggctctttttctgcaaaggccaccacagtccagtgaataggtcaaagccctgtaccgtctcgttcaggccttgcccagcgtgcgtacgcaacaagccaagatcgccgggctttagccttgttaggattccaatatattgctcagtagctgtgggactcatttgcttcctcgctttaccctcacaggttcccccggttttgctgtttgccgaaccatctccggtagcaaccgtgccatttttcgccgccgaccgactgcctctgttgtaacacccggggatagggctccagccaccaccttcatcatttggctgtactcctctttggcctgctgccaggcactgtctccaccagtaagaaaatgagctgcctgctgcgaaacgcgactctcaatgtggggtcgaacagtggccatcattgccttaatctcaggacgtttcgctgaaaatattctgccgtctaatcccttgagttcgttgctaatatttaaatttaattgctgccactgatttagcatctctatacatagttctacctgttcgggcgaacccgcccaggggaaaaatgattcagaaacctccctgcatttggcttgatcagttgaaaagccgacaacccaagccttgacctgaccattttggggattccgcagcaattctgccattgttccggcccactgacctgcactaacatctaccttgctcacggagtcattagcgtgcaatgaaatctcccccatcctactttgcacgtatattacgtgtgggtcatgccagatgcgctggggagtattatccccggtcttagtactacctttgccggcaaagacgctggacagtataaggtggtcctggcgaccgcaggaaatgcagcgagcaacagtttcctgtggttcacctaaccacacccgcctcggcagccaggtcaatcctgttagcaacggtacctggcccgctttaggcagaggtagatcgggtttctcccatgcaggtgaccccaagccactcactggccaccaggacagtagcagtgcgtctgcaagagtattgccgattggaaccacatacatgggcggcttggcattgatgcctggcggattgccacgcccaccctgagtggagaatactggcaaccgtaccagacctaatgcacagcatgcccgacataggccgtctttattatcggtagagtgccggaaatgccagaaattagtgccagtaggtatctcatgtaaaagataatttactgtgagctctttgtcccccgcttgccggtactgataaaaccgcgtgccaccaccgagtaaattgaaacactctctgttggcatcgagtttggtgaaccgatcaagagggaataatctttctgaggcaatatctgtggctactggcggattcccttggcaccaataaagtaacgcgagcatgaaccggaagatagccacgcaatccatcggattgctcgccgcgatctgcctaatgcgattggcttccctaaatgcccctttgattcccacatgcgtgaatttgccgtcagtataaagaactggaatccattcttcctcaagcaggttgtagctcaaaagtattcacctccaatcctcatttccaactatctaccaaattgaccggttcatttcgctttcgcgatagcaacttgacctgcctccctgatgctccgctatacctggattgcccatatcaattcgccgttaggcaattgtcatcaatattggcatcaatcgatatagtatatcttaaccgcagggttgtcaatcattccccatgtcttgtccgaataaagtccttcttccacggctttggaagacggctggacagtatctccgtaacgggacaatcacggttacgacaacggcggcttataaaatttcataatgatcgtaaatccatatttgccaatatctcataaatcatggtgttctatccggaatcatcatctgatatgctctgctcgcaatccgtaacctgccagctacaggcagtgtcgctttcctcgtcgcagttttcctaattcggtaatagcggtcatttcctgtgtgatgctacactcggttgcccgccatcctgttttgacatactgttgtcacacaaataacgtgtagtagttcagtactcgctgccggcgggcacatcatccagggcagcgcccccct

SEQ ID NO: 691 - DNA, 8542 bp, Artificial Sequence
  Synthetic Oligonucleotide
gattcgaacccccgagcccctttcggggctaacggttttcaagaccgccggtttcaaccactcacccatccctccgggaagtccacttcaacggtatgaagcaatcggctttattttagcagaacaagcgccggctgaagaaccggttgcggagccttttgccccggggtcgaacttgggggagcgtgctcgcatgaaattcaccaaacatcagtattctcggccgaaggatggcttgttcgttaaagccttccacaaaaaaccccctgcatttctcgaaaaattttcgtaaaatgtgaagccttccggtgaacctccggcaaagaggaggggggcatgagctacaacctacttgaggaagattggattccagttctatggaagactggaaagctcactcgcgtcaacctcattcaggtgctcactgaagcacactgcatccgccagattgccgccaccaatcccatggaccgcgtggccaccctgcgttttctgctcgcactgctttattggtgcgtaggggatccaccgcgcgatccaacctcgggtggcaccttttccgaagcatggtttaccaaactctatgaaaacaaggaatgcttcaatttgctgggagacggaatccggttctatcagtaccgtccaggctcgggaaaagacaaaaagctttccgtcaactatctcattcatgaagtgccgacggggtccaatgtacggcatttccggcattccgcggacggagttaacggcctttgtcgggcgtgttgtgccacagggttgttgcggctacctgtattcaccacccaaggggggaaaggaaaatcaccaggcatcaatggcaaaccccccgtctacgtcatacctctcggacgatccctgtgtgagaccttgtggctctcttggcgaccacagtcgaatttgggtacgcctgcatgggagaagcctgacatggcactgcccaagactggcgaagtccccctcctgaccgggctcacatggctgccgcgacgcgtttggctggacgaccccatggaacccgaagtcccttgtatttgttgcgggcgaaaagagcttctgattcggcagtgcatatttgccggcatcggtagcggcaaggcggatggccgagtttggaacgacccgcacgtcgttcgtgacaaaaatgtggtgatgacaccaagtaatgcccttgccgattccgataaagcggctgacgattgggcaaagataactgcggcgatcctcatcgataccaagcacacttccagacgccgattctgggttgttggtttcgcaagtaaacaggacaagtacctggaagcgaaggaatttgagattttccttcaacctaccacggaaagtgctcagattcaagatgccatcaaggagatcgagagatggcaaagagaagcagcggggctggcaaaaagagttgtcagagtggtgaagaacaagaaatcctcgcgaaaacatgttgagatcgacgccctggtaaaagccattcggcctcatatcgaagccagtgcctctgtgaaattgaaccgcctcatttccgacggccacccggcatgggagggggcggccaactactatgaagggatgatggttgccatctctagatcaatttctccggattttacggccacagcgctacgacagcggcaggaaattgcgcgcgttaaaccagacatgcggttaaaaacagagaaggcagggaatctgaccgcaagagaggcgataagtgactccaacagaacagtacatcaaacgcctgacacacctgaagaccggtgacctcggattgctgcgcacccacgcggggcaggagctcgatgagaaggtagagggcttcgacctgtttacgggcctatggtggccgctgcgtcaaaggaactcgcgggcaccccgccgtgacgtggcatggctcgtcgccaagctctatgccttccggccactcgagtattcggcggaagagacgctagctttccttcttgggcaatgccaaccagaagttggcaagcgggagaagttcatccagcggtttgataggatgctgactctgcccatccgcaaaatcgaacctgcgttgcaatgggcgcttgacgtgctcaattcaaagggcatgggactcgactggataaaactcacggatgatctttcggtttgggaacgagaatccacccgtctcgaatgggcaaaggaatttttgaagtctctaggaggaggataaatgctgatccagattcacgctattcaaaatcacgctccggccaatttgaaccgagatgacttgggcgcgcccaaagcctgctatttcggcggtgtgctgcgctcgcgcatctccagccaatgcctcaagcgcagcatccgtagaagcgacgagttcaggcagttgctaggcggtgttcgtacgcggcaattagcgaaattgatagctgacaagattcccgagaaagatgtgaggaagcgtgcggagaagattcttgaaatatgcggattcaagccctggagatcggaaggcgagtccgaaaattctgagaagagcaaaatgcttgtctatactaccaaacaggctgttgaagagatggcgaacctcctccgaaacagcgatggaaaggctgagagtgaactggcggaggggttcgccggacttattgcggagcgcacggcagttccggacatggccttgtcgggccgcatgctggagccggacaaatcttctacggtttgggagaagcgtgatactaaggtggaagcagcacttcaagtggcccatgcaatctccacccatgaggcccgccccgaggtggattactacgtcgctgccgatgacatccccggcgaggacgcgggtgccggctttgtggacgaggctatgtttgcctcggcctgtttttacaaatatttctcaatccactgggagcaattggtgaaaaacctcatggggtttggggaagaacatgaaaagctggccgcacatacggtgggcgcattcattcggggggctgcgatggtgaaccccactggaaaacagaacagtttcgccgcgcataatcctcccgatggcatgctggttgagatcagggacacccctctcagctacgccaacgcttttgcgaaacccgcggttgctcagggtgaacgtgacctcatcgcccagagcatcgcgcagcttggccaatacatccacgacatggacaccgggtacggtaagccaacggagcgattctggttctcgcctaattcccgccatcctctgctggcttacatcgaggaagaacaagatggaaaaaagaaacgacgtgagattgcgcttaccgacaataatctcagttcgctcgatatcttaattcaaaaggtcatcgagaaaatcggccacaattggcatgaggttcagaaaattactgtgaacgcagaggtggtttgatgagggccaacaccttatttcttcgcttggagggtcttcttcaagcctggggagaccaccagtcaaagtttgtcatccgacggacggcggaagctccgaccaagtctggcgttgtcgggatgctgtgcgccgccctgggggttagcagatgtaaagcctctaatgaatggcttcgaaagctgggctcgctttgtatgggggcgcgcattgatgcgccgggtgtccgctggtgggactatcagacggtcggagccaaggtcggaatacccagggcagatggtgctggcgctaagagaacggccgcgacgggggaaattgaaactctcatcacgcgtcgcgaatatctctgcgacgcatccttcctgatcgctttgcagggtgaggccgacctgatagcgcagttggagaccgcagtaggagcgcccaagtggacgctctatcttggtagaaaatgctgccctccgtcacgccctttgctggaaaaacccgcaagcggtgagtttcccgatttactctcagcccttaagtcgattccttggcgcaaacggatgaaggaggatcaaccgcccaaaacggttgactgcctgctcgattggcagcccacggcagatcagcctgaagcgcctgatgatgccttcgtctggtatgatgtgccccgcacctttgaaccaccctcgcacgaaccccgattcgtgctccggcgtcaattgccagtggccatcgagggcggcgtgggcgtcgcaggccagccggcgcagaccgaaactccgccgccgccccgcccgcgggccgattacaccaactccgcctacaggaacaagcgcctggagcggcttgcccgcgaccagcagctttgcgttttttgcaaggcgccagccacaacggtacaacacatcacctatcggcgcgccggaggcaatgaaagcttggaagatctgcgttcgctctgccgtttgtgtcatgacgccgtgaccatgatcgagtatggtttaaacatgggtctggatcggatcaatcccgaagagccacgttggcgcgaccagattattgccaagcggaacgagatcatcgccttccgctcgctcgaaacgcgtcggcgacgcctcgctccagaggaggtggaatagccatgtggatttcgtgtctcctgatcgacgtcggtgacaatcccgaccgcccccgccccgggcgccaatggctgcgaaacctctatcgcgttcaccagcgcctttgcatggcgtttccctccgaccgcagaaagcagtacgacccagagtttttaaagccctaccagccagaggattttgggaacggccatgttcatgttgagcgcgggccgaccgctggctttctcttccgccttgatcccgaggaacgatgttgccgcgaagcatcacaggctcggcattccggcagtcgggtggtaattctggtacagtctgcaccaaaacctgactgggaatacgcctttcacaacgcctgttatctgctggccgccccgccggaagtaaagccattcaacccgtgctacacaacgggtcagcggcttcgattccgcctccttgcgaatcctacccgccgcctcacggaacactcgcttggagccgacggacagctcgtcaagaaatgggcgaatacggataagaaagggatgcgcgtgcctgtgccgacggatcaactcctcgattggatcaatcggcgagctgaaaaggcggggttttctatcgagaaggattccatcaatgttttgccgggttatgtgttcgccaacaaaagaggggacaggcatggaattcgcctgcgctctgtccgttatgacgggcttctcagcgttaccgagcccgcactgtttcggcaagcgattatacaaggcatcgggccaggcaaagctttcggcttcgggctgctttcggtagcgccgtgttgtaccggaggtctatgaccgccatttttgacctcctgccccgtttgattctttacagtggagaccacaccatcgccacacttaccactaccgggcccttcctcagcgaagagggtaattccccgccttggttaaggaggggataaggggtggttggtgtaaagaacgggctgagagaggacgccagccgcctcgatcatcgatggggcgcagctacaaaaacatgaaagacctccatctgttgcccaaagtccgcgatagttccagtttcctttacgtcgagcattgcaagatcgaccaggagggcaaagcgatcgccattcacgacgcgaagggccgagtgccagtaccctgcgcgtcattgctggtgctgatgctcggtcccggcaccagcatcacgcacgcggctgtgcgatctcttgctgacaatggctgcaccatcctctggacgggcgaagagggcgtccgaacctacgctcagggcatgggagaaacgcgctcttccgaacgcctgctgcatcagtcacgcctctgctctgcgcccgaattgcgcttcatagtggttaaaaggctttacaagatgcgtttcccggagaagctggacccctccctgaccatccagcaattgcgcggcatggagggtgtccgggtgcgcgacgcatacttccgcgccagccgcgaggcgggcattccgtggtccggccgatcctacaaaaccgataactggcaggccgccgatgccgtcaatcgcgccctttcggtggccaacagttgcctctacggcgtctgccacgccgccattgtttccgtcggttattcaccggccttgggatttattcacaccggaaagatgctctcctttgtctacgatgttgccgacctgtataaaaccgaagtcaccattcccctcgcctttcgggccgcagccgaaggaatgggctttcaggaaagccacgtaagaaggaaatgtcgcgacgcgtttgtggaaagccgcttattacagagaattatccccgatatcgaccgcgctctcgattggggttcttcggaaggtgggcagggggatgccagactggatgcccaaccagcggctccagggtggctctgggatcccgaagtgggggcggtggagggaggcatcaaccgcggagatgatgctgaaggaggtgacaagccacggtcgtgatggtgctcgaaaatgcccctcccagcgtgcgcggggaactgacacgatggatgctggaattgcatgctggcgtttttgtgggaaacatttccgcgctggtgcgggaaaagctctggcaggaagtctgccgcaaattggcgggtggggctggaattctggtctacaatgctgccaacgagcaggggtttgatatccgcttttggggatcgccctctcggcgggtcgaaaacttcgagggacttcttctagttcgcgggccataagccctttaaatcgcagcgtcgtccccacgcgtgtgggggtgaaccgttcatcggcgcccggccaatcaagattacgcggtcgtccccacgcgtgtgggggtgaaccatgatctgaatcgcttccgtaatcggccttcttgtcgtccccacgcgtgtgggggtgaaccgccccgcggacggccaacgaagggcgtgagacagtcgtccccacgcgtgtgggggtgaaccgcttcgccgttccgcgagactgcaggcttggatgtcgtccccacgcgtgtgggggtgaaccgcttaaccctatcccctatcccaaacccttcccgtcgtccccacgcgtgtgggggtgaaccgacaactcgcgcgataacagccagttacggaccgtcgtccccacgcgtgtgggggtgaaccgtccccaacgacggggacaatctgcgggaagctgtcgtccccacgcgtgtgggggtgaaccgtgtccggtttgtgccaaaattttaagcaaggcgtcgtccccacgcgtgtgggggtgaaccgtccgtgtggaacgttgtcatggtacttcgttcgtcgtccccacgcgtgtgggggtgaaccgctgccgctgaaggatgggatttggcagcggtcgtcgtccccacgcgtgtgggggtgaaccgcgccatgttggggtgggatgtgtcgtaggcccgtcgtccccacgcgtgtgggggtgaaccggacgccagcctcgatgagaaaaccatcaccgcgtcgtccccacgcgtgtgggggtgaaccgctggctgcggtgcttgaggccaatgtcacactgtcgtccccacgcgtgtgggggtgaaccgcctccctcttttccaccgaccttcccgcctgcgtcgtccccacgcgtgtgggggtgaaccgattctggctggattaaaagcagcggaccggcagtcgtccccacgcgtgtgggggtgaaccgcgtaccatgaatctgacaaaccctttcctgacgtcgtccccacgcgtgtgggggtgaaccgtcttgacttggagtgatcagggtgatatggaagtcgtccccacgcgtgtgggggtgaaccgtcttgacttggagtgatcagggtgatatggaagtcgtccccacgcgtgtgggggtgaaccgcgatgcgagagtttgaagaaaagaccaatgccgtcgtccccacgcgtgtgggggtgaaccgaaggagctgctggccgatgctgacggcgaaccgtcgtccccacgcgtgtgggggtgaaccgatcctcgcgagtgtgttagtccgttctgtggcagtcgtccccacgcgtgtgggggtgaaccgatgtgcccgcgaagctcctgatgacgcgcgacgtcgtccccacgcgtgtgggggtgaaccgagcaagaaaattggcactcttgaagagctaacgtcgtccccacgcgtgtgggggtgaaccgttggcgcggagaatcttttctcggtccgtaaagtcgtccccacgcgtgtgggggtgaaccgataatgccgcccgactttcaggaggtgcggatgtcgtccccacgcgtgtgggggtgaaccgctgaaggaattgaaagacgaaaaatcgctgaggccatcccccgcacgcccggagggtgaaccggctaatgtcaaatctcagtgtcgaaattgcgaataggcagaggtaaaccggggtttgtaatttaagatttcagattcccgtccccgcacggcccatgcctaattctc

SEQ ID NO: 692 - DNA, 8542 bp, Artificial Sequence; identical to SEQ ID NO: 691
  Synthetic Oligonucleotide

SEQ ID NO: 693 - DNA, 8541 bp, Artificial Sequence
  Synthetic Oligonucleotide
attcgaacccccgagcccctttcggggctaacggttttcaagaccgccggtttcaaccactcacccatccctccgggaagtccacttcaacggtatgaagcaatcggctttattttagcagaacaagcgccggctgaagaaccggttgcggagccttttgccccggggtcgaacttgggggagcgtgctcgcatgaaattcaccaaacatcagtattctcggccgaaggatggcttgttcgttaaagccttccacaaaaaaccccctgcatttctcgaaaaattttcgtaaaatgtgaagccttccggtgaacctccggcaaagaggaggggggcatgagctacaacctacttgaggaagattggattccagttctatggaagactggaaagctcactcgcgtcaacctcattcaggtgctcactgaagcacactgcatccgccagattgccgccaccaatcccatggaccgcgtggccaccctgcgttttctgctcgcactgctttattggtgcgtaggggatccaccgcgcgatccaacctcgggtggcaccttttccgaagcatggtttaccaaactctatgaaaacaaggaatgcttcaatttgctgggagacggaatccggttctatcagtaccgtccaggctcgggaaaagacaaaaagctttccgtcaactatctcattcatgaagtgccgacggggtccaatgtacggcatttccggcattccgcggacggagttaacggcctttgtcgggcgtgttgtgccacagggttgttgcggctacctgtattcaccacccaaggggggaaaggaaaatcaccaggcatcaatggcaaaccccccgtctacgtcatacctctcggacgatccctgtgtgagaccttgtggctctcttggcgaccacagtcgaatttgggtacgcctgcatgggagaagcctgacatggcactgcccaagactggcgaagtccccctcctgaccgggctcacatggctgccgcgacgcgtttggctggacgaccccatggaacccgaagtcccttgtatttgttgcgggcgaaaagagcttctgattcggcagtgcatatttgccggcatcggtagcggcaaggcggatggccgagtttggaacgacccgcacgtcgttcgtgacaaaaatgtggtgatgacaccaagtaatgcccttgccgattccgataaagcggctgacgattgggcaaagataactgcggcgatcctcatcgataccaagcacacttccagacgccgattctgggttgttggtttcgcaagtaaacaggacaagtacctggaagcgaaggaatttgagattttccttcaacctaccacggaaagtgctcagattcaagatgccatcaaggagatcgagagatggcaaagagaagcagcggggctggcaaaaagagttgtcagagtggtgaagaacaagaaatcctcgcgaaaacatgttgagatcgacgccctggtaaaagccattcggcctcatatcgaagccagtgcctctgtgaaattgaaccgcctcatttccgacggccacccggcatgggagggggcggccaactactatgaagggatgatggttgccatctctagatcaatttctccggattttacggccacagcgctacgacagcggcaggaaattgcgcgcgttaaaccagacatgcggttaaaaacagagaaggcagggaatctgaccgcaagagaggcgataagtgactccaacagaacagtacatcaaacgcctgacacacctgaagaccggtgacctcggattgctgcgcacccacgcggggcaggagctcgatgagaaggtagagggcttcgacctgtttacgggcctatggtggccgctgcgtcaaaggaactcgcgggcaccccgccgtgacgtggcatggctcgtcgccaagctctatgccttccggccactcgagtattcggcggaagagacgctagctttccttcttgggcaatgccaaccagaagttggcaagcgggagaagttcatccagcggtttgataggatgctgactctgcccatccgcaaaatcgaacctgcgttgcaatgggcgcttgacgtgctcaattcaaagggcatgggactcgactggataaaactcacggatgatctttcggtttgggaacgagaatccacccgtctcgaatgggcaaaggaatttttgaagtctctaggaggaggataaatgctgatccagattcacgctattcaaaatcacgctccggccaatttgaaccgagatgacttgggcgcgcccaaagcctgctatttcggcggtgtgctgcgctcgcgcatctccagccaatgcctcaagcgcagcatccgtagaagcgacgagttcaggcagttgctaggcggtgttcgtacgcggcaattagcgaaattgatagctgacaagattcccgagaaagatgtgaggaagcgtgcggagaagattcttgaaatatgcggattcaagccctggagatcggaaggcgagtccgaaaattctgagaagagcaaaatgcttgtctatactaccaaacaggctgttgaagagatggcgaacctcctccgaaacagcgatggaaaggctgagagtgaactggcggaggggttcgccggacttattgcggagcgcacggcagttccggacatggccttgtcgggccgcatgctggagccggacaaatcttctacggtttgggagaagcgtgatactaaggtggaagcagcacttcaagtggcccatgcaatctccacccatgaggcccgccccgaggtggattactacgtcgctgccgatgacatccccggcgaggacgcgggtgccggctttgtggacgaggctatgtttgcctcggcctgtttttacaaatatttctcaatccactgggagcaattggtgaaaaacctcatggggtttggggaagaacatgaaaagctggccgcacatacggtgggcgcattcattcggggggctgcgatggtgaaccccactggaaaacagaacagtttcgccgcgcataatcctcccgatggcatgctggttgagatcagggacacccctctcagctacgccaacgcttttgcgaaacccgcggttgctcagggtgaacgtgacctcatcgcccagagcatcgcgcagcttggccaatacatccacgacatggacaccgggtacggtaagccaacggagcgattctggttctcgcctaattcccgccatcctctgctggcttacatcgaggaagaacaagatggaaaaaagaaacgacgtgagattgcgcttaccgacaataatctcagttcgctcgatatcttaattcaaaaggtcatcgagaaaatcggccacaattggcatgaggttcagaaaattactgtgaacgcagaggtggtttgatgagggccaacaccttatttcttcgcttggagggtcttcttcaagcctggggagaccaccagtcaaagtttgtcatccgacggacggcggaagctccgaccaagtctggcgttgtcgggatgctgtgcgccgccctgggggttagcagatgtaaagcctctaatgaatggcttcgaaagctgggctcgctttgtatgggggcgcgcattgatgcgccgggtgtccgctggtgggactatcagacggtcggagccaaggtcggaatacccagggcagatggtgctggcgctaagagaacggccgcgacgggggaaattgaaactctcatcacgcgtcgcgaatatctctgcgacgcatccttcctgatcgctttgcagggtgaggccgacctgatagcgcagttggagaccgcagtaggagcgcccaagtggacgctctatcttggtagaaaatgctgccctccgtcacgccctttgctggaaaaacccgcaagcggtgagtttcccgatttactctcagcccttaagtcgattccttggcgcaaacggatgaaggaggatcaaccgcccaaaacggttgactgcctgctcgattggcagcccacggcagatcagcctgaagcgcctgatgatgccttcgtctggtatgatgtgccccgcacctttgaaccaccctcgcacgaaccccgattcgtgctccggcgtcaattgccagtggccatcgagggcggcgtgggcgtcgcaggccagccggcgcagaccgaaactccgccgccgccccgcccgcgggccgattacaccaactccgcctacaggaacaagcgcctggagcggcttgcccgcgaccagcagctttgcgttttttgcaaggcgccagccacaacggtacaacacatcacctatcggcgcgccggaggcaatgaaagcttggaagatctgcgttcgctctgccgtttgtgtcatgacgccgtgaccatgatcgagtatggtttaaacatgggtctggatcggatcaatcccgaagagccacgttggcgcgaccagattattgccaagcggaacgagatcatcgccttccgctcgctcgaaacgcgtcggcgacgcctcgctccagaggaggtggaatagccatgtggatttcgtgtctcctgatcgacgtcggtgacaatcccgaccgcccccgccccgggcgccaatggctgcgaaacctctatcgcgttcaccagcgcctttgcatggcgtttccctccgaccgcagaaagcagtacgacccagagtttttaaagccctaccagccagaggattttgggaacggccatgttcatgttgagcgcgggccgaccgctggctttctcttccgccttgatcccgaggaacgatgttgccgcgaagcatcacaggctcggcattccggcagtcgggtggtaattctggtacagtctgcaccaaaacctgactgggaatacgcctttcacaacgcctgttatctgctggccgccccgccggaagtaaagccattcaacccgtgctacacaacgggtcagcggcttcgattccgcctccttgcgaatcctacccgccgcctcacggaacactcgcttggagccgacggacagctcgtcaagaaatgggcgaatacggataagaaagggatgcgcgtgcctgtgccgacggatcaactcctcgattggatcaatcggcgagctgaaaaggcggggttttctatcgagaaggattccatcaatgttttgccgggttatgtgttcgccaacaaaagaggggacaggcatggaattcgcctgcgctctgtccgttatgacgggcttctcagcgttaccgagcccgcactgtttcggcaagcgattatacaaggcatcgggccaggcaaagctttcggcttcgggctgctttcggtagcgccgtgttgtaccggaggtctatgaccgccatttttgacctcctgccccgtttgattctttacagtggagaccacaccatcgccacacttaccactaccgggcccttcctcagcgaagagggtaattccccgccttggttaaggaggggataaggggtggttggtgtaaagaacgggctgagagaggacgccagccgcctcgatcatcgatggggcgcagctacaaaaacatgaaagacctccatctgttgcccaaagtccgcgatagttccagtttcctttacgtcgagcattgcaagatcgaccaggagggcaaagcgatcgccattcacgacgcgaagggccgagtgccagtaccctgcgcgtcattgctggtgctgatgctcggtcccggcaccagcatcacgcacgcggctgtgcgatctcttgctgacaatggctgcaccatcctctggacgggcgaagagggcgtccgaacctacgctcagggcatgggagaaacgcgctcttccgaacgcctgctgcatcagtcacgcctctgctctgcgcccgaattgcgcttcatagtggttaaaaggctttacaagatgcgtttcccggagaagctggacccctccctgaccatccagcaattgcgcggcatggagggtgtccgggtgcgcgacgcatacttccgcgccagccgcgaggcgggcattccgtggtccggccgatcctacaaaaccgataactggcaggccgccgatgccgtcaatcgcgccctttcggtggccaacagttgcctctacggcgtctgccacgccgccattgtttccgtcggttattcaccggccttgggatttattcacaccggaaagatgctctcctttgtctacgatgttgccgacctgtataaaaccgaagtcaccattcccctcgcctttcgggccgcagccgaaggaatgggctttcaggaaagccacgtaagaaggaaatgtcgcgacgcgtttgtggaaagccgcttattacagagaattatccccgatatcgaccgcgctctcgattggggttcttcggaaggtgggcagggggatgccagactggatgcccaaccagcggctccagggtggctctgggatcccgaagtgggggcggtggagggaggcatcaaccgcggagatgatgctgaaggaggtgacaagccacggtcgtgatggtgctcgaaaatgcccctcccagcgtgcgcggggaactgacacgatggatgctggaattgcatgctggcgtttttgtgggaaacatttccgcgctggtgcgggaaaagctctggcaggaagtctgccgcaaattggcgggtggggctggaattctggtctacaatgctgccaacgagcaggggtttgatatccgcttttggggatcgccctctcggcgggtcgaaaacttcgagggacttcttctagttcgcgggccataagccctttaaatcgcagcgtcgtccccacgcgtgtgggggtgaaccgttcatcggcgcccggccaatcaagattacgcggtcgtccccacgcgtgtgggggtgaaccatgatctgaatcgcttccgtaatcggccttcttgtcgtccccacgcgtgtgggggtgaaccgccccgcggacggccaacgaagggcgtgagacagtcgtccccacgcgtgtgggggtgaaccgcttcgccgttccgcgagactgcaggcttggatgtcgtccccacgcgtgtgggggtgaaccgcttaaccctatcccctatcccaaacccttcccgtcgtccccacgcgtgtgggggtgaaccgacaactcgcgcgataacagccagttacggaccgtcgtccccacgcgtgtgggggtgaaccgtccccaacgacggggacaatctgcgggaagctgtcgtccccacgcgtgtgggggtgaaccgtgtccggtttgtgccaaaattttaagcaaggcgtcgtccccacgcgtgtgggggtgaaccgtccgtgtggaacgttgtcatggtacttcgttcgtcgtccccacgcgtgtgggggtgaaccgctgccgctgaaggatgggatttggcagcggtcgtcgtccccacgcgtgtgggggtgaaccgcgccatgttggggtgggatgtgtcgtaggcccgtcgtccccacgcgtgtgggggtgaaccggacgccagcctcgatgagaaaaccatcaccgcgtcgtccccacgcgtgtgggggtgaaccgctggctgcggtgcttgaggccaatgtcacactgtcgtccccacgcgtgtgggggtgaaccgcctccctcttttccaccgaccttcccgcctgcgtcgtccccacgcgtgtgggggtgaaccgattctggctggattaaaagcagcggaccggcagtcgtccccacgcgtgtgggggtgaaccgcgtaccatgaatctgacaaaccctttcctgacgtcgtccccacgcgtgtgggggtgaaccgtcttgacttggagtgatcagggtgatatggaagtcgtccccacgcgtgtgggggtgaaccgtcttgacttggagtgatcagggtgatatggaagtcgtccccacgcgtgtgggggtgaaccgcgatgcgagagtttgaagaaaagaccaatgccgtcgtccccacgcgtgtgggggtgaaccgaaggagctgctggccgatgctgacggcgaaccgtcgtccccacgcgtgtgggggtgaaccgatcctcgcgagtgtgttagtccgttctgtggcagtcgtccccacgcgtgtgggggtgaaccgatgtgcccgcgaagctcctgatgacgcgcgacgtcgtccccacgcgtgtgggggtgaaccgagcaagaaaattggcactcttgaagagctaacgtcgtccccacgcgtgtgggggtgaaccgttggcgcggagaatcttttctcggtccgtaaagtcgtccccacgcgtgtgggggtgaaccgataatgccgcccgactttcaggaggtgcggatgtcgtccccacgcgtgtgggggtgaaccgctgaaggaattgaaagacgaaaaatcgctgaggccatcccccgcacgcccggagggtgaaccggctaatgtcaaatctcagtgtcgaaattgcgaataggcagaggtaaaccggggtttgtaatttaagatttcagattcccgtccccgcacggcccatgcctaattctc

SEQ ID NO: 694 - DNA, 8528 bp, Artificial Sequence
  Synthetic Oligonucleotide
aggcatgggccgtgcggggacgggaatctgaaatcttaaattacaaaccccggtttacctctgcctattcgcaatttcgacactgagatttgacattagccggttcaccctccgggcgtgcgggggatggcctcagcgatttttcgtctttcaattccttcagcggttcacccccacacgcgtggggacgacatccgcacctcctgaaagtcgggcggcattatcggttcacccccacacgcgtggggacgactttacggaccgagaaaagattctccgcgccaacggttcacccccacacgcgtggggacgacgttagctcttcaagagtgccaattttcttgctcggttcacccccacacgcgtggggacgacgtcgcgcgtcatcaggagcttcgcgggcacatcggttcacccccacacgcgtggggacgactgccacagaacggactaacacactcgcgaggatcggttcacccccacacgcgtggggacgacggttcgccgtcagcatcggccagcagctccttcggttcacccccacacgcgtggggacgacggcattggtcttttcttcaaactctcgcatcgcggttcacccccacacgcgtggggacgacttccatatcaccctgatcactccaagtcaagacggttcacccccacacgcgtggggacgacttccatatcaccctgatcactccaagtcaagacggttcacccccacacgcgtggggacgacgtcaggaaagggtttgtcagattcatggtacgcggttcacccccacacgcgtggggacgactgccggtccgctgcttttaatccagccagaatcggttcacccccacacgcgtggggacgacgcaggcgggaaggtcggtggaaaagagggaggcggttcacccccacacgcgtggggacgacagtgtgacattggcctcaagcaccgcagccagcggttcacccccacacgcgtggggacgacgcggtgatggttttctcatcgaggctggcgtccggttcacccccacacgcgtggggacgacgggcctacgacacatcccaccccaacatggcgcggttcacccccacacgcgtggggacgacgaccgctgccaaatcccatccttcagcggcagcggttcacccccacacgcgtggggacgacgaacgaagtaccatgacaacgttccacacggacggttcacccccacacgcgtggggacgacgccttgcttaaaattttggcacaaaccggacacggttcacccccacacgcgtggggacgacagcttcccgcagattgtccccgtcgttggggacggttcacccccacacgcgtggggacgacggtccgtaactggctgttatcgcgcgagttgtcggttcacccccacacgcgtggggacgacgggaagggtttgggataggggatagggttaagcggttcacccccacacgcgtggggacgacatccaagcctgcagtctcgcggaacggcgaagcggttcacccccacacgcgtggggacgactgtctcacgcccttcgttggccgtccgcggggcggttcacccccacacgcgtggggacgacaagaaggccgattacggaagcgattcagatcatggttcacccccacacgcgtggggacgaccgcgtaatcttgattggccgggcgccgatgaacggttcacccccacacgcgtggggacgacgctgcgatttaaagggcttatggcccgcgaactagaagaagtccctcgaagttttcgacccgccgagagggcgatccccaaaagcggatatcaaacccctgctcgttggcagcattgtagaccagaattccagccccacccgccaatttgcggcagacttcctgccagagcttttcccgcaccagcgcggaaatgtttcccacaaaaacgccagcatgcaattccagcatccatcgtgtcagttccccgcgcacgctgggaggggcattttcgagcaccatcacgaccgtggcttgtcacctccttcagcatcatctccgcggttgatgcctccctccaccgcccccacttcgggatcccagagccaccctggagccgctggttgggcatccagtctggcatccccctgcccaccttccgaagaaccccaatcgagagcgcggtcgatatcggggataattctctgtaataagcggctttccacaaacgcgtcgcgacatttccttcttacgtggctttcctgaaagcccattccttcggctgcggcccgaaaggcgaggggaatggtgacttcggttttatacaggtcggcaacatcgtagacaaaggagagcatctttccggtgtgaataaatcccaaggccggtgaataaccgacggaaacaatggcggcgtggcagacgccgtagaggcaactgttggccaccgaaagggcgcgattgacggcatcggcggcctgccagttatcggttttgtaggatcggccggaccacggaatgcccgcctcgcggctggcgcggaagtatgcgtcgcgcacccggacaccctccatgccgcgcaattgctggatggtcagggaggggtccagcttctccgggaaacgcatcttgtaaagccttttaaccactatgaagcgcaattcgggcgcagagcagaggcgtgactgatgcagcaggcgttcggaagagcgcgtttctcccatgccctgagcgtaggttcggacgccctcttcgcccgtccagaggatggtgcagccattgtcagcaagagatcgcacagccgcgtgcgtgatgctggtgccgggaccgagcatcagcaccagcaatgacgcgcagggtactggcactcggcccttcgcgtcgtgaatggcgatcgctttgccctcctggtcgatcttgcaatgctcgacgtaaaggaaactggaactatcgcggactttgggcaacagatggaggtctttcatgtttttgtagctgcgccccatcgatgatcgaggcggctggcgtcctctctcagcccgttctttacaccaaccaccccttatcccctccttaaccaaggcggggaattaccctcttcgctgaggaagggcccggtagtggtaagtgtggcgatggtgtggtctccactgtaaagaatcaaacggggcaggaggtcaaaaatggcggtcatagacctccggtacaacacggcgctaccgaaagcagcccgaagccgaaagctttgcctggcccgatgccttgtataatcgcttgccgaaacagtgcgggctcggtaacgctgagaagcccgtcataacggacagagcgcaggcgaattccatgcctgtcccctcttttgttggcgaacacataacccggcaaaacattgatggaatccttctcgatagaaaaccccgccttttcagctcgccgattgatccaatcgaggagttgatccgtcggcacaggcacgcgcatccctttcttatccgtattcgcccatttcttgacgagctgtccgtcggctccaagcgagtgttccgtgaggcggcgggtaggattcgcaaggaggcggaatcgaagccgctgacccgttgtgtagcacgggttgaatggctttacttccggcggggcggccagcagataacaggcgttgtgaaaggcgtattcccagtcaggttttggtgcagactgtaccagaattaccacccgactgccggaatgccgagcctgtgatgcttcgcggcaacatcgttcctcgggatcaaggcggaagagaaagccagcggtcggcccgcgctcaacatgaacatggccgttcccaaaatcctctggctggtagggctttaaaaactctgggtcgtactgctttctgcggtcggagggaaacgccatgcaaaggcgctggtgaacgcgatagaggtttcgcagccattggcgcccggggcgggggcggtcgggattgtcaccgacgtcgatcaggagacacgaaatccacatggctattccacctcctctggagcgaggcgtcgccgacgcgtttcgagcgagcggaaggcgatgatctcgttccgcttggcaataatctggtcgcgccaacgtggctcttcgggattgatccgatccagacccatgtttaaaccatactcgatcatggtcacggcgtcatgacacaaacggcagagcgaacgcagatcttccaagctttcattgcctccggcgcgccgataggtgatgtgttgtaccgttgtggctggcgccttgcaaaaaacgcaaagctgctggtcgcgggcaagccgctccaggcgcttgttcctgtaggcggagttggtgtaatcggcccgcgggcggggcggcggcggagtttcggtctgcgccggctggcctgcgacgcccacgccgccctcgatggccactggcaattgacgccggagcacgaatcggggttcgtgcgagggtggttcaaaggtgcggggcacatcataccagacgaaggcatcatcaggcgcttcaggctgatctgccgtgggctgccaatcgagcaggcagtcaaccgttttgggcggttgatcctccttcatccgtttgcgccaaggaatcgacttaagggctgagagtaaatcgggaaactcaccgcttgcgggtttttccagcaaagggcgtgacggagggcagcattttctaccaagatagagcgtccacttgggcgctcctactgcggtctccaactgcgctatcaggtcggcctcaccctgcaaagcgatcaggaaggatgcgtcgcagagatattcgcgacgcgtgatgagagtttcaatttcccccgtcgcggccgttctcttagcgccagcaccatctgccctgggtattccgaccttggctccgaccgtctgatagtcccaccagcggacacccggcgcatcaatgcgcgcccccatacaaagcgagcccagctttcgaagccattcattagaggctttacatctgctaacccccagggcggcgcacagcatcccgacaacgccagacttggtcggagcttccgccgtccgtcggatgacaaactttgactggtggtctccccaggcttgaagaagaccctccaagcgaagaaataaggtgttggccctcatcaaaccacctctgcgttcacagtaattttctgaacctcatgccaattgtggccgattttctcgatgaccttttgaattaagatatcgagcgaactgagattattgtcggtaagcgcaatctcacgtcgtttcttttttccatcttgttcttcctcgatgtaagccagcagaggatggcgggaattaggcgagaaccagaatcgctccgttggcttaccgtacccggtgtccatgtcgtggatgtattggccaagctgcgcgatgctctgggcgatgaggtcacgttcaccctgagcaaccgcgggtttcgcaaaagcgttggcgtagctgagaggggtgtccctgatctcaaccagcatgccatcgggaggattatgcgcggcgaaactgttctgttttccagtggggttcaccatcgcagccccccgaatgaatgcgcccaccgtatgtgcggccagcttttcatgttcttccccaaaccccatgaggtttttcaccaattgctcccagtggattgagaaatatttgtaaaaacaggccgaggcaaacatagcctcgtccacaaagccggcacccgcgtcctcgccggggatgtcatcggcagcgacgtagtaatccacctcggggcgggcctcatgggtggagattgcatgggccacttgaagtgctgcttccaccttagtatcacgcttctcccaaaccgtagaagatttgtccggctccagcatgcggcccgacaaggccatgtccggaactgccgtgcgctccgcaataagtccggcgaacccctccgccagttcactctcagcctttccatcgctgtttcggaggaggttcgccatctcttcaacagcctgtttggtagtatagacaagcattttgctcttctcagaattttcggactcgccttccgatctccagggcttgaatccgcatatttcaagaatcttctccgcacgcttcctcacatctttctcgggaatcttgtcagctatcaatttcgctaattgccgcgtacgaacaccgcctagcaactgcctgaactcgtcgcttctacggatgctgcgcttgaggcattggctggagatgcgcgagcgcagcacaccgccgaaatagcaggctttgggcgcgcccaagtcatctcggttcaaattggccggagcgtgattttgaatagcgtgaatctggatcagcatttatcctcctcctagagacttcaaaaattcctttgcccattcgagacgggtggattctcgttcccaaaccgaaagatcatccgtgagttttatccagtcgagtcccatgccctttgaattgagcacgtcaagcgcccattgcaacgcaggttcgattttgcggatgggcagagtcagcatcctatcaaaccgctggatgaacttctcccgcttgccaacttctggttggcattgcccaagaaggaaagctagcgtctcttccgccgaatactcgagtggccggaaggcatagagcttggcgacgagccatgccacgtcacggcggggtgcccgcgagttcctttgacgcagcggccaccataggcccgtaaacaggtcgaagccctctaccttctcatcgagctcctgccccgcgtgggtgcgcagcaatccgaggtcaccggtcttcaggtgtgtcaggcgtttgatgtactgttctgttggagtcacttatcgcctctcttgcggtcagattccctgccttctctgtttttaaccgcatgtctggtttaacgcgcgcaatttcctgccgctgtcgtagcgctgtggccgtaaaatccggagaaattgatctagagatggcaaccatcatcccttcatagtagttggccgccccctcccatgccgggtggccgtcggaaatgaggcggttcaatttcacagaggcactggcttcgatatgaggccgaatggcttttaccagggcgtcgatctcaacatgttttcgcgaggatttcttgttcttcaccactctgacaactctttttgccagccccgctgcttctctttgccatctctcgatctccttgatggcatcttgaatctgagcactttccgtggtaggttgaaggaaaatctcaaattccttcgcttccaggtacttgtcctgtttacttgcgaaaccaacaacccagaatcggcgtctggaagtgtgcttggtatcgatgaggatcgccgcagttatctttgcccaatcgtcagccgctttatcggaatcggcaagggcattacttggtgtcatcaccacatttttgtcacgaacgacgtgcgggtcgttccaaactcggccatccgccttgccgctaccgatgccggcaaatatgcactgccgaatcagaagctcttttcgcccgcaacaaatacaagggacttcgggttccatggggtcgtccagccaaacgcgtcgcggcagccatgtgagcccggtcaggagggggacttcgccagtcttgggcagtgccatgtcaggcttctcccatgcaggcgtacccaaattcgactgtggtcgccaagagagccacaaggtctcacacagggatcgtccgagaggtatgacgtagacggggggtttgccattgatgcctggtgattttcctttccccccttgggtggtgaatacaggtagccgcaacaaccctgtggcacaacacgcccgacaaaggccgttaactccgtccgcggaatgccggaaatgccgtacattggaccccgtcggcacttcatgaatgagatagttgacggaaagctttttgtcttttcccgagcctggacggtactgatagaaccggattccgtctcccagcaaattgaagcattccttgttttcatagagtttggtaaaccatgcttcggaaaaggtgccacccgaggttggatcgcgcggtggatcccctacgcaccaataaagcagtgcgagcagaaaacgcagggtggccacgcggtccatgggattggtggcggcaatctggcggatgcagtgtgcttcagtgagcacctgaatgaggttgacgcgagtgagctttccagtcttccatagaactggaatccaatcttcctcaagtaggttgtagctcatgcccccctcctctttgccggaggttcaccggaaggcttcacattttacgaaaatttttcgagaaatgcagggggttttttgtggaaggctttaacgaacaagccatccttcggccgagaatactgatgtttggtgaatttcatgcgagcacgctcccccaagttcgaccccggggcaaaaggctccgcaaccggttcttcagccggcgcttgttctgctaaaataaagccgattgcttcataccgttgaagtggacttcccggagggatgggtgagtggttgaaaccggcggtcttgaaaaccgttagccccgaaaggggctcgggggt

SEQ ID NO: 695 - DNA, 8528 bp, Artificial Sequence; identical to SEQ ID NO: 694
  Synthetic Oligonucleotide

SEQ ID NO: 696 - DNA, 8528 bp, Artificial Sequence; identical to SEQ ID NO: 694
  Synthetic Oligonucleotide

SEQ ID NO: 697 - DNA, 8528 bp, Artificial Sequence
  Synthetic Oligonucleotide
acccccgagcccctttcggggctaacggttttcaagaccgccggtttcaaccactcacccatccctccgggaagtccacttcaacggtatgaagcaatcggctttattttagcagaacaagcgccggctgaagaaccggttgcggagccttttgccccggggtcgaacttgggggagcgtgctcgcatgaaattcaccaaacatcagtattctcggccgaaggatggcttgttcgttaaagccttccacaaaaaaccccctgcatttctcgaaaaattttcgtaaaatgtgaagccttccggtgaacctccggcaaagaggaggggggcatgagctacaacctacttgaggaagattggattccagttctatggaagactggaaagctcactcgcgtcaacctcattcaggtgctcactgaagcacactgcatccgccagattgccgccaccaatcccatggaccgcgtggccaccctgcgttttctgctcgcactgctttattggtgcgtaggggatccaccgcgcgatccaacctcgggtggcaccttttccgaagcatggtttaccaaactctatgaaaacaaggaatgcttcaatttgctgggagacggaatccggttctatcagtaccgtccaggctcgggaaaagacaaaaagctttccgtcaactatctcattcatgaagtgccgacggggtccaatgtacggcatttccggcattccgcggacggagttaacggcctttgtcgggcgtgttgtgccacagggttgttgcggctacctgtattcaccacccaaggggggaaaggaaaatcaccaggcatcaatggcaaaccccccgtctacgtcatacctctcggacgatccctgtgtgagaccttgtggctctcttggcgaccacagtcgaatttgggtacgcctgcatgggagaagcctgacatggcactgcccaagactggcgaagtccccctcctgaccgggctcacatggctgccgcgacgcgtttggctggacgaccccatggaacccgaagtcccttgtatttgttgcgggcgaaaagagcttctgattcggcagtgcatatttgccggcatcggtagcggcaaggcggatggccgagtttggaacgacccgcacgtcgttcgtgacaaaaatgtggtgatgacaccaagtaatgcccttgccgattccgataaagcggctgacgattgggcaaagataactgcggcgatcctcatcgataccaagcacacttccagacgccgattctgggttgttggtttcgcaagtaaacaggacaagtacctggaagcgaaggaatttgagattttccttcaacctaccacggaaagtgctcagattcaagatgccatcaaggagatcgagagatggcaaagagaagcagcggggctggcaaaaagagttgtcagagtggtgaagaacaagaaatcctcgcgaaaacatgttgagatcgacgccctggtaaaagccattcggcctcatatcgaagccagtgcctctgtgaaattgaaccgcctcatttccgacggccacccggcatgggagggggcggccaactactatgaagggatgatggttgccatctctagatcaatttctccggattttacggccacagcgctacgacagcggcaggaaattgcgcgcgttaaaccagacatgcggttaaaaacagagaaggcagggaatctgaccgcaagagaggcgataagtgactccaacagaacagtacatcaaacgcctgacacacctgaagaccggtgacctcggattgctgcgcacccacgcggggcaggagctcgatgagaaggtagagggcttcgacctgtttacgggcctatggtggccgctgcgtcaaaggaactcgcgggcaccccgccgtgacgtggcatggctcgtcgccaagctctatgccttccggccactcgagtattcggcggaagagacgctagctttccttcttgggcaatgccaaccagaagttggcaagcgggagaagttcatccagcggtttgataggatgctgactctgcccatccgcaaaatcgaacctgcgttgcaatgggcgcttgacgtgctcaattcaaagggcatgggactcgactggataaaactcacggatgatctttcggtttgggaacgagaatccacccgtctcgaatgggcaaaggaatttttgaagtctctaggaggaggataaatgctgatccagattcacgctattcaaaatcacgctccggccaatttgaaccgagatgacttgggcgcgcccaaagcctgctatttcggcggtgtgctgcgctcgcgcatctccagccaatgcctcaagcgcagcatccgtagaagcgacgagttcaggcagttgctaggcggtgttcgtacgcggcaattagcgaaattgatagctgacaagattcccgagaaagatgtgaggaagcgtgcggagaagattcttgaaatatgcggattcaagccctggagatcggaaggcgagtccgaaaattctgagaagagcaaaatgcttgtctatactaccaaacaggctgttgaagagatggcgaacctcctccgaaacagcgatggaaaggctgagagtgaactggcggaggggttcgccggacttattgcggagcgcacggcagttccggacatggccttgtcgggccgcatgctggagccggacaaatcttctacggtttgggagaagcgtgatactaaggtggaagcagcacttcaagtggcccatgcaatctccacccatgaggcccgccccgaggtggattactacgtcgctgccgatgacatccccggcgaggacgcgggtgccggctttgtggacgaggctatgtttgcctcggcctgtttttacaaatatttctcaatccactgggagcaattggtgaaaaacctcatggggtttggggaagaacatgaaaagctggccgcacatacggtgggcgcattcattcggggggctgcgatggtgaaccccactggaaaacagaacagtttcgccgcgcataatcctcccgatggcatgctggttgagatcagggacacccctctcagctacgccaacgcttttgcgaaacccgcggttgctcagggtgaacgtgacctcatcgcccagagcatcgcgcagcttggccaatacatccacgacatggacaccgggtacggtaagccaacggagcgattctggttctcgcctaattcccgccatcctctgctggcttacatcgaggaagaacaagatggaaaaaagaaacgacgtgagattgcgcttaccgacaataatctcagttcgctcgatatcttaattcaaaaggtcatcgagaaaatcggccacaattggcatgaggttcagaaaattactgtgaacgcagaggtggtttgatgagggccaacaccttatttcttcgcttggagggtcttcttcaagcctggggagaccaccagtcaaagtttgtcatccgacggacggcggaagctccgaccaagtctggcgttgtcgggatgctgtgcgccgccctgggggttagcagatgtaaagcctctaatgaatggcttcgaaagctgggctcgctttgtatgggggcgcgcattgatgcgccgggtgtccgctggtgggactatcagacggtcggagccaaggtcggaatacccagggcagatggtgctggcgctaagagaacggccgcgacgggggaaattgaaactctcatcacgcgtcgcgaatatctctgcgacgcatccttcctgatcgctttgcagggtgaggccgacctgatagcgcagttggagaccgcagtaggagcgcccaagtggacgctctatcttggtagaaaatgctgccctccgtcacgccctttgctggaaaaacccgcaagcggtgagtttcccgatttactctcagcccttaagtcgattccttggcgcaaacggatgaaggaggatcaaccgcccaaaacggttgactgcctgctcgattggcagcccacggcagatcagcctgaagcgcctgatgatgccttcgtctggtatgatgtgccccgcacctttgaaccaccctcgcacgaaccccgattcgtgctccggcgtcaattgccagtggccatcgagggcggcgtgggcgtcgcaggccagccggcgcagaccgaaactccgccgccgccccgcccgcgggccgattacaccaactccgcctacaggaacaagcgcctggagcggcttgcccgcgaccagcagctttgcgttttttgcaaggcgccagccacaacggtacaacacatcacctatcggcgcgccggaggcaatgaaagcttggaagatctgcgttcgctctgccgtttgtgtcatgacgccgtgaccatgatcgagtatggtttaaacatgggtctggatcggatcaatcccgaagagccacgttggcgcgaccagattattgccaagcggaacgagatcatcgccttccgctcgctcgaaacgcgtcggcgacgcctcgctccagaggaggtggaatagccatgtggatttcgtgtctcctgatcgacgtcggtgacaatcccgaccgcccccgccccgggcgccaatggctgcgaaacctctatcgcgttcaccagcgcctttgcatggcgtttccctccgaccgcagaaagcagtacgacccagagtttttaaagccctaccagccagaggattttgggaacggccatgttcatgttgagcgcgggccgaccgctggctttctcttccgccttgatcccgaggaacgatgttgccgcgaagcatcacaggctcggcattccggcagtcgggtggtaattctggtacagtctgcaccaaaacctgactgggaatacgcctttcacaacgcctgttatctgctggccgccccgccggaagtaaagccattcaacccgtgctacacaacgggtcagcggcttcgattccgcctccttgcgaatcctacccgccgcctcacggaacactcgcttggagccgacggacagctcgtcaagaaatgggcgaatacggataagaaagggatgcgcgtgcctgtgccgacggatcaactcctcgattggatcaatcggcgagctgaaaaggcggggttttctatcgagaaggattccatcaatgttttgccgggttatgtgttcgccaacaaaagaggggacaggcatggaattcgcctgcgctctgtccgttatgacgggcttctcagcgttaccgagcccgcactgtttcggcaagcgattatacaaggcatcgggccaggcaaagctttcggcttcgggctgctttcggtagcgccgtgttgtaccggaggtctatgaccgccatttttgacctcctgccccgtttgattctttacagtggagaccacaccatcgccacacttaccactaccgggcccttcctcagcgaagagggtaattccccgccttggttaaggaggggataaggggtggttggtgtaaagaacgggctgagagaggacgccagccgcctcgatcatcgatggggcgcagctacaaaaacatgaaagacctccatctgttgcccaaagtccgcgatagttccagtttcctttacgtcgagcattgcaagatcgaccaggagggcaaagcgatcgccattcacgacgcgaagggccgagtgccagtaccctgcgcgtcattgctggtgctgatgctcggtcccggcaccagcatcacgcacgcggctgtgcgatctcttgctgacaatggctgcaccatcctctggacgggcgaagagggcgtccgaacctacgctcagggcatgggagaaacgcgctcttccgaacgcctgctgcatcagtcacgcctctgctctgcgcccgaattgcgcttcatagtggttaaaaggctttacaagatgcgtttcccggagaagctggacccctccctgaccatccagcaattgcgcggcatggagggtgtccgggtgcgcgacgcatacttccgcgccagccgcgaggcgggcattccgtggtccggccgatcctacaaaaccgataactggcaggccgccgatgccgtcaatcgcgccctttcggtggccaacagttgcctctacggcgtctgccacgccgccattgtttccgtcggttattcaccggccttgggatttattcacaccggaaagatgctctcctttgtctacgatgttgccgacctgtataaaaccgaagtcaccattcccctcgcctttcgggccgcagccgaaggaatgggctttcaggaaagccacgtaagaaggaaatgtcgcgacgcgtttgtggaaagccgcttattacagagaattatccccgatatcgaccgcgctctcgattggggttcttcggaaggtgggcagggggatgccagactggatgcccaaccagcggctccagggtggctctgggatcccgaagtgggggcggtggagggaggcatcaaccgcggagatgatgctgaaggaggtgacaagccacggtcgtgatggtgctcgaaaatgcccctcccagcgtgcgcggggaactgacacgatggatgctggaattgcatgctggcgtttttgtgggaaacatttccgcgctggtgcgggaaaagctctggcaggaagtctgccgcaaattggcgggtggggctggaattctggtctacaatgctgccaacgagcaggggtttgatatccgcttttggggatcgccctctcggcgggtcgaaaacttcgagggacttcttctagttcgcgggccataagccctttaaatcgcagcgtcgtccccacgcgtgtgggggtgaaccgttcatcggcgcccggccaatcaagattacgcggtcgtccccacgcgtgtgggggtgaaccatgatctgaatcgcttccgtaatcggccttcttgtcgtccccacgcgtgtgggggtgaaccgccccgcggacggccaacgaagggcgtgagacagtcgtccccacgcgtgtgggggtgaaccgcttcgccgttccgcgagactgcaggcttggatgtcgtccccacgcgtgtgggggtgaaccgcttaaccctatcccctatcccaaacccttcccgtcgtccccacgcgtgtgggggtgaaccgacaactcgcgcgataacagccagttacggaccgtcgtccccacgcgtgtgggggtgaaccgtccccaacgacggggacaatctgcgggaagctgtcgtccccacgcgtgtgggggtgaaccgtgtccggtttgtgccaaaattttaagcaaggcgtcgtccccacgcgtgtgggggtgaaccgtccgtgtggaacgttgtcatggtacttcgttcgtcgtccccacgcgtgtgggggtgaaccgctgccgctgaaggatgggatttggcagcggtcgtcgtccccacgcgtgtgggggtgaaccgcgccatgttggggtgggatgtgtcgtaggcccgtcgtccccacgcgtgtgggggtgaaccggacgccagcctcgatgagaaaaccatcaccgcgtcgtccccacgcgtgtgggggtgaaccgctggctgcggtgcttgaggccaatgtcacactgtcgtccccacgcgtgtgggggtgaaccgcctccctcttttccaccgaccttcccgcctgcgtcgtccccacgcgtgtgggggtgaaccgattctggctggattaaaagcagcggaccggcagtcgtccccacgcgtgtgggggtgaaccgcgtaccatgaatctgacaaaccctttcctgacgtcgtccccacgcgtgtgggggtgaaccgtcttgacttggagtgatcagggtgatatggaagtcgtccccacgcgtgtgggggtgaaccgtcttgacttggagtgatcagggtgatatggaagtcgtccccacgcgtgtgggggtgaaccgcgatgcgagagtttgaagaaaagaccaatgccgtcgtccccacgcgtgtgggggtgaaccgaaggagctgctggccgatgctgacggcgaaccgtcgtccccacgcgtgtgggggtgaaccgatcctcgcgagtgtgttagtccgttctgtggcagtcgtccccacgcgtgtgggggtgaaccgatgtgcccgcgaagctcctgatgacgcgcgacgtcgtccccacgcgtgtgggggtgaaccgagcaagaaaattggcactcttgaagagctaacgtcgtccccacgcgtgtgggggtgaaccgttggcgcggagaatcttttctcggtccgtaaagtcgtccccacgcgtgtgggggtgaaccgataatgccgcccgactttcaggaggtgcggatgtcgtccccacgcgtgtgggggtgaaccgctgaaggaattgaaagacgaaaaatcgctgaggccatcccccgcacgcccggagggtgaaccggctaatgtcaaatctcagtgtcgaaattgcgaataggcagaggtaaaccggggtttgtaatttaagatttcagattcccgtccccgcacggcccatgcct

SEQ ID NO: 698 - DNA, 8517 bp, Artificial Sequence
  Synthetic Oligonucleotide
cccataaggaggattaccatgttgattgacattcacatgcttcagaatcacagcccggcaaacctgaacagggatgacctgggcgctcccaagacctgttattttggtggagttctgcgctcccgcatttccagccagtgcctcaagcgcagcatcagattcagtccccaattcaaatctttactgggtggcatccgcacccgcagactggcggaactgattcagcaaaaccttcaaggtaaagatgttaaacaaaaggcaaagctgattcttaaaaaatgtggcatagaaaccaaagaaggtaaagacgatactgacatgctggtctatgtggcaaagactgccatccccgaaatggcaaaatggctgcaggataatcaaatcgtcagcgatgatgaaatcgccgccgcatttggagacatcatctcaacatatgtatttgctcctgatatagctctttgcggcagaatgttggagaccggcactcttaaaaataccacggtggaggcagccttgcaagctgcgcatgccatttccacccacgctgccagaccggagattgactattatgtggcagcggatgatgtgccgggggatgatgcaggagcagcatatttggacgaatccatattttcctccgcctgtttctacaagtattattccatccactgggaacaactggtcagcaatctgaatggaaataatgaacttgccgcccatacggtgggggcgttccttcaggcagccgcttctgcaagcccttccggcaagcaaaacagctttgccgcccataatctgccggatggagttttggtggaaatcaagcaacagcctgtcagttatgccaatgcctttgtccgacctgttgagcctcagggtgatgccgatttggttgcccgcagcattgggcagtttgccaattatgtctatgatatacgcaccggctattacaatgaagaaaatgctccccggatgatttggttttcgcctaatctgcgatatcgtctgcaacctgattcaggcagcctttccctaaaggaaatcaagtccatggatgagcttgtgaaagaagtggttgagattatcggctacgattgggaaaaagtcaaacttgtaaaggcagagggggcggaatgatatggataccaaacccaatacgctcttcctgagactggaaggtcctttgcaagcctgggggacgcatgaagcccggtttgccctgcgccgcattgccggatatcccaccaaatccggtgtaatgggtatgctctgcgctgccctgggcatctccagaccagaagctccagccagacttccggaactgaatgctctcagcctgggtgtccgggtggataatcccggtatccgctggtgggattttcacacggttggcgccaaacaggagatggtgatagctgaaccgcgccagaaaccagccagccctgctcaagtcggaccggaatttgataaaatcctgtcatccctgaaacctaaaaccaagcccggcgcattgctctcaaggcgtgagtatttggctgatgccagctttctggttgtcttgcagggagatgaaaagctgattgacacgctctggcaagccatctgccatcctgtctggcagatgtatctgggcagaaagtcctgtccaccctccagacccatcaatgagcacgctccggcatatcatccggatttggttgctgccctcatgtccatctctatcagaaaaagaattacggattattcattatcagatcctgtgtcctgctatcttgactggagaccgggcgaacatgagcctgaagctcctgagaacgctttaattcgttatgatgttcccatcagctttgacccgccccgtcagcaggcacgctatgttataccggttgaaatccccgtagcagaccttgatgtgattgaggaaacctctcccaaaccgtggcatcctaaacgtccaagagcggattatacaaataccgagtataaaaaaaagcgcctggagcgtctggctcttgacaagggattgtgcgtcttctgcaaatcccccgccaccaccgttcagcatgtcaattaccgcagggcgggtggaaatgagcaaattgaagatttaagagcactctgccgcatctgccatgatgccgtaaccatgctggaatatggcgagggcatgactacggacaggattgacccctctgaccctgcctggcgggatagaatacttgccaaaagactggaaattataaagttccgttctctggaaacccgccgccgtcatctatccgaagaggaggtgtgatgtatctctcccagttgctgatagacacaggtggcaatccggaccgcttgcgcaccggcaaaaagtggattggcaatatctacaatgtccaccgcaggctatccatggcttttcccacctatgaaaaaagacggcgagacccggatttcctcgaaccatataaaccagaggattttgaccagagggcgtttttataccggttggataacaatgtggacggtcaatcacgcagagcggtcatcattgttcagtcccacacattaccagattggcaatggtgttttcataacgccaccgattttttagccgctcaccctcaggtcaggatatacgaaccagcttatgtttctggtcaggaactccggttccgtatctgcttgaatgccagtataaaaagcaccaaatatcggaatcccgttcagccaagtgaatccgaccctttatctcagaaaactcagggtaaacggatagccctgatgtgggacaaggacaaatctccggatgaagctgcccttgagtggtttcaaaccaagattgccggaaagggttttgatctgcacagggttgaattgattaaactgggctgggtctatggctttaagccggtgcatggcagtgaagagagcttgagtcatacaatgcgcttccggtctgccttgctggaaggcatcctgaaagtggaagaccccatattatttgctacagtcatctccaatggcatcggcagcgccaaagcctttggatttgggctgctgtcagtctcaggtaattgagtgactgtcaaagacctgcatatcattcccaaagtgagggacaaacattcctttctctatgtggaacatgccagcatagataaggaagatatggctatcgccattcataatcaaatgggaatgactcccgttccatgtgccaatctcgctctgctgatgttaggacctggagtttccataacgcatgcggctatattgaccttggctgactgtggttgtctggtggcttgggtgggagaaaatgccgtccgtttttacgcttccggggttggcactgccagaagttctattgacctgatgaaacaggctgccgcctggtctgatctcacagaaaggatgaggatagtccggcagctgtatcaaatgagatttcaggaatcctttggtccggatctgaccattgagcaattgcgcggaaaggaaggggctcgcgtcagggatgcatactttaatctatcccgtcaatatggtgtccccatgcagggcagaaactatgacagaaatagctggaagaccgcagaccctataaaccgcgctttatctgtggcaaattcctgtctttatggtgtctgccatgccgccatcgtatcagcaggttactctccgggacttggcttcatccataccggaaaaaacctctctttcgtttacgatgtggctgacctgtataaaatggaaaccgctgcaccggctgcatttaaagcggtatctcagaatgttcagcctttggaaaaaggtgtccgaattgcctgccgtgatatgttccatgaaacaaatctgctgaaaaggatagttgaagatattcatactttgtttggaaaggaagagccatttgactctgatgccagcagtgaagatgaggaggcttcattgtcattgtgggaccctgtcaccggaatctgtcaggctggtgtttcctacggtctggataaaggaaattctaatgattgtcctgatggttgaaaatatgcctgcttctgtcaaaggtgaaatcacccgttggctgcaggaaatcagacctggcgtctttctcggaaatctgtcgtcacgcgtaagagaaaaactctgggacagaatatgccaaaattgccggggtggaactgccatgattatctggtcaagtaacaatgaacaaggttttttggttgacttctggggtatcactgccaggtttgttacagaatgggaaggacttcagctctttacaaagcacccaaagccttgattttactaagtgtcttccccacgcccgtgggggttaaccggcagcgggtgggctctccaatgcgcttttcaagtcttccccacgcccgtgggggttaaccgctataagagcataacaatttccgcagaagatagtcttccccacgcccgtgggggttaacctgtagaaataggtaatggcggtgtaatccaacggtcttccccacgcccgtgggggttaaccgccacctttggcactctataagctcaaaaagcagtcttccccacgcccgtgggggttaaccgtggtgctacggcaagaagctgaccaaagcaaagtcttccccacgcccgtgggggttaaccgcgaagtggcagcaggctggcggcattggagcggtcttccccacgcccgtgggggttaaccggatgccattgtcaatggcgggcagaatattttgtcttccccacgcccgtgggggttaaccgtgggagatgtgctggtaagcgacgggcatgatgtcttccccacgcccgtgggggttaacctatgacagcctggggattcggagacagcatgcggtcttccccacgcccgtgggggttaaccgccgaattatccaaaattaacgaaatcgccaaagtcttccccacgcccgtgggggttaaccgcgctcttggcaatctggctgagctgctcaatcgtcttccccacgcccgtgggggttaaccgatggaaatggcaacgttttgcccattctgaccgtcttccccacgcccgtgggggttaaccgatgccatgactgttatattctatttaagggacgtcttccccacgcccgtgggggttaaccgtaaaaatattgtttgacgatatttatgctaatgtcttccccacgcccgtgggggttaacctcaggtatccgatatgaaatgcgcacagatagagtcttccccacgcccgtgggggttaacctaaatgccacgatgtcaactgcatcatcctcttgtcttccccacgcccgtgggggttaaccggtgtgcgctgtggcaaatacatccccgtcaatgtcttccccacgcccgtgggggttaaccgtcaataagcttattccgacaatacacacgctagtcttccccacgcccgtgggggttaaccgcacaccgtctggctgtctgagtttggcactgagtcttccccacgcccgtgggggttaaccgcatggataatgaattgctgacagtatcagatggtcttccccacgcccgtgggggttaacctacagtaaccaggacagactgtcctgtctggctgtcttccccacgcccgtgggggttaaccggcagcactaaagggcaatgtgtcaatgcttatgtcttccccacgcccgtgggggttaaccggatgttgtggttgggactacagggaaagacgagtcttccccacgcccgtgggggttaaccgcggaacgttaaactttgtcgggaagcccgggagtcttccccacgcccgtggggattaaccgcgaagtggctaccggctgccagcattggagaggtcttccccacgcccgtgggggttaaccatttactctcgcctgaacagatgtccccacaatcagggcaccttgccgaacaaaaagtggcgcaaggtgtcctgatcctcgtgatatgtgagcaaggaggaggtgggtcatggcataaagaagacgtcatacttaggctgggtctgttcccgacctggtcgtggaaatcgtgacacagaggcgttccatccttcgacaggctcaggatgacggtgaaagggtagaggatgatgtaaaagcttaggataacgacaagctcaggaagaagtataagaatagatgatgataatactaccacgggcgtcacgctgagcctgtcgaagcgcgacttagtgaggcgttccatccttcgacaggctcaggatgacgatacccggtataatgacatctgccattgtttgctgtgtttatctgtgatttctgaggttaatcatccttcccctgaacagcttgcaacgagggtcagccggttttcttacccagggctgcggcgtagatgacgaaggcgtcggtgccgtttgcctgcaggagggcgttcatggcagcatcgttgtaggctccgatcatacaggctccggcgccgatggcttccgctgccagatggaggttttgaccggcgtgtccggcatccagatagagatagcggtaacttctctggctgtagcgccagcttgcccggtaggggattgccagccagatgaaggtgacggcgctgtgcaggaccatttcctgtccgaggcaggcttcacagacagcctgagcctgttctgctccgcttttgtaaagcaccagtccgtgttgcagcggatggtaataatacaatccgggtgcgatgcctttcaccctgttcagcagcagataggtttccaggggatggcggcaaccggcggagggcacctggcggaagccgagttccatctttggggtgacgcggtgctccctgatccattgggttgaccaaagcagccaggatagttcggcttggctaagaggcttatcagtataattgcgcaggctgcgtctttgggcaattgcctgagccaaagtgatatccggctttgtgagggtatccggcgcgggcaggggtatgatttcgccctccagaggctgaaaggcggggggacaaggctcgcctttggattgggcggactcatggtcgtagatgtagtgggtgagacgcacgaagtcctgtccgatgtgcggatgggcggtccgctctgcctgtatggcggtcacctcgtcccgcaggctttgttccagttcggcatattccgtttcggtgagttcggcttccttcaggatggtctcccggtcagcgcctctgactttgtaaaaaaggtagttcatggtcttattgtccatgggtggtgctcctctataaatatgcttatggagggcagtcttaccgagcgggagaaagtgtcaatcccaaagggaaacgaaaaaacacttgtcaaaaagacctgtccggctgataagcaattccggagcggaacctcagactttggacgaggatgcttccggctccgggtgataataaaggattgaggtgaactatgacgatagctgacatgctgatatttctggagcagcttgcccccaaagggcttgcctgcagttgggacaatgtgggtttgcaggtgggcagtcctgattgggcggcagaccgggtgctgctcacgctggatgtgactgccgcagtgatagattatgcgaggaacaaggggtttgacctcatcctgagccaccatccgctgattttcaagccggtgcacagcgtcagcagaccggatatcctgcggctggtggaatatcgcatcggggtgatagccctgcatacgaatctggatgtggtgccggatggagtaaactatgccttggcagaggttttgggtctgacgaagctgcgtgttctcagtccggagaccggcagcgtgtggtatcatggctcggtgacggtgccgcctgattatgtggacagggtcagaatcgccctgcacaatgccggcgccggcagaatcggggcttatgaccgctgcagcactgctcatccggtatccggcaccttccgggctttgccggaaagccagcccttccttggcaacaaaggcagcctggaacaggtggaggaagtggaactggaatttatggtggatggcttccacctggccgccgtgaaacaggcgcttgccgcagttcatccctacgagacgccggcagcctattttgttgccgtggaaactgccaatccggcttatgggctgggattgattggcgaattggcggcggagaccacgctggaggattttgcccggcaggtgaaacagcgtttgcaggcacctggcgtgcaactgtggacggcgggcaaacccaggaaacaattggtcagacagatagccatctgtggcggagccggagggtcgctcatcgggcaagccaccggcagggcggatgtctttgtcaccggcgatctcaattatcatgccatgctggacagccgtatcccgctcatcaatgccggacacttctggacggagtatccggtattgcccgccctgaagcggattctggctgcctcagaagcaaaggtggcagtctttcccctcagcctggcggcagtcaatcaaatccactattattagcagtagatagattgaaa

SEQ ID NO: 699 - DNA, 8414 bp, Artificial Sequence
  Synthetic Oligonucleotide
ccaaagcctttttcgcccacggacaggccgtttgccccttcccactaacatcccgtaaacctccccttaaattcccgcccggccaatgggaactcagcgggaagtattttagatgtgtatgggatggggcaaatggggcttctattgatagtgggtatcaaaatgggaggaagtccacaaattgcgcgaattcatacgaattgcttttccagttacgctaccaactgtggtagataacctaaaataaaggacttacttcccaatcgggcaagtaatccatatgtttggagcccgaaggtcccagaacgattggccgacggggacatcgaccttcctgacgctggcgtcgagcgaggcacgagcatggacgccagcaacatctcctgtagtccatactcgcaagctcgctgcactccaggctcaccaacgttggaaggcaaattcacaaattcacaaccggtaaatatggcttgtgaatttgcaacctgctgatagacgggtaattatgaggctaattcacaaaaaaggggtctcttatacatccgcggaagccgattgtaaacaggatatgatgtatccacgctaccagtctataatacatatagaaatagtatatataatatataatagtattatatattattatatattgatattatatcatctctaccttcccttcatctcttgtttgcggcatgagccactgcaaaccggcattctcccctggtccggctggatataagagataagcgtattttgtgaatttgtcccccaactcactgtgccacaataacacacggattcacaagccatatttaccggttgtgaatttgtgaatctgaccttgccggccttaaggaagtttgaaattagagccctattttggacttgacaaattattccttggtaaatttggtgtataatagctatggggcataatgatgttagcctgtggaacggcctctgtaaaggatcaacaagctatcaaccctccccatgcgacaggagcttcaatgtattataatttgacagacaaaccctggatcagtgtgctacagcttgacgggcattctgccaggctcggcctggctgaggtcctgcgaaaagcacacacactgcgtttggcttacggcaatccgatggaccgcatgtccgttttccgtttcctcctcgccctgggctattggtgttttgccaatacaaaacaagcgccggtatcagataagccactgcctcaggcatggacggactggcttgaacaaaaccaagaatatttcgaattgttcggtgatggccccagattctaccaatccccaggaacatccagaatacgccccagcacggaccttatccacgagcttcccacggcaaacaatttctggcacttccgccatgtgaccgatttcatcgatggcatttgcccagcttgctgcgttaccggtctgctgcgcctgccactctttaccaccgtaggcggcagcggaatcggagccggcatcaacagaactcctcccttctatgccatctggcagggtgatagtctgtcggaatcgatattcctgaattgggaacccacttcccggttgggtgttcctgcctggctgaacccgtttggatcccaaaacgagaaggatgtagccttgctgactggcctcacctggctgccccgcaaggtattcctgcttggcccggtgtcagacggagcaaaatgcagcgcctgcggagaagagcatgagcctctggtctatgcctgcaacaatgaggcggtgaaagtgcctccgaaccttgtctggaacgaccctcacgcgatttaccgggatgacaataatggcctgactgcccaggtggctctgatgtccggggacaaatacactttcgctaacagggattggcataaacccctggtcggcttcttacgggcgaaaggcatgtctcggaccgccacgctgtttttagtgggcttcacaagcgttcaagccaaatgtgtggacgtttgggaaaagaccattgccctatccggaaaaacaagctccgaggaactgctggaccagatatccgaaagagcctactccctgcacaggatgaggaaacaagaccgccggggcgattacaaggaatccgtgggaatcaccgccgtggcggacatcatcccgcacgtagagcatcgggttgacgtccattcgggcgagatggtggaaaacagcggcaatgtctggcaggaagcggatgaagattacggattcttcatgaagcgttttgccgtttctctagtgccggaaattacggttgccgccaagcttgaacgagaacaactggctcggcgcaagccctggcccctaaaaccaaaatcaattaaaaaaccttcatccggaggcgataatgaatgagagcaccgtgaaatttgttcggagcctgggcgaactcaaagagggcgacctgggcttgctcagaaagctcaggggtcgccgtctggatgaatccctgccgggtttcgacctgttttccggcctgtggtggccactccgcagtataagccccaaaacccccaggcggaaggtggtctggctagtcaccaagcttttcgcggaattccgctttgagcaaaagaaaggcgccagcctgccttggctcatgggcagaatatgccgtggacttaaagaagaaaaagagttcccacgtgttttagccaggttcgaccgcttgctcacgctcgagttgaaccaactggaggaaccgctggcgcaagtgctcgcgattttaaaaagacatgacattgccagtctggactgggttgccctcatcgatgacctctccgcttgggaacgggaatcaaacagagcgatatggtcagacacatttatttcagcatttaataatcagcaaggaggaatcaaatgttgattgaaatacacatgatccaaaaccacagcccggccaacctgaaccgggacgacctgggcgcgcccaagacctgttatttcggtggggtgttgcggtcccgcatctccagccagtgcctaaagcggagcatcaggatgagcgatgaattcaaaaacttgctcgggggtatccgtacccgtcggttggccgagttgattacaaaagctacaggacaggactgcaggaatcaggcagaggaagttctgaacaaagccggtttgaaacacgaaaacggacatagtaagatgctggtgttcatgacccggaacaagatcgatgcccttgctcaaattgtcaccagcgaaggcctgagtgttgcagagaaagccaagaaagcggcagatgtaatatcgggggcaatacattcccctgacatcgctctgtgcggaagaatgctcgagcccgataccaaggacaagaacacagacaaggtcaagtgggaaaataccactgttgaagcagccctgcaggtgtcgcacgccatttcaacccacatcgcccgcccagaaatagattactatgtagcagctgatgacgagcctggcgacgacacaggtgctggattcatagacgaggcgatgtttgcttcggcctgtttctacaaatattactcaattgattggaataccttgataatcaacctccagggtaatgaaaagttggcagctcatactgtcggagcctttatccaggccgctgcactcactaatcccagcggaaagcagaacagctttgccgcacataaccttcccgatggaatattggtagaaataaaagagacacctgtcagctatgcaaatgcctttgtgcgaccggtgggaatcgttaaggattctgacttggtagaacaaagcattggccaactggccaactatgtgaaggatataagtgccggtttcttccctggacagatgaaaggcaacgctctgtggttctcgcccaatggacgttatcccctaaagcctcaacagggcacgctggacataaagccagtttgcaacctgctagaacttgttcgcgaagcagttgagatgttgggttttgaatgggatgatgtaaaaaacgagaaagtagagagttgaaatgtcttctccgcctaataccctgttcctgagattggaggctccccttcaggcctggggaagcaatgaggccaaattcgccgtgcgcaggacagccgacgcgcccaccaaatccggagtggcaggcctgctctgcgctgccctgggaatcagccgggccgaagccggacagtattggctgggtgaaattgccaaattgcgcatgggggtgcggatagaccgcccgggcatccgctggtgggattaccatactgtgggagcggagcagaagctgcgcatttctgacctgaaaatgcccaacggcctagttctggttggcactgccctggccaaaaacctgggcgcggacaagatcaaatccaaacccggggctttgctctcccgacgcgagtatttggctgatgccagcttcctggttgcgctccagggtgaaccggatatcgtggcacaactggctgaagcgctgaaaaaaccagtctggacgctttatctggggcgaaaatcctgtcccccctcccgtccggtggatgaacacccgccagggttttatgccagtctgaaagaggctttgcggtcgatcccggcgcaactgagggaaaaaggcgaaccgatacctgacagtgttccctgtgtgctcgactgggttccggcccatgatgacgtgcacgctccgccgaacgccgaagcgcattacgacgtgccggtgtcctttgagcctccccaccacttgccccggctggtgatccgctgtaacctgccattggaccgcaacttcgaggcagagaccgtgctttccggcaaagcctggcaaccgccccgcaaccgggcaaattacgacaatcctgaatacaaaagggtccgcgctgagcgtttggtgatggacaatgccgcctgcatgttctgcaaggcacccgccactactgtgcagcacgtgaattaccgacgcgccggaggcagcgagaagccggaggacttgcgcgccctctgccgcctctgccacgatgcctgcaccatgctggaatatggcagcggcatgaccatggaccgcatagatccctgtgaccccgcctggcgtgagcgcatcttggccaaacgcgaggaaataatcaaattccgctcgctggagcagcgcaggcgcaaactcgatccgaaggaggagaacggatgatgtatctatcccaactgctcatcgacacaggcggcaaccctgaccggccaaggcccgggcgcttgtggctgaacaatatctataatgtccaccggcggctcagcatggctttccccatgcgcaagcgcaaggaaggagacccgaggtttctgcagccctttgaccccgcagattttgaaaagcgccagttcctctttcgggtggacaacaacaccgatggagaaaatcaaagggcgatggttttggtgcagtcgtccctgccgccggattgggactgggctttccagaatgccacgggatttttggcagcccctccccaggttaaggaatacgatccccagttctcagcaggtcagcggctgcgcttccgcatcctcgtgaatgccagtgtcaaacgcaaaatcgacgagttgcgggaaggacccggaggaaaggaaaaaacgggaagggttctgcacaaacgggtcgcccttacctgggacacaaattccaacccaaaggatgcggtggcgcaatggtttgccgccaaggctggcagactgggcttcacgcccggggagaccgaactggtaagcctgggctgggtatacggttccaaaccggagccccggggaaattcgccccggcgtgagaacgaataccgtcccctgagataccgttccgccctgctggaaggttatctgacagtggatgatgcctttctgttccgggaagccttggaaaaaggtatcggcagcgccaaaggaatgggcttcggcctcctttccgtggttccggcaagtgatgcgtaacagagaccttcacctaatgccaaaaatgcgggaccgcttcacctatctctatgtggagcatgccaaaatagacaaagaacaacaggcaatcgcctttcacgatgccatgggctccactcctgttccctgcgctggactggccctgctgatgctggggccaggcgtatccatcacccatgcggccatccttgttttagcagaatgcggctgtttggtggcttgggtgggggaacagggagtccgcttttactcatccgggacagggaccacccgtagttccgccaaccttatgcgtcaggctgccgcctggtcaaatcgagatacgcatctgcggatagttcgcagaatgtatgaattgaggttcaaggaaaaactggacccaaccctctctcttgaacagataaggggaaaagagggagcgagagtacgggatacctatttcagactttcaaaagaattcgatgtgcccatgagtgcgaggaattacgacaggagcaactggaataaaaccgaccccatcaacagagccctgtccgttgccaattcctgtctctatggcatctgccacgccgcgatagtggccgctggctattcacctgccctgggtttcgttcatactggcaaacaactgtcatttgtttatgacattgccgatctttataaaatggaaacctccgtgcccgcggctttcatagccacagccgcaggggtcgataacctggacagaaggacacgcattgcctgccgtgaccagttctatcaatttggtctgctaaagaagatagtggccgacattcacgcccttttcggtattctggaaacttcggacgatgagccagaccttgctgatgtcgatccagccgtgccaggcgggctttggaacccagatgataaagtgagccccggcggcttgtcatggggtctggatgatcctggaggccatgatgatggttctggtgcttgaaaaagttccctctggcctgagaggagaaattacacgctggctcctcgaaatcaaggctggagtatttgtcggtcaggtatcggccatgataagggaaaagctgtgggacaaggccaggtctggttgtgccggtggaacttgtatcatgatttacagcaagcattgcgaacaaggctttggaattgagttttggggtgccgcggaaaggatagtgacagaatgggaaggattgaaattgatgaccaagcatccgtgatccatacttgaagcctgttcaatggcctcaaagcgtctactttcgaagtgtgttccccacctgcgtgggggtgaaccggtagcctcgaaactgccgttcttcttggaaaagtgttccccacctgcgtgggggtgaaccgaatacagcccgctgtccttcgagaccgaatccgtgttccccacctgcgtgggggtgaaccgccagacagcacggcatatccacacttaccgaagtgttccccacctgcgtgggggtgaaccgaagctgatctcgccaaagcaatattggcagacgtgttccccacctgcgtgggggtgaaccgcgaagccgcccgccgccaccggccacatcgaggtgttccccacctgcgtgggggtgaaccggctgaactgaccgcaccgcccaagaccgaggagtgttccccacctgcgtgggggtgaaccgctgcttttagtcagcgagggacacgggaagatgtgttccccacctgcgtgggggtgaaccgctgaccccgattgaatgcgaacgcctgatgacgtgttccccacctgcgtgggggtgaaccggcgatctcgtgagagcggaaaggcatcatcaggtgttccccacctgcgtgggggtgaaccgcgggagtttgtcctgcgtgacaatgtccaagcgtgttccccacctgcgtgggggtgaaccgggcgttatttgcaagcttacttgctgcattgagtgttccccacctgcgtgggggtgaaccgggagcgaggcacgggagccaaccgaagaaggagtgttccccacctgcgtgggggtgaaccgccgccctgaatgaacccgcaaaacccgtctgggtgttccccacctgcgtgggggtgaaccgtcatccgtccccctctaacgccatcagtattagtgttccccacctgcgtgggggtgaaccgggtgctgctggcaatgctatcggaaccaccgagtgttccccacctgcgtgggggtgaaccgagataatcacgctcaacaagcactttctcggcgtgttccccacctgcgtgggggtgaaccggatgggcgttgcccggagtgctatgtcgagtggtgttccccacctgcgtgggggtgaaccggtcccggatcgtataggaatcgtcaatctctcgtgttccccacctgcgtgggggtgaaccgattgccttgccgactgccaaatacataaccaaatatt

SEQ ID NO: 700 - DNA, 8407 bp, Artificial Sequence
  Synthetic Oligonucleotide
gtcaccatcgccttcaaccttgccctctcaaacgaggtgagcgtcgatctcttcaacattcgcggccagaaagtgcgctcccttcacaaaggaaaactcgcgggcggaaaccacaggatgcgctgggacggacgtgatgaaaccggaaggggagtggccagcggtgtgtatttcgcccgggtgagcacagcccgcgaaaccaaaaccatcaggatgctgctgctgaagtaggcgattatcagggactgcccggcgccgtctgtgcgccggcagaaatggaattagccccacgcaggtggggaatacgggaaatccgtgatctcgcattgccagtaggccggttcacccccacgcaggtggggaatactgctcgagcgcatagtctttcttaccgtatctcggttcacccccacgcaggtggggaatactccagcgtgccgctgtatgctccgacggcatacggttcacccccacgcaggtggggaatactccacaacgtagtcagggagttcactcgcgtccggttcacccccacgcaggtggggaatacggtttgagccaggggcgtccgtctctcttacccggttcacccccacgcaggtggggaatacgggtatgcgaagaattttgacagaaaaaatcccggttcacccccacgcaggtggggaatacatgtcccactcgtggagcatgagcaaggcctgcggttcacccccacgcaggtggggaatacaagttgaactcgctcaggctgtcgtctgaccccggttcacccccacgcaggtggggaatacgcgagaactataacaatgatatggttctgaccccggttcacccccacgcaggtggggaatacctcttgatgtaatccccgttagcatcaacccacggttcacccccacgcaggtggggaatacgccaagtcgccggtctcgccactcccggcccccggttcacccccacgcaggtggggaatacgggagacgggaccagaacatggtcccagctcccggttcacccccacgcaggtggggaatacgcctggcgcgacgactccgacaatctctacaccggttcacccccacgcaggtggggaatacacttcgaaagtagaagctttgaggccattgaacaggcttcaagtatggatcacggatgcttggtcatcaatttcaatccttcccattctgtcactatcctttccgcggcaccccaaaactcaattccaaagccttgttcgcaatgcttgctgtaaatcatgatacaagttccaccggcacaaccagacctggccttgtcccacagcttttcccttatcatggccgatacctgaccgacaaatactccagccttgatttcgaggagccagcgtgtaatttctcctctcaggccagagggaactttttcaagcaccagaaccatcatcatggcctccaggatcatccagaccccatgacaagccgccggggctcactttatcatctgggttccaaagcccgcctggcacggctggatcgacatcagcaaggtctggctcatcgtccgaagtttccagaataccgaaaagggcgtgaatgtcggccactatcttctttagcagaccaaattgatagaactggtcacggcaggcaatgcgtgtccttctgtccaggttatcgacccctgcggctgtggctatgaaagccgcgggcacggaggtttccattttataaagatcggcaatgtcataaacaaatgacagttgtttgccagtatgaacgaaacccagggcaggtgaatagccagcggccactatcgcggcgtggcagatgccatagagacaggaattggcaacggacagggctctgttgatggggtcggttttattccagttgctcctgtcgtaattcctcgcactcatgggcacatcgaattcttttgaaagtctgaaataggtatcccgtactctcgctccctcttttccccttatctgttcaagagagagggttgggtccagtttttccttgaacctcaattcatacattctgcgaactatccgcagatgcgtatctcgatttgaccaggcggcagcctgacgcataaggttggcggaactacgggtggtccctgtcccggatgagtaaaagcggactccctgttcccccacccaagccaccaaacagccgcattctgctaaaacaaggatggccgcatgggtgatggatacgcctggccccagcatcagcagggccagtccagcgcagggaacaggagtggagcccatggcatcgtgaaaggcgattgcctgttgttctttgtctattttggcatgctccacatagagataggtgaagcggtcccgcatttttggcattaggtgaaggtctctgttacgcatcacttgccggaaccacggaaaggaggccgaagcccattcctttggcgctgccgatacctttttccaaggcttcccggaacagaaaggcatcatccactgtcagataaccttccagcagggcggaacggtatctcaggggacggtattcgttctcacgccggggcgaatttccccggggctccggtttggaaccgtatacccagcccaggcttaccagttcggtctccccgggcgtgaagcccagtctgccagccttggcggcaaaccattgcgccaccgcatcctttgggttggaatttgtgtcccaggtaagggcgacccgtttgtgcagaacccttcccgttttttcctttcctccgggtccttcccgcaactcgtcgattttgcgtttgacactggcattcacgaggatgcggaagcgcagccgctgacctgctgagaactggggatcgtattccttaacctggggaggggctgccaaaaatcccgtggcattctggaaagcccagtcccaatccggcggcagggacgactgcaccaaaaccatcgccctttgattttctccatcggtgttgttgtccacccgaaagaggaactggcgcttttcaaaatctgcggggtcaaagggctgcagaaacctcgggtctccttccttgcgcttgcgcatggggaaagccatgctgagccgccggtggacattatagatattgttcagccacaagcgcccgggccttggccggtcagggttgccgcctgtgtcgatgagcagttgggatagatacatcatccgttctcctccttcggatcgagtttgcgcctgcgctgctccagcgagcggaatttgattatttcctcgcgtttggccaagatgcgctcacgccaggcggggtcacagggatctatgcggtccatggtcatgccgctgccatattccagcatggtgcaggcatcgtggcagaggcggcagagggcgcgcaagtcctccggcttctcgctgcctccggcgcgtcggtaattcacgtgctgcacagtagtggcgggtgccttgcagaacatgcaggcggcattgtccatcaccaaacgctcagcgcggacccttttgtattcaggattgtcgtaatttgcccggttgcggggcggttgccaggctttgccggaaagcacggtctctgcctcgaagttgcggtccaatggcaggttacagcggatcaccagccggggcaagtggtggggaggctcaaaggacaccggcacgtcgtaatgcgcttcggcgttcggcggagcgtgcacgtcatcatgggccggaacccagtcgagcacacagggaacactgtcaggtatcggttcgcctttttccctcagttgcgccgggatcgaccgcaaagcctctttcagactggcataaaaccctggcgggtgttcatccaccggacgggaggggggacaggattttcgccccagataaagcgtccagactggttttttcagcgcttcagccagttgtgccacgatatccggttcaccctggagcgcaaccaggaagctggcatcagccaaatactcgcgtcgggagagcaaagccccgggtttggatttgatcttgtccgcgcccaggtttttggccagggcagtgccaaccagaactaggccgttgggcattttcaggtcagaaatgcgcagcttctgctccgctcccacagtatggtaatcccaccagcggatgcccgggcggtctatccgcacccccatgcgcaatttggcaatttcacccagccaatactgtccggcttcggcccggctgattcccagggcagcgcagagcaggcctgccactccggatttggtgggcgcgtcggctgtcctgcgcacggcgaatttggcctcattgcttccccaggcctgaaggggagcctccaatctcaggaacagggtattaggcggagaagacatttcaactctctactttctcgttttttacatcatcccattcaaaacccaacatctcaactgcttcgcgaacaagttctagcaggttgcaaactggctttatgtccagcgtgccctgttgaggctttaggggataacgtccattgggcgagaaccacagagcgttgcctttcatctgtccagggaagaaaccggcacttatatccttcacatagttggccagttggccaatgctttgttctaccaagtcagaatccttaacgattcccaccggtcgcacaaaggcatttgcatagctgacaggtgtctcttttatttctaccaatattccatcgggaaggttatgtgcggcaaagctgttctgctttccgctgggattagtgagtgcagcggcctggataaaggctccgacagtatgagctgccaacttttcattaccctggaggttgattatcaaggtattccaatcaattgagtaatatttgtagaaacaggccgaagcaaacatcgcctcgtctatgaatccagcacctgtgtcgtcgccaggctcgtcatcagctgctacatagtaatctatttctgggcgggcgatgtgggttgaaatggcgtgcgacacctgcagggctgcttcaacagtggtattttcccacttgaccttgtctgtgttcttgtccttggtatcgggctcgagcattcttccgcacagagcgatgtcaggggaatgtattgcccccgatattacatctgccgctttcttggctttctctgcaacactcaggccttcgctggtgacaatttgagcaagggcatcgatcttgttccgggtcatgaacaccagcatcttactatgtccgttttcgtgtttcaaaccggctttgttcagaacttcctctgcctgattcctgcagtcctgtcctgtagcttttgtaatcaactcggccaaccgacgggtacggatacccccgagcaagtttttgaattcatcgctcatcctgatgctccgctttaggcactggctggagatgcgggaccgcaacaccccaccgaaataacaggtcttgggcgcgcccaggtcgtcccggttcaggttggccgggctgtggttttggatcatgtgtatttcaatcaacatttgattcctccttgctgattattaaatgctgaaataaatgtgtctgaccatatcgctctgtttgattcccgttcccaagcggagaggtcatcgatgagggcaacccagtccagactggcaatgtcatgtctttttaaaatcgcgagcacttgcgccagcggttcctccagttggttcaactcgagcgtgagcaagcggtcgaacctggctaaaacacgtgggaactctttttcttctttaagtccacggcatattctgcccatgagccaaggcaggctggcgcctttcttttgctcaaagcggaattccgcgaaaagcttggtgactagccagaccaccttccgcctgggggttttggggcttatactgcggagtggccaccacaggccggaaaacaggtcgaaacccggcagggattcatccagacggcgacccctgagctttctgagcaagcccaggtcgccctctttgagttcgcccaggctccgaacaaatttcacggtgctctcattcattatcgcctccggatgaaggttttttaattgattttggttttaggggccagggcttgcgccgagccagttgttctcgttcaagcttggcggcaaccgtaatttccggcactagagaaacggcaaaacgcttcatgaagaatccgtaatcttcatccgcttcctgccagacattgccgctgttttccaccatctcgcccgaatggacgtcaacccgatgctctacgtgcgggatgatgtccgccacggcggtgattcccacggattccttgtaatcgccccggcggtcttgtttcctcatcctgtgcagggagtaggctctttcggatatctggtccagcagttcctcggagcttgtttttccggatagggcaatggtcttttcccaaacgtccacacatttggcttgaacgcttgtgaagcccactaaaaacagcgtggcggtccgagacatgcctttcgcccgtaagaagccgaccaggggtttatgccaatccctgttagcgaaagtgtatttgtccccggacatcagagccacctgggcagtcaggccattattgtcatcccggtaaatcgcgtgagggtcgttccagacaaggttcggaggcactttcaccgcctcattgttgcaggcatagaccagaggctcatgctcttctccgcaggcgctgcattttgctccgtctgacaccgggccaagcaggaataccttgcggggcagccaggtgaggccagtcagcaaggctacatccttctcgttttgggatccaaacgggttcagccaggcaggaacacccaaccgggaagtgggttcccaattcaggaatatcgattccgacagactatcaccctgccagatggcatagaagggaggagttctgttgatgccggctccgattccgctgccgcctacggtggtaaagagtggcaggcgcagcagaccggtaacgcagcaagctgggcaaatgccatcgatgaaatcggtcacatggcggaagtgccagaaattgtttgccgtgggaagctcgtggataaggtccgtgctggggcgtattctggatgttcctggggattggtagaatctggggccatcaccgaacaattcgaaatattcttggttttgttcaagccagtccgtccatgcctgaggcagtggcttatctgataccggcgcttgttttgtattggcaaaacaccaatagcccagggcgaggaggaaacggaaaacggacatgcggtccatcggattgccgtaagccaaacgcagtgtgtgtgcttttcgcaggacctcagccaggccgagcctggcagaatgcccgtcaagctgtagcacactgatccagggtttgtctgtcaaattataatacattgaagctcctgtcgcatggggagggttgatagcttgttgatcctttacagaggccgttccacaggctaacatcattatgccccatagctattatacaccaaatttaccaaggaataatttgtcaagtccaaaatagggctctaatttcaaacttccttaaggccggcaaggtcagattcacaaattcacaaccggtaaatatggcttgtgaatccgtgtgttattgtggcacagtgagttgggggacaaattcacaaaatacgcttatctcttatatccagccggaccaggggagaatgccggtttgcagtggctcatgccgcaaacaagagatgaagggaaggtagagatgatataatatcaatatataataatatataatactattatatattatatatactatttctatatgtattatagactggtagcgtggatacatcatatcctgtttacaatcggcttccgcggatgtataagagaccccttttttgtgaattagcctcataattacccgtctatcagcaggttgcaaattcacaagccatatttaccggttgtgaatttgtgaatttgccttccaacgttggtgagcctggagtgcagcgagcttgcgagtatggactacaggagatgttgctggcgtccatgctcgtgcctcgctcgacgccagcgtcaggaaggtcgatgtccccgtcggccaatcgttctgggaccttcgggctccaaacatatggattacttgcccgattgggaagtaagtcctttattttaggttatctaccacagttggtagcgtaactggaaaagcaattcgtatgaattcgcgcaatttgtggacttcctcccattttgatacccactatcaatagaagccccatttgccccatcccatacacatctaaaatacttcccgctgagttcccattggccgggcgggaatttaaggggaggtttacgggatgttagtgggaaggggcaaacggcctgtccgtgggcgaaaaaggctttgggaaaggaatccgcagttattgtggcagattcggaacgattcttgcatctactatatg

SEQ ID NO: 701 - DNA, 8353 bp, Artificial Sequence
  Synthetic Oligonucleotide
acctttgcgagtcatctcccgcgcaccccccttccggttcacccccacgtgcgtggggaataccccttggccggtggttgctcgggcttctgcggcggttcacccccacgtgcgtggggaatacttattcttgctccatttccaccagtttgtattcggttcacccccacgtgcgtggggaatactcttgccaatctcaaacatttttcttctctcccggttcacccccacgtgcgtggggaatacgcctacgacgcggctctgaagcccgtggaaggcggttcacccccacgtgcgtggggaatacggctgaaatgacaaccagtttgttccgcgttacggttcacccccacgtgcgtggggaatacactgaaagagtaaggggattttggtaattttgcaagaaataagccccgaagtcttcgacggttcacggcttcgaattgcctcatatgtatgttaccgaagcctggccgcaattcagggtgggagtggtgtggactgggatggttgactcaaaatgggtgttacagacatccagggagagtccgccatgtgagaaatcatgagttatccctcgcgtcaggagtatttccgcacccagggagcgcgttaccgcaaggcctcacggagcgagaaaagccgaattctcgacgaggcatgcgccctcttcggcctgcaccgcaagtccatgatccgggctttaagcgcatcgggaagacgccccaccgacaaagccggacgtcccccgctttaccgcgacaagaccctgctcaagaccctcaaggcgatctggctggcggcgggccagccttgctcgaagcgtctggcggcgcttctgagcgcctggctgccccattacgaacgctgcttcggaacgctcgatgcggcggttcgccgcgacctcgaacgcatcagtccggccacgatcgaccgcctcctggcccccgttcgcgcgaacaaggggcgcggcgcgacctgctcgaccgcccgcctgcaaggacagatccccatccgcacccgcttccaggaggtggacgggcccggctggatcgaggccgacaccgtggcccactgcggccagtcgctcgcgggcgccttcgtgtggagcctgacgttgaccgacatctggagcggctggaccgagaaccgcgccgtgtggaacaaagaccaccgccagattgtggcgcgtgtgcgcgagatcgagcagaccctgccgttcgatctgctcgggttcgacagcgacaacggctcggagttcatcacccacgcgcttgtgcgcttcctgcgcgagcgccccgcgccggtcgaattcacccgcagccgcccctaccacaagaacgacaacgcccacgtcgagcagcgccagtggacccacgtccgtcaactcttcggctacgaccggcttgaggacaagcgcctcgtagcgcgtatcaacgacctgtacgcccgcgagtggcgctcgctgcagaacttcttcctgcccacggtgcgcctggtctcgaagagccgcgagggcggccgcctcgtgcgtcaccacagcgccccggccaccccttacacgcgtttgatcgccagcgggcacctgagcgaggaggaaaaacagcaactgcgccgcgagtacgagagcctcgatcccttcgcgctccaccaggcgatcgagcgcaaactgaaagagatcctgcgccaggcgcgtatgagcgccgttgccgggcaagacattcgcgcgccacaaaatttctccgtgaagcgcgacccatctgccggcgtgccagccagccaaaggcaagcgcccggtcaaaacacttgagaaaggaacccgcacaagtccacaatggttctgtccgggagccggcctgctacccggacccaaggacaagcggggggcgcgcgttctccaagaccacgcgtcccgccgtctgtccccaaaaggacaaattattctgcctcatacccccgccttcggtaacattttattttgaggcaacagggctttttccggcagtctggagcgcgcggtttttccggggggctggattgcgtatgcttgtccgggcggagccggattgatcaggatggcagattctggagcgattttctcggcgattccggccgtttggccaggattaagccctcgaagtcttcaaaggtgcaggaggttttcccggcggtctggattgtgtatccttgttcggtcggagccggatagatgaggacggctgccccttcggcgatttcttcgccgatgcgggcccagagacggtctcgaacccgggaggaaaccgtccccagatagaccccgggggcgacttcgctcaaccagcgtgtcacccagcctttcaggcccggtttggctttgcgcaggaccaggatcaccatgagtcagtctcccacgcaagcttccaggatctggccgatgggggtttcctgcgaaaaccctgagggggcccaccattcggcgggtaaggccgcgtcttcgccatattcttcgagcccttgttcctgttcgttccggcccattcccaggacactggcgatgtccgggagaattcgttccatcagtttctctccccggaagacatcgcgcagcgtccgccggatccgcgtttcaatatcgaggggggactctgccgcgatgcggaacgcggcgggaatggtcagatgttccttgtagagatcggcaatgtcgtaaacgaacgagagttgctttccgcagtggatgaacccaagccccggggaatacccgccacagagaatggcggcatgcacgaggccgtagaggcacgagttggcgcaggagagggcgcggttgaccggatcggcattttcccaagagtctcgcttgtaactgcgcccattccagggcacgccatactcggcgctggcgtgggcgtaggcttcacggacgcggatcccttcccggccccgaagctgctggagcgtcatgcccggatccatcggttccttgaaccgtttgcagtacatccggacaacaaccttgaggcgggtcaccgggtgactcgccaggctggcctggcgctggagattgcgcgccgaacgcgccagccccatgccctgggcgtagtaacggacgccgtgttcccctatccagagaaccaggcacccgttctctgacagggaatgaaccgcctgatgggtcaccttcgtgcccggtcccaagaggagcactccaagtgcggccaccggcatgaggctgatgccgtcctgccgatagagagcaatggcgtgctcctcctgatccacgacggcgtgttcgacgtagaggtaggagagtttgtcgctgaagcgcggcaggtcctgcgggttgatgggcgtgcggttcaaggtgcgacactcaccggtacaggtacaacactcaagagtccgaacccgaacgacttggccgatccaatgcccagggcaagggtctggccgaagagcgaggcgtcagtgaccgtcaactgtccctccagcagggcggagcggaatttcatgcgccgcttgacgtcatcctcctcattggaggacttgttccccggtcgctgcccactgacccaaccgagacgcatcaaatggctgtcccccaacgcaaatccctttcgggcccccttctctgaaaaccagggcaggatgaagtcctgggggtctttgccctcttctttgggccaggtccacgccacgcgctttccctgagacttcgggcggccctgagcgtcggttttttccgacttgtactggcgcaggtccttcactccttccgcgtcccggcccgtcccggtcttcctgctcaggttgacgcagatgcgataccgaagggcttgaccggcttcgaactgaggattgtactctgtcgtctgaggccgagcggccaggaacatcggaacattctggaacgcgtacttccaatcgggttttacctccgactgtaccagaatgacaacacgcggagagttttcccccagtgagtagtcaacgcgaaacaggaacagggttcttttcgattcatccgggacatcatgagtccccaggaaaccctccggagagaacggtttcagaaagaaggggtcgccctcgagttgcgaatgcgaggggaaagccatcgagaggcgctgatgcacatggtacaggttgcgcagccaggcgcggcccggtcgggggcggtcggggttgctgcccacgtcaatcaagagttgcgacaggtacattattccacctcctctgcggcgagtttgcgccgccgcgtttcgagcgaccggaactggatgatttcttcgcgtttcctgataatctgctcgcgccagcgctcttcctcggggttgatgcggtccagacccatacccaggccatactcgatcatcgtgacggcgtcgtggcaaagacggcagagcgcgcgcagttcttccaggcgctcgccccccccggcgtggcgataggtgatgtgttgcaccgtggtggcgcgggacttgcagaagacacacagatggcggtcgtgatcgaggcgttcctgacgtttcttccgatactcggaattcgtatagtcggcgcggggacgcggaggcgcgccgacggaagacggtgagggcactcggtcaatccgaaccctgaactccttcgctgtcgcttcctctttgctcgcagtcaactgcgcgcgaacgacaaaacggggacggtgagacgggggatcgaacgtcagcggcacatcgtaccagacaagggcatcggcgggcgcttcgggttcggagtcagtcggaacccagtcgagcagacagtcgagcgatgccgggcgcgcgtcttccgtgagacgcggacgccagggaacggacgccagggtttcgagcaagccgccatactccccagccggaaaatcttgttcgagtatcggccgggacggcgggcaacactttcgcccaagatagagcgtccatttgggggcgctcagcgcgtcccgcaattcggcgatcagagcgggttccccctggagcgcgaccaggaaagaggcgtcgcccaggtactcgcgccgggtgagcatggcgccggacttggttttcccctcggcggtacgcatttccatctctgcgcccacggtgtgataatcccaactgcggacaccgggacgatccatgcgtacccccatgcgcagggccgcgagtcgcggcaaccacgtgtcggcggcttcggaacgggggacacccagagcggcgcaaagcaaaccgatgactccggatttcgtcggggcctctcccgagcgccggaccccgaacttcgactcctgatcgccccacgcctgcagagggccttccaggcgaagaaagagggtctgaacgctcatggcgtcacaacctcctcttgaaccttcgcccactcaaaacccaaggttttcaccactgccgggatcaacgcgtcgagtgacttgatattattcccatcgtttgccaaaggaacttcccgattcttctccgaaattgtaaggggataacgaagatttggagaaaaccagaaccgatgtgtcggcttcccatatccctcgtccaaatcgtgagcgtactgacccaactgcgccatgctttgcgagacgatatcccgctgatcattcccggaaacaggtcttgcaaaggcgttcgcgtaactgacgggggatgaattccgtatttcaaccaggatcccatcgggaagattgtgggcggcaaaactgttctgtttcccggacggattggcgaacgccacgccgcgcaggaaagcgcctaccgtgtgggcggccagttgctcgtacccgtctccataccctttcaggttggctgtcagcgtctcccaatgaatcgagaaatacttgtagaaacaggcggaagaaaacagagcctcgtccacatagcccgctccggcgtcatcacccgggatgtcgtccgccgcgacgtagtagtccacctcgggacgcgcctcgtgtgtcgaaatggcatgggccacctaaagggcggcttccacggtcgtgtctttcaggacacccgtctccagcattcgcccactaagcgccatatccggaacggccgtgctttccccgatcaatttcccgaatttttcagccagcaattcatcggtcgcgttgttttccaggagactcgccatttcgtcaatggcctgctgagtcgtatagaccagcatgtcgctcttgttctcatccttgggattgatgccacactccttgagaatctttgccgcgcgcttctttacatcggcgttaccggccactctgtcggcaatgagtttggccaattgtcgggtccgaatcccgccacacaatgccttgaacgactcgctggtgcggatgctgcgcttgatacactgactggagatgcgcgaccgcaggaccccgccaaagtagcaggtcttgggcgctcccaggtcgtcccggttgaggttggccgggctgtgattctgaatggcatggatttcaatcaacatggtggggtcctttcgttctcggacacagaagtctcgacaggcggcaggcctgtggtgtttttttccagatattgctccgcccatttcaggcgggtttcttcccgttcccagatggaaagatcatcggtcaattgaacccagtcaaaccgaagccccactggatttgaggcaatctcccggatggcccattgcaacgccggttcgatccgttcgagcggctggcgtaacaaggcgtcgaacttgttacggaaccgtttccgttcccgttcctctcgcggttcgcagcgccgcaactggctcgccagaaattgctcctctccatgctcgacgggctggaacgcgtagagtttggcgataagccaggcggtcgagcgtcggggcgctctctgatttttctggcgcaagggccaccacagccccgtaaacaagtcgaaaccttcaagcgactcgtccagcccttgaccggcgtgcgtgcgtaacagccccagatcgccaaccttcaaacaagtcagtcgttttatgtattcatgtgtggcagcattcatcgggtcttcctcctttcttctcgggatcgttcatcccttcttctccttcttgctgattcggagtttcttctccggtgtttccgccttgggcgtcatatcgggtaccgtcctggcgatcttgcgccgcagagcgaccgcttctgtcgtgaagcctggggaaagcgatcgcgcgagagacttcatcaggggacgatattcctccgcggccaatctccaggcctcttcgccgccgcccaataaatcggacagcctgtcagagacttgattttcgacatggggacgaatggtcgagattgcagctggaccattcgtctttgacctacccaacgatttctccagataccagtttcctttcttccattgctcaatctgaatggagaaaacctctgatggagagaactcaacgggtaaaacgagagtgcgttcccagacatcgatatttttcgctttgtctgtagcaaaaccgacaagaagaaacctgagagactgattctgggaagacaacttccccatttctatcatcctggtaagcaaatcaaaccacgggcgatccattcgaaatttcttccctgcggtcaagtcaggcgctttcgaagatttgcggggtgtttctgttgagtacaggacgtgtggatcggtccaatctggattttcctgcgggccagcagactggaactcacaggtacgaataagaggccccttcacagatccgcagctaatacacccaccaacggcgtcattcgatggagggtgcaagaagactcgcctggaaagaagcgttaacccctgaagaataggtacgcccggatctctatcttggaggggacatgatttgtcccaagaaggctggcctatcttttcgcaagtaacccagttaaaatagagcgtttcctgcaacgaatcgccacaccgaacaacgtagatagggggagtgccgttgatcccggcctttaagtcgggaaggccactgacggaaaacagaggaagcctcaagagtccgataacacaacaaactggacaaagcccattttgtccatctgtcgaatgcttgaaatgccagaaattgttcccagtcggaatctcttgtatcaagtccgtagtcggacgcatccgggatgcaccacgatcttgatagaaccgctttccctcccccagcaggttgaagcaattgcgatgcgtctcgagtttggcgaacgcctcttccgtaaatatcgggccggatgtttcggaagcattctcgggcggattgccccggctccaatagagaatcgcgagcagaaaccgcagaatcgcgacccggtccatcggattgttcgccgcgatctgtcgaatgcgggcggagtctctcaagg

SEQ ID NO: 702 - DNA, 8328 bp, Artificial Sequence
  Synthetic Oligonucleotide
cttccatgctgatcgaaatccacatgatccaaaaccatagcccgtcaaatctaaaccgggatgacctgggcgcgcccaagacatgcatcttcggcggagtcacgcgggcgcgcatatccagccagtgcctcaagcggagcatccgcaatcctgggaacgccgacgacctgcataaccgggagccaagcctttttgcggcagcaatggcggggcacatgggcacgaagaccaagctctttccatggctggtgcgggaaatgcttcaacagcaggagcaacttggtatcgcagccgagctgcgcattcccgaggccgaccatgagcgtatcgagctcgccgcgaaacgaatcggcctaagcaaggagaaagacgaaaagacctcggtgagcgcgaggatggacccgcgccccaagacggcgcaactcatccaccttggtccgcggcacgcggaactatttgtgcagaaattggcaacgctccggaatgaagatggaaagtgttaccaatatttcctcaatcccaaggcgagtttcgaagaactcgttggcaacgaactcaaactcaacgattccgggccggatgagaagatccagaaaaggatcgtcaaggccagttggctcgtcgccaaatgccgcatgaagacgttgctgacgcctgacggcgaggacgaggatgaaccggcgctcgtcggcgaacagccgggcgaggagcacgcccgacgtattgccgaaaaactgtccgagctcttcgctgatgagaaagccaacaaggatatcttgaggaggctcgtgagcgcggcgaccgacgacgagaagaaacagatcagggacgatgctcccgacaggccaggcgcgatggacaagtttctcgcggcgttgaaagatgtccacaaatttgatgccgtggacattgccttgtttggacgcatgaccacctcggacgcttttgaggatgttgaagccgcaatgcaagtggcgcacgccatttccacgcacgcgacaataaacgaggtggattacttcactaccgtcgatgacaagggcgcaggggtcggtgcgggccacgtcggcgaggcgatgttcaactcgccgtgtttctacaaatacttctgcctggattgggaccaacttgtcaccaatctcgccgggccgcccccggatgcgcggaaagacaaggaagaattcgacaagtggaaaaccgaagccaagtcagcagccgaaaagctcgccgcagcggcgcttgggcattttatccgcgccgccgcactgaccactcccagcggaaagcagaatagctttgcagccaacaacgaaccgtgcggcattctggtcgagatcaagaagaaaggtaaggttgcaacgagctacgccaacgcattcgccgagccggtggaacggatcggcaagcctgacgatgacgccgcggatgagaagagcattgagggccggagcgtcgcctgtttggcggatcacgtgcagagcgtgggaaacgcgtacggcatcgcttcgaccctcttttggtatagccccaagctctggcgtttccctctgcaatactgggaccgcgccgccgacgggaaaaggaaatccgccaaactcgtcacccaatcgcgtttcgatgtgttgggcggcgcggaaggaatgccggccgggttggtcgaggccgttgtcaaagaggccagcggattggactgggcggatgtcagggacgtcggcaaaactcctgccagggtagcgcgaccatgagcgaccggcccaatacggtttttctgcgcctcgaaggccccctccaatcctggggtgatccatcgaaattcgtcatgcgccgaacgatggacgctccaaccaaatcaggcgtcattgggctgatctgctgcgccatggggctgtcgcgagagaaggcacgcgagcggctcggagaactgaatgcgctgcgcatgggcgttcggatcgaccgcccagggacgcggtggtgggactaccacaccgttggagccggagtcggcctgagaacggccgagggcaacgtcaaaaccggggccaagggaacgctgattacccggcgggaatatctggccgatgcgagcttccttatcgccatgcacgggaacgatgaattgattgaacgggttgccggcgcgctcttgaatccgatatggccggtgtgccttggccgtaagtcgtgtgcgccggccgtacccgttcttgtcatgcaaagacaggctgacggggcgctcaaaccggacaccgcgcaatttgccgacccgctcgaagccctggcgaatcggatttggcagccgcgttaccagcccgaagtgccgcgaaacgagaaaggtgatgcggtcaagagcgtgcggcgggactgtttgattgattgggccgccccagacggaccagatggcgaagtctggtatgacgtgccgacatctttcgatcctcaagctcatggcgcgcgcctggttgtccgaagaccagtaaccattgccgtcggcgagacgctccaacgacataccccgcctccggagcccccgagggccaactacagcaatgcgaaatggacgaaggtcacccgacccgcgcagctggcgcgcgaccaccaggtctgcgtcttctgcaagtcccccgcgacgacggtgcagcatattacctatcgtcgtgctggcggcggtgagacgcaggacgatctccgatcgctctgccgcttatgccacgatgcggtgacgatgatcgaatacggacttggaatggggctggaccggatcaatccggaagacccgctctttcgcgaccggatcatcgaaaagcggcaggaaatcatcgccttccggtcgctggagacgcgccgccgtcggctcgagccggaggaggtggaataatgtttgtgtccacgttgttaatcgacaccggcgccaaccctgatcgtccgcgtccgggccggcgctggctcggcaatttgtatcgcgtccatcagcgactttgcatggcgtttccatcaaggggcacccgcgaatccgatccgtcattcctcaagccttatgatccgcaacagttcgcgcagggccaggtccatgttccgcggagtgacggcgccgggttcctcttccgtgtcgatccgctgctgggcgggggcgcgattgtcgttgtgctttcggcgctcgcacccgattgggattacgcctttcacaatgcacggcacctcctggctgcagccccggataagccgcgcgttttccaagtggcggtcgaggcacgaaaccgattccgctttcgcatgctggccaacgcggtatcccgcgtaagccgccggtctgtacatccgagtggcgggcccgtacgggaagaatggatcggcaagcgggttggcgttggcggcgatgaaaaatcgatgcgccgttggattgaccgtcgcgctgcatcgtgcggatttgcggttgatgagataacgctgtcgcagcccggctacgtctatatcaacaacacacatcaagccggccccgggcagcgattgcgctcggtgcgatatgaaggcctgctcagggtcaccgatgcggacgctttccgccgagctctggcgggcggcatcggtcccggcaaggcattcggcttcggattgctctcgatcgccccggctggctgacctccggggctgctctttgacaactgaatatcccctttggggggaggaacatgatgaaaacctcactcgctgaaatcgggcgcttcgatgatcggctctcgttcctgtacgtcgatcgcgccatcattcgtcattcgggcaatgcaatcgcgattcatgaggtcgatccggccatcgaagcgcccggtgtcaccgaggtgccgctctcggccatcgctacgctgatgcttggccccggcacgcggatctcgcacaaggccatccaactgcttgccgagagtaactgcctggtgatctggtgcggcgaattcggcatacggttctacgcgtgcggcatgggcgggtcgcggcacagtcgcaacatgctgaaacaggcgaagcttgcgctggacgagcgatcgcgtctgcaggtcgtcgtcaatatgtaccttcaccgcttcatcggcgagccgatcgacccgggcatcacgctccaacaacttcgcgggaaagaaggcgtccgcgtccgcgaggcgtatgccgatgcgtcgaagaaatggaacgtgccgtggtcgggccggagttacgaccgccagagctggaatgccggcgatgccgtcaaccgcgctttgtcctccgccaacgcctgcctctacggcgtcgttcacgccgccatcctttccgcgggatattcgccggcaatcggtttcgttcactgcggtaagcagctctcgttcgtgtacgacattgccgacttgtacaaggcggaactgacgataccgctggcgtttgaagcggtcgccgtgggaggacccgagctcgaacgccgggtgcggctcgcgtgccgtacgcattttcacaaagcgcggctgctgacgcgggtgttgcccgacatccagaagcttctcaaggtcgagctcgacgacgcggacgagttcatagacgaccccgcgcggccggtggaatggtgggagccgaagacattttccgccgataccccgatccaaacgatcctttcgttcacaccaggggagtagcaccatgctggtcctgattctcaaacgctgccggccgtctttgcgcggccaggttacccgctggctgattcagccgcagtcgggggtgtatgtcggccacctttccggcaaggtgcgcgacctgttatggcaacgcgttgagaaggaaatcgacgagcgcggcggcagtgcaattctcatccaaccggccgataacgagcaggggtttgcgatacgaacgcggggcaagaccgacaaatccatgcgagacttcgacggcctgatattgccaaaacggccgctggcgcgtaagtaatcagtgacttccccacgcacgcacgtgggggtggtattcatcgccagatttggtgtatcgcagcgcgacttccccacgcacgcacgtgggggtgggtgaggaccgagcagcggcccggtgccacggggacttccccacgcacgcacgtgggggtgaaccgaggcattagccgtttcagattcacgcctagacgacttccccacgcacgtgggggtgaaccggcagagcgggagcgcgttgaagccgaacggctgacttccccacgcacgtgggggtgaaccgtcgccgccgcggccactgaaaccaaaagcgccgacttccccacgcacgtgggggtgaaccgatcgctgctgcaaaagagctttcgacgatgcagacttccccacgcacgtgggggtgaaccgagatcaaaccgacgctcccgatcgtgacctccgacttccccacgcacgtgggggtgaaccgcctcgggcgcgacgagcgcgcagcagcagtttgacttccccacgcacgtgggggtgaaccgagtcggaattgtgggtgatgaacgcgaacacgacttccccacgcacgtgggggtgaaccgatggcgatcgtcttgcccgtcttctgtccaaggacttccccacgcacgtgggggtgaaccgtgctggcttttctggcggaatcgcgagccgatgacttccccacgcacgtgggggtgaaccgtgtccatcgccaacgcgcatggacgtgacgccgacttccccacgcacgtgggggtgaaccgtctacattttgaacggcactggcgacatcaacgacttccccacgcacgtgggggtgaaccgtcctgagcctcgcttagcatcgtgtcacggtcgacttccccacgcacgtgggggtgaaccgaatattaccgggatgaactaaacggccccgcggacttccccacgcacgtgggggtgaaccgccaatacggatgatccttcggcaatttcaaacgacttccccacgcacgtgggggtgaaccggtcccggaaagcgattccgcgaagaccgggaagacttccccacgcacgtgggggtgaaccgccattgcagtcgttggctatcgtcaaatcaagacttccccacgcacgtgggggtgaaccgttttcgcagcaacattgcggcgcaccccagaggacttccccacgcacgtgggggtgaaccgtccgaagtacaaacgatcaagtcggcatggacgacttccccacgcacgtgggggtgaaccgcaaaattgcccgaggtgaggtagcgtcgcgggatgccgggaactgcccgtatcgcttcggttacaatacgtggctgcgcgcggaggttgccggtggcgcgttggcggggctgacggatgtgtctcgccggctggatcgaatcgcggcttgataaggagtaagtaaatacatgctgcaggaaacagtgggcgcctttcttttcgaatacctttaccagcaggggatccgccacgcctttggtatcccaggtgactttgtgctgcctacgttccgctggctgcagaagtctcgtctgcagttgctgacgatgacccatgagccgggagtcggcttcgccgccgacggatatgcccgcactcacgggctggggctggcctgcgtgacctattgcgtgggggggttgaacatgctcaacgcgatcgcgggagcctatgccgaaaaaagccccgtaatcgtcgtttcaggcggcccctcgccggctgatcgcagacgtgatccgctcctgcatcacaaggtgcgcacgttcgacacccagcgccgcatctatgaggaagtcacctgcgccgcgacggttctcctggacccgacgaccgcggcggacgagatcattcgcgtggtgacggcggttcgaacccagtgccggccgggatatatcgaggtgccgtttgacgtagtcgatctgcccatcggcaaaatcatatgccgcgaccagccggcaccgcagagcaatcccgaaaatctcgccgccgcagtcgacgaggcggccgaactgatccgcggcgcgcggcggccgatcatcatcgccgacgtcgagcttcaccgccatgggctgaccgacacggccatgtcgatcgcagccaacctgaatattcccgtcgccgccacgctgctctctaaaagtgtgatcagcgaaaccagtccgctttacatcggcgtatacagcggtggagtatccgagccggagtgtcaggaatatgtggaaaacagcgattgcctcattttgcttggggcgtttctgacagatgtgttcatgggaatgaagacagccaatctgagtcggcggaagacgatcctggcaaatacggaacgcttgtccatcggactgcatagttatgaggaggtgttgctggcggacttcctgcaggagctggccaagcgagagatcccgcgcagggacttccaaaatccgtatcatcgcgcccagccgctcccccttggcgaaggcgaatattccgatgcgctggatgccgacgggttcttccgcatctttgagctcacgatggcggaagatgcgacggtggtctgcgacgttggcgacgcgatgatcggagcgatcggcctgcgcacccggggccggagcacgtttctggccaatgcgtattacctgtcgatggggtttgccgtccccgccgccatcggggccatggccgccaggcccggcgaccgcgtttatgcgatcgtcggagacggggcgtttcagatgacgggcatggagatctcgacctgcgccaaatacggactgcatccgatagtatgtattctcaacaacgacggttatggtactcagcgacagatcatcgaggggccgtttaacaatattcatcgctgggaatatgcgaaacttcgggatgtactgaattatggcaagtcggtgcgcgttggaaccaagggcgagctgcatcgtgcgctgcgggaagccgcggcggccgatgagatgacgctgatcgaggtgattctgccccgcgacgattcgagcttgccgctgcgccgcttcgcttccgccctggccaggctccgcgatgggagccagtcttgaactgcctacatcgattcatgcttcatgcccagcgagtcggccacagcggcgtgggtcacgcggccggcgatcagattgatcccctcggcaaagccgggatcttccgccgccgctttctcgaagcctttgtttgcgatcttgaggacgtagggcaacgtcgcattgcacaatgccattgtgctggtgcggccgacggcgcccggcatgttggtgacgcagtagtgaataattccgtcgacatcatacgtcgggtcctggtgtgtcgtgggccggctggtctcaaagcaaccgccctggtcgatagcgaca

SEQ ID NO: 703 - DNA, 8259 bp, Artificial Sequence
  Synthetic Oligonucleotide
caacgccgcgagatccgcgacgatctgggcggcctgggcggcggtcatgtccgtcccggtgtccacaccggtcaggtccgtcgtcatcgacgcgcaggcggcggggtcggccacgtggggcagttgcgccaccggcgtctggctcagatccgcctcgggcaggatctcgatgacgtcggcgtcggccgtggcggcctcgacggtctcgccgaggcagagcgttccactggcggcgatttcgccgtcggcggcggcatacacagcggctgccgcactgatggcgccggccgcgacgatctcgaacgtcccgccggcattgaaaagtcggacggtgacatcttcgccggcgctggcggtgaactcggcgacgccgatgccgacatccgtagcgccggcggtcaccaccgtcgagccgctgagcttgacgcgggtatgggcggacacgccgccggtccccgttagaaaggtcttctttgagccttcgatcattggtctatcctttcgcagatagttctcgtgtcacttatgtcgagtgcaagccgccaacgtcgcgcggctactcttcggcgtcaccgtcgccggtcgggtcctcgtcgcctttggggtcggggtccacaagcggatcgggggccttggccttcttggccttcgccttgatcgagacctcgcggggcttcgccggcttggcgtcgcgcagatcccgcccgcactttcggcagttcttgcgcttgccgggtcgggccagaacgccgaattgaccacaggtgcaacgtactcgcattacagctctccttggttcgtctgggcgggtgctgctcgggtcgcctcagtcggttgcggttttagtgggcgtcacgctcggcctcgtagagcttgggatacagctcgacgcacttgtcgatcgcctggccctcggtggcgttgtgctcggccatgtaggccttgacggcggcgtcaaacgtcgccggcccttcggtggcctgggcgttcggggcctggcccggggtctgctcggcgaactcggtgaccgccggatcgacggccggggtcgcggtcgccggggcggcggactgcttcgaggcggcggccagttggctggccagacgctcgttgcgcagctggagcgcctgggtctcggtcttgccgtcggcgaagcaactgaccagcagctcggtgtcgtcgccgcaggcggtctgcagcgtcttgaaacgcgcccgctcggcttcggcgccgtcggcctggccggccttgaagacgtcggcatggacctcggcgaactcgctcttgagccgatcgacggtcagcgtctccggcatcgggtgggtggtctcgttgggcataatgtgctcctttacggaaaactgaacggttttgtcgttgtcaccgtcgtcgaacgcggtggccgaggtgcggccatcggcgccgaagacgcacatactgacttccttgatggtcgatttgcggaacaccgccccgggacctttgagcgtcttgccgttgacctcggtcgtctcaccctccttgacgtattcgacgctgcgcggcgggcagtacagggacgcctgcatcgggaagccctcgcccacgtcgttgcggaactcctgggcgcggtcgttgctgaggaactggccctcgaaggtgaccttctcggcgatcgcctgtttcgtcgcgaagcccaggcgccgatcggtgaagtgcgaatcaaggaccggcgttttcttgccggcgaacttcatgccgcccaggtcgaacgccaggttgccccaccaccaatgatcggggatgatctcgccggaatagccgacgatactgaaccggttgcccttgtctttgtcaccgtcgtcggcgaaggtgacggcgccctcgcgggcgaacgtacaggcctggcggggggcggcgttctcgttacttgctttgcgtcgcggcatcgtcggtctcctgtttgtcgtcggtctcgccggcctcggtttcggcctcgcgttcccgctgtcgctcttcgataaggtcgcgatagtccaggcccttgcgggcggtgatctgcgtgcgtgatgttgtcttgttctctagctcgatcttgtcggcctgggcctcgcggtaggggtccacgtacggccacttctggcagacgacctcgtgcgcgaacgcgtctttgcgatcgaggagctgattggcggcgatcttcctggccagccaccagcgatacatccggctgacggtcgggatcaccacgtgcacctgctcgcgggcaaaatgtttctgggcggccttgtaggcgatgcgggcgttcatgtaggtggcgcccgagaagtcgagcgtcaccagcatcagcgggaagcagatcgcccggccgatctcgatccgctggtctcgcacgaacggggcatacgccgccggcgggcgggacggggtcaccgcgttgatactctcgccggggcccagatgctcgatcatgcccggctcgatcttctgcatcttcgtgccgtcttcggtctcgcccgtgctgctggtgccctgggtgtaggcgctcggaatcccgaggccgtcctcgcgggtgatgaagatcgacatacacgcgttgacgtgtgcggcgaccagttcggcctcctggtagcgcttgagcatatcgatattttcgaccgctggcgtcagcgccggttcccctcgcgtggtgctgaatcggtcggggttgaagacgtgaatcacgtgctcggcttggtaatgctgccagtcctcggtctcgatgtagccccaggtgttgggtttgccgatgtaataaccgagcacgcggccggtcgccctctcggtcgccgcgccgttggtgacggtgagcgtcttgccgaggtcgctgccgtagggcgtgccgcaccgctggccttcgcagacctgcaggccgatgtcggtcagaatcacaaagatgtcaccgtcccggcgataactcaaaaagagcttatagagcagctgctggaaattgaaccggccggtcagctcgcacggttgatcgagcatttcctctcgccagagggcttcggcctgtttgttccaggccttgctcttggtgcgggcctcgatgtgcgtctgggtgccgacgacctcgtcggcctccgagagcaacaggcccttgaccatcggattattgcgggcctggtcccggcagatctcgcgcatcatgcccagggccgactcggtcagatgcgcatccccggggccgcccagcccgctgcgctgggtgtggaggcgcgtgttcttgatggcgttataaccgaaccgggcagcggcgtcggccagcttggcccgggccaagtcctggcggcgcgaggcaaaccaccggggcgagacggccttggccaggccgtcgatcttcgagctgactcgatcgctaagcgtcatacgtgcgccacccttgtgcctttgtcgttacccttggcgatcttgcgcagtagccgctcctcgcggcggtacagcacacccagatcgtgcttggtgaacgactggttgcccacggtgtaggccgagacggtcccgcgctcgatggcggcgatcgccgtctggacccggtcgagttgtattgcatacgattctgccatattcgcagaatacagtggccgggcaggaggtgcacagagggccgttactacagattagtaacgactcgaaaagtttctaaagcccctaggatttcgggatttctcgatttgcagttcaatttccggcgtgtttctgccgataaacgtgatggaggcgggtcgaagaggcgtagtgcgaatgcccattgcaagtagtctggatcttggcgagcgactgttacggtgactagccggtaggggtgtttccctgaaattaccgagagtaacggactactcacggggacggagtgcgcccaccggcaagaagcagcgggcattcaggaacacaaaaggcgaggtgacaatgaattacaacctattggacgaaaagtggattccggtcctttatcgcaacgggaaatgggatcgcgttgggattcgtcaggcgttcaaggatgcgggctgcattcggcaaatcgcggcgagcaaccccatggatcgtgttgcgatcgtacgatttctgcttgcgctattgtattggtgtaaggggagtccaccagatgatgcgaacgcagaccttagtgattctcttccctctgactggttctcgaaactgcatgacaacagagataacttcaatctcttcggtgaagggaagaggttctaccaatgcgcttcctcgggaaatgtgaactcccctgcaagactcgcggcggactatcttatccatgagatccccacaggtacgaacaaatggcactttcgccatgcgaccgacaaggtcgatggcttgtgtccggggtgttgtgccatgggtctgttgaggctgccgctcttttcaacatctggaggccgtggcaagccgcctggggttaactcgaaaccgccggtttatgccgtaccggtgggtgtttcactcgcggagactctatggttctcgtggcagcaagcatcgagattgggaacaccagcgtgggaagagccggatttgcagctcccgacaataggtgaggttcctctgctcatgggattgacgtggttgccgcgacgggtgtggctgggcaatgccgaggagcccgaagccgcctgtatctcatgtggacgcaaggagcgactggttcgactcagcgtgtttgctggcatagggagcactaagacaactgaaggtcgtcccaggcgaatctggcgtgacccacacgttctctatgttgcttctccgaaaggcgaagtgatatcgcaccatgcaagtgatgcccttggtgccgccgatgcggcagccgatcaatgggcaaaaaccatgaccagaatgctccaatctagcgcgatcggcagtgaaagtgttcgtgtctgggtagtcggcttctccacagttcagaacgacaagtatctggaggctgcagagtacgaggtgtcgttccagtgttcaccaagtcgtgttcgggagagtattgagagaatggaacaatggcaaaaacaggggtatgggctaaagaggcggatagccaggtcgaaggtcgagggttcagccttcgtttcagtcattcgcccccatgtggaaaagagagtttccacaaaagccggtgatctaattgccgggggggatgaggtgtggcaacaggcggcggcggaataccacccgcttatgaagttgatcgccacgtcgctatctcccggtttcacgacggcagcggttcaacggcgactacacattaccagggtggctccggatatgcggcccaaaacaaaaacaatcaagaaggcgggccggaagaagggaggagccaagtgagcgcagcagagcagtacattgatactttgacaaagctcaaggtggggcaacttggattgctgcgcacccatgcgggacaggggctcgatgaatcagttgatggattcgacctctttgctggattgtggtggccgttgcgacgacagaagggcgggcctccacctcgccgtgaagtggcttggctggttgccaagctttacgccttttgtccgattccacattcacccggcagcacgattgctcgccaattgtgtcactgccagccagccaagagccccgaaaggtaacgattccagcagagattcgaccgtatggtcaccctgtcgcttgagcaactcgaaccggctcttcaatgggctctcaaccaagtcgcctcaaacagggaggggcttgattgggtgcagctcacggacgatctttcaaactggcaccgcgaaggcaaacgcctgtcgtgggcgagacaattcattccggacacggaaagggacccctcatgttgatccagatacatgctattcagaaccacagccccgccaatctcaatcgagatgacttgggagcacccaagacatgctatttcggcggcgttctgcgatcgcgtatctctagtcagtgcatcaaacgaagcatccgaactagtgaagcatttaagtctctgtgtggcgggattcgtacgcgacaattggcacggctcattgctgagaacatcaaaggcggagccagtgcgcagaagcgagcagccaagattctcaagaaatgtggcatcaatgccaaggatgacgaaaagagcgatatgcttgtttacacaacgggggaggcgattcagaggatggccgtatgcttgcaggacggtgacaagaagaccgatgacgaattggcagcagtgtttggaacgctcatcagtgaacaggtagccgtgccggacatggcgcttagcggcagaatgctcgaaaccggtgttctgaaagataccacggtcgacgcagcgttgcaggtggcccacgccatctcgacgcatgaggcccggcctgaagtggattactatgttgcgacggatgacattcccggggccgatgccggcgcgggttacgtggatgaagccatgtttgcctctgcctgtttctataagtactcttcgattcactgggagacactcgtcgacaatctcgatggcttcgacggcaatacggagtatctagcagcccatacggttggcgcattcatccgtggagcggcgaggaccaacccgacgggcaagcagaacagtttcgctgctcataacgctcccgatgggatgttgatagaaatcgggaacactcccatcagctacgccaacgcgttcgccaagccagcagtccaaggcgagcgtgacatgatcgcccagagcatcgcccagctcggtcaatatgttcgcgacctggacatgggatatggccctccgaagaaacgcttctggttttcgcccaatctccgctatcgcttgaccacgcaagttacagaagaggagaacggcaagaagaaacggagtgaggtctcgttgacgaatgatgagtactcattcaagtctctcaacgaactgatcgccgccgtgattaggagccttggtcatgattgggatgccgtccagacggttgtcgtgaatccagaggtagcctcatgagtacgaatactctcttcctgcgccttgaagggccgttacaagcgtggggcaatcaggagtcgaagttcgtcatccgacggacggccgaggctccgaccaaatctggactgatcgggatgctctgcgcggcattgggtgtttcccgtcccgatgccgccggcgagtggcttccaagactcggtggcctgcgcatgggggtacgcatcgacgcgccgggtctccgctggtgggactatcacaccgtcggtgccaagatgcagatgcgtacagccgaaggtaagcacaaagatggcccgattctcacccggcgtgagtacctgtgcgatgcttcatttctcgctgcacttcagggtgaaccgtcgctggttgtcgaactggcgcaagcgatgaagaacccgaaatggaccctctatctagggcgcaagtcctgtccgccgtcccgtctgttgatggagcatccgccgggccttttccccgatttgctttctgcgttgatatcgattccttggcggcgacggctcaaggctgacgagccacggcgtactgcggattgcctcctcgactggcaaccgtcggacgaacagcccgaagcgcccgacgatgcgcttatctggtacgatgtgccgttgacgtttgagccaccagcgcatcacccacgctttgttattcggcacaaactgcgcgtgggtccgggaggtgaggtctccatcgcaaaacaaggcacgcaaagccccactccaggaccgcttcgcccgcgcgctgactatggcaacaccaaatacaggaagatccgacaagagcggcttgaccgcgatcatcagttatgtgttttttgtaagtcgcctgcaaccacggttcagcatgtcacgtatcgccatgctggtggagaggaacgtattgaagagttgcggtccctttgccgcctttgccatgatgccgtgacgatgatcgaatacggcttgggcatgggcctggatcggatcaacccagaagagcagcgatggcgggatcggatcatccagaaacgagaggagatcatcaagtttcgctcgcttgaaacgcgtcggcgtaaactcagcgccgaggaggtcgaatgatgtacctgtcccaccttatgatcgatgttggaaacaatcctgatcgaccccggcctggacggcgatggttgcgaaatgcttaccgcgttcaccagcgactttgcatggcgtttccatcgaaggaacgcccaaagaaggaagccgacccgg

SEQ ID NO: 704 - DNA, 8238 bp, Artificial Sequence
  Synthetic Oligonucleotide
ccaaggctattcctctgcccactttggctatcgctctgcccaatccgcctttcgctctgcccaattcgcctttcgctctgcccattgcggcaatcgctctgcccagaggggccaatcgctctctccacagcttaaaacgctccctcagaaagcccattctctctctctcaagcacattcgctctcgatttaggggtgaatcgctccaattttaggaagaggcttcgggcttcagacatccggcttcggaccttgaaaccataaagccttgcattgtaaccttggccgcttcggcaccccacgccaaccgttgacctggaggtgtggtagcatcagtcgagattgagccgctgatctctaaacccaaagcctggtttgaatcttggtgcggcatttgctagagttgttacagcccagaggcgtctggagtaggattgaagaggaaaggcgatttgagcatgaactttaacctgcttgaggaaaagtggattccggtgctttaccgcgatgggaaatgggatcgcgtcgggattcgcaaggcgctggaggatgccggccggattcggcaaatcgtcgccaccaaccccatggacagggtggcgctcctgcgctttctgttggccgtgctcatgtggtgcaaagaggacgcgaagtcttccctcgcggctttggacgagaagaacgccgacataccagagaactggctggctaagctgaaggaaaacaaggccaagttcaatctgctgggcgacggtaagagattctatcaggaagaattgttgaagggcgaggaatctcggcccatcggcgatctgctcgtcgagttccctggagcggattcggtgaatcacatgcgccacgttgtgcatgacggttcctacggattttgccccgcgtgttgcgcgatgggaatcttgcggctctcggtctgggctccggccaacaggttttatcccgcatcagtcaacccaggctctgcggcctatgcatttattgaggggaagaaccttttccagaccctttgcgcgaatcttccagaaacaaatccgcaatctgatcaggctccatggttgggcaacgagcagccgaattcacctgatgcagtagccaggcttgcctggcggccccgcaagttatggctgaatgtagcagacaacggcggtctttgtgcatactgcgggcaaaccggaacgctggtcaaaaccctatctattaagaaggggtggtccactcccgtcaccacgggccaacaattcggcaagaatgtcttatcggaattccagaaactcaacagcgattaccaggcgaaggcaacgaacaagcgcaagctggccgacaaggttgtcaagatcgctcctgtcatcctcaagtgcaggatgccagcgctttcgcaagccgattcaaacgcggtacaaggaccagaaagcgagagccctgccgcgaagattgcacgagtcttcgagcagctgtacgcggcgggcaaccagaagataatcaaggagttgaccagaaaacccacggaggaagagaagcccctgctcgatcggcaggatacgcaggtgaaaaagttctgggttgaagaccctcatcttctcaaagaagccgaggccatcaggctgcccgacctcagtgaggacgttggcctgcacacctccaagttctggcgcgatgccttgcgtctgcgcggcaccaaggtatttgccatcggcatagtcggcgacgggcagtacgtctatcacgatgctcacgatgttcttgtaccggatgcgtccgactacgttaaaaaacgagccaatctttccagcgattgcagtggaaagttgcacaacatgctcaaggaggtgactccaaactccaaactgcagcaccccgaaattgacgcatccgtaaaatgtctgacgccaaatgccgaggctcagattcgtgaccggctgagccgaagcaatgcctcgacgggcgataacgcaaccgaagacgaggcattcctgcatgaagtatatgcgccggtggtggagcaggttatcgcttccgtaacacccggctcaccgcttcgtcgccatgccgcgcggaatcacgcgcaagccctgctgaacaagaagatcaaagtgctggttgagaagccggatcatctgtcgaacgcaggtacgcctgcagccgtgcctggcaaacccaaaagtggccgcaagaaaggaggttcaaaatgaaccagaccgctgcatacatcaagaggctttccgacttgcaggaaggcgagcgctcgcggttgcgccgtctggccggacggccgctcgacgcaacgctccagggtttcgacctcttcacgggcctctggtggccattgcggaagaaaagtcccgcaaccctacgccgggagccgtcatggctcgtcgccaagcttttcggcgcgttccgcgtcccgcacatccggcccgattcaggcgcggggccctctttgcctgaagtcctgggccgctgcgaaccgtacgaagaggatggccgcaagcgcttccgaactcgattcgacgctctgctttgctcgtccctgtcgtctctggagccgcatttgcgttgggcgctgggagaggtcgcccgggtcctcgccgggcacgtgccgcatgcgcggaaagtgaagggcatcgactgggtgcaactcctcgacgatctcagattctgggaccggggtgaggagcaccgccgcggacgcgatgttcgcgacatctgggccgaaacgtatctcaacgctactgattcaaaagagaggagagcatagaaatgttgatcgaaatccacatgatccagaatcacagcccggcgaacctgaaccgggacgacctcggcgcgcccaagacctgcatcttcggcggtgttacccgggcgcgtatctccagccagtgtctcaaacgcagcatccggcgcagcaaggagttttctgccgcgttggagaaggatggaggtgtccgcacgcgcaggttagcgaatctgctggcgcgtatcgtccatgctggagacttcgacctgacgcccgaaaagttggccaagcttctccaagtaaaacccgtcgagaacgaagagatcaagaagctcgatgctattgctgcggaagccttggaactgggcggcgtgaaggcgaaaagcaggaagaagggcaaaaacgacgacggtgaggatgagagtgccgaggcgctatccaagatgcttctcttcctctctacgacgacaatcggaaagatggcgaatgacctgaagagagcatcgaaggcagaggacctcgccgagcagtttaagaaatacattgccgaaaatcccagcgtgcccgacatcgctttgaatggacgcatgactgaggtcgcaaagaacagcgttttcagcgacttgaacttcaccgtcgaagctgcgctctccgcggcacacgccatctcgactcacgcggtcgtgaacgaggtagactacttcaccgctgccgacgacgtgcccggccaggacgccggcgcggcccacgtcaacgaggccatgttcaactcggcctgcttctataaacacttcgtcattgacttcgagcagctgaagaagaacctggcggacgatgccgaactcgcctgcaagacagtgcggtccttccttgaagcagctgccaatgccaacccctccggcaaacagcacgcatgcgcggcattcaatcagcccgacggaattctggtcgaggtcaaaactaaatcggccacgcccgtcagctacgccaacgccttcgccgatccggtgccggaaaagtccgaacgcggtttgatcggcgaaagtatcgccagacttggccagtacgcccacgatctcgttgtaggttacgaaatcgaggccgaacgtttttggttttcgcccaacggctcgcgagagttgacatgtaccgtgacagaggacgagaacggagaaaagaagcagaaagaaaagcaggtccctggcgtcagcgggttcggcaagttcgatgagttcgtcaagtcgataatggacaaggtgaaggcggtggctgcggaggcggccaaatgaccgaagccaacacactattcctccgccttgaaggccccctccaggcctggggcgatacgtcaaagttcgtcatccggcggaccatggatgcgcccaccaagtcaggcgttctcggcctaatttgctgcgctcttgggctgtcacggaaagacgcgagagagcgtttaccgtgcttaaatgagctgtccatgggcgtgcgaattgaccggcctggcgtgcgctggtgggattaccacacggtaggagcgggaatcggcatgacaaccgctgggggcggtctgaaaaccggcgcccagggcacgctcatcacgcgccgggaatatctggccgatgcaagctttcttgtggcgcttcagggcgatgctgatcttattcaatgcacaaaggaagctttggaaaatccgaagtgggcggttttccttggccgcaagtcctgcccgccgtccgtcccggtgcttgcaaggccccgcgagggtgagtcgtggaagaatcccgccggccatgacggcctgaacgccgcgctgggtgccatcccctggcgtcctcggctcaagggagattcgccgccggaaaggctggactgcctgctcgattgggtgccttcgcccgagcagcccgaggcccccgacgacgcggaggtctggtatgacgtccctttgtccctcgacccgccagcgcatcgtccccgattcgtggtccgcaaaagcgttgaggttgaaatcggcaacccaacccaatgtcccacccctcctccgccccggccgcgcgccgattacaagaacaccgaatatcaaaacgctcgtaaacagcggctggattccgatcatcacctctgcgtgttctgcaagtcccccgggaacaccatgcagcacatcacctatcgccgcgccggagggaacgagagtcaggaagacttgcgctccctttgccgcctgtgccacgacgcggtgaccatgatcgagtatggcctgggcatgggtctggaccgcatcaacccggaggaaccgcgttggagagagaaaatcatcagcaagcgggctgagatcatcgagtttcgctcgctggaaacccgacgccggcgcctgcaaccggaggaggtggaatgatgtatctctccacactgctgattgacgtaggcacaaatcccgaccgcccgcggcccggccggctatggctgcgcaacctctaccacgtccaccaacgcctgtgcatggcttttccatcgcaggcgcgggagaaagatgatcctaattttctccatccgttcaaggagtgcgacttcccgttgttgcgcaacccaaacgctgtaccggcagacccgcgccacagttttctgtttcgcattgacaacagcataaaggacaatatcccgcgcactataattattgttcagtccgaggagaggccgaattgggattatgcgtttggacttaagcccggcttgattgatccgcgaacaaatcgccccatcggcaacgccgggcactttctcgccgccccgccccaggtccgggaatacaacacaaccttcgcggaaggcggagagtttcaattccgcatccgagtcaatctaagcaaaaagagcaagaagagtaaggacgggaccgatcttcgcaagcatcgagaagggacggatggtaaaggccgccagaaagatcaaagcaagcgcgtgtcgttgacctggaatgaggaaaagaaacagaagcccgaggacgtgattattccgtggtttgcgaacaagggaatggtgacgcttaaaggagaaatggaaaaaagacaagccttccagttgcactcttgcaacgtgctaaacttgggttgggtggttgctaataagccagaccgccggatgaagttccgatctgccttgatcgagggaacgctgacggtcaacgatgccccggcgtttaagcaggcgattgaaacgggtctcggttccggcaaagccttcggcttcggcttgctcagtctggggagactcggcccatgaccgacctccatgtcctgcccaagttttccgaccgctggagccatctctacctggagcacggcaagctggacaaacaggaatcttccttggccttccatacccaggaaggcacggtggccatccccattgaccagctcggctttttgatgctggggcctggcacctccatcagccatcgcgccatgcaagccctggcggaaaataactgcctggtcgcatggaccggggagcaaggagtccgcctctatgcccatagcacgggggggacccacttttcccgccggctgctgaatcaagccagactcttttgcgaccctgacacccggattctggtgatccggcgcatgtatcaaaagcggttcccggatgccctcgccgataacttgaccctggagcaaatccggggcatggaggagacccgggtgaggaagtcctatcaggaaatttcccagaaaaccggcgttccctggtcgggccgaaattatgaccaggataactgggacaactctgatcccgttaatcgggcgctctccgcggccaactcctgtctctatggcctttgccatgccgcgatcctgtccgccggatactctccggccatcggcttcattcacaccggaaaaatgttgagtttcgtttacgacattgccgatttctataaaacggacttaaccattcctctggcttttcaggtagccggagaggcgggcttcgaggtcgagcggcgagcgcgcctggcttgtcgagaccgtttttatgaatcccggctgatggagaaaatcattccggacattgcggaggtgttcaatgctggtgatgatcttggagaaatctccggcgagtttgaagggcgcgttgtcacgctggctgatcgagcccaagtcgggagttttcctggggaaccccaccgcccgggttcgggaggaaatctggaaaatggcgattagcaaatgccgggaagggtcggtgctccaaatttggaactatccgtgtccccaagggtataggtatcgtgtttatggatcagcctcccgagaaatggtggactttgaaggaatggcgctggtccgagttccgcaaaaagagggtaaagcacccgaatgatttggacctttttggctaacctgatctttgacaattgaatggattttggggtttcaaatacggatgaacgctatcccttgagcctttgctcctttccaaatacagcatcttggtattttccccacgcatgtgggggtgaaccgatgtggctggacatttttggccttcccgcgacattttccccacgcatgtgggggtgaaccggttggggagtgggtgaagggtggatattataacattttccccacgcatgtgggggtgaaccgggtcgggagcgcggagagtgctggcgaggatgattttccccacgcatgtgggggtgaaccgtcagaggctgcagcggtggcttattccatctcattttccccacgcatgtgggggtgaaccgtgtgcgatggtctgggttggtctatgcacggcattttccccacgcatgtgggggtgaaccggacaggtctcaattttgcggcgcatggattttattttccccacgcatgtgggggtgaaccgtcatcattgcaggccattttaatcttgcatgaattttccccacgcatgtgggggtgaaccgatggaacccgcgtcggcaacggctcgacccctattttccccacgcatgtgggggtgaaccgtctatcatgctccgggcgctaagggaagttgaattttccccacgcatgtgggggtgaaccgttctcacagtttcgtttaaattgttcggaataattttccccacgcatgtgggggtgaaccgtattggagcgtcggcaagcgccatttctttgcattttccccacgcatgtgggggtgaaccgccaaagtgggcgacgtgatgaccgaattggacattttccccacgcatgtgggggtgaaccgatatccatagcggactggaggattgtagggaaattttccccacgcatgtgggggtgaaccgagtaccttctcattaaatataatcatagaaacattttccccacgcatgtgggggtgaacctcatatcaggaagttctatataacagtttgaccattttccccacgcatgtgggggtgaaccgttactaagagtggttgtttacaatgttttggaattttccccacgcatg

SEQ ID NO: 705 - DNA, 8169 bp, Artificial Sequence
  Synthetic Oligonucleotide
taccgcgaatcgggcgaaccgccagacggcgcgccaggacacctcgccgcccgctggcacagcaccttcgccgagatgaagaggaagcggcaacttgagcgtgacaaagcaatggtgccccgcattccgtcgccttcaacaggcgcaagattggaagactatacgcgcgacccgcgtgaagaggatgctgccgaccttcatcccgctctgcaggcgctgacgcgcctcgccgagccttcagtggaggttgtgttgctgcccgcgaactcccccttggatgcggcagcggacgctgttccctccctggcaacttgcagggaacttctccgtcactccgtctccatcactgccgctgatgttgtacatctattgctcgcacttcccgtgccccacccgtggaagcgctccggactgttacgccgcttgcggctgctctctctcgatgaaaacaacgagtgccgggtgggaaatgggatactgcggtatgacaccagcctcggtttgcaaatcatccgtctctaacgaaggaggtgcccatgtcagagtcgttctcgttcaacctcctcgatgaaccgtggataccgtgcctgaacaatgacgggaagctccgtcgaatcggcgtcagagaggcacttacgcaagcgggcacaatccggcaaatcgcggcaagcaatcccatggatcggctagcgatcctccggttcctgctggcattgctgtattggtgtaaggggaatccgccaacagaagcggagagtgcgcccgatgactcgtttcccacggaatggttcgcgaagctggaccagaacagggattgcttcaacctgctcggggagggaagaaggttttatcagtacaggggaaaacgcgaaatgccgctcacggcaaactatctggtccacgagatacccacgggcaccaatctctggcacttccgacacgccaccgatggagtggatggcctttgtcctgcctgctgcgctttgggcctgttgcggctgccgttgtttgcaacgtccggggggagcggcaagcctccaggcatcaacatgaaacccccactttatgtcatacctgtcggcgactcccttgcaaagacgctgcggctctcttggtgctccgcgccgagtctgggaacgccggcatgggagaagccggacatctcgttgccaaagactggcgaggtgccgttgttaacaggactatcgtggctgcccaggcgggtatggctcggcaatccagaggaatccgaagccacctgcatctcgtgtggtcgcaagaatcggttgataacatccagcgttttcgccggcatcggcagtatgaaaaccgatgatgaaactcccaaccgcctttggcgggacccccatgtcatctatgataacagcggcaagagcaaagtcacgaccctacacgctaggaacgccctgggcgccaccgatgcgggggctggccagtgggcgtcaatcgtagctgggatgttccaacagcaaagcgcccccgctgcaacggacttgcccaatcaggacagttgggccgagggtggcaaatacagcatatgggtcgtcggcttctccaccgtgcagaacgacaagtatctggaggctattgagtacacactgtctctccctgcctcagcaggtcaatctgtgaccgctgtgcaactcttggaacgatggcaagaagagaacgcacgccttgcccgcaaagtctggccgccagatgagcaatggtcttaccgcaagcatcccgagattgcgtcagccatcgccgccgttcgtccccatgtggaaggcaaggtctctgccaaagtgggggagctgcttaccggcggcgatgccgcatggctggaggccgccagcgagtatcgccccatgatggaggcagtcgccaggtctctctacccaggctttacgactgcggctgttgaatggcggaagcacattgctgacacgctgccggatatgaccaccacagggcctacaaaaaaggccgcaagaaagaaaggaggcgcgccatgagcccaacacccacggagcagtacattggcgttctggcaaagctgaagcctggcgacctggggctgctacgcagccatgccgggcaagggctggacaaatcggtgcatgggtttgacctgttcacgggcctttggtggccgctgcggcagagaaaccaagcagcgcctgaacgcgaggtgacctggctgatcgtgaagctttacgctcgctgtccgctcctccagtcgcctggcgataccctcgcccggcaactggcccgttgccagccaagcaaggagccagagcgtcagcgctaccggcagcgctttgaccggatgctcatgctgcccatcatcaagatggagcctgtgctgcaaggggcagtcgccatgatcgcctcaaaggatctcaagcttgattgggtgaaactcacggatgacctgtccatctgggaacgggaacgtacccggctcaggtgggcggaacaatttctggaaagcaacgaaaggacatagccatgctcattgaaatccacatcatccagaaccacagcccaaacaacctcaatcgggacgacctcggcgcgcccaagacctgctacttcggcggcgtcctgcgctcacgcatctccagccaggccatcaaacgcagcatccgcatgagcgatgagttcagcaagctacttggcggcgttcgcacgcgacagttggcgaagctgatcgcagagaacgtaactggcaaggcggatgtccagaatcgcgctgcacgaattctccaagcatgtggcatcgcaccgaaagatgagtcaagaagcgatatgctcgtttacacgactagggaggcggttgcccaaatggctgcgctgctacagaacgacgaaggcaagaccgatgcacagctacaaagtgatttcgggatgctcattagggaacgggtggctgtgccggacatggccctcagtggaagaatgctggaaaccggtgtcctgaaagacacaactgtagaagcggccctccaggtagcccacgccatttccacccatgaagcccgcccggaggtggactactacgtggcgaaggacgatgtcccaggagaggatgccggggcaggatatgtagacgaagcgatgttcgcttccgcctgcttctacaagtacttctctatccactgggaacaattggtcaagaacttgaaagcctatggggacaatcacaaagagcttgccgcccataccgtcggcgcgttcattcgcggggcggcgctggtcaatccctctggcaagcagaacagccatgcctcgcataataagcctgacggcatactgatcgagataagggacttccccattagctacgccaacgccttcgccaatccggtgtcgcacggcgagcgcgacgttatctcgcaaagcatcgcccagttgggccagtacgcccatgacctggataccggctacggcagaccgcagaagcgcttctggttctccccgaatggccgctacccgttaacggtgcgggacgataaggaggataaggacgtcgccgacaagaacctgacgtcattggaggacctggtacgcgctgtcaccgcagagatcggctacgactgggacgcggtccagagcattgccttgaatgggagatgagccgtatgagcgccaacaccctgtttctccggctggaaggccccatgcaagcctggggagaccaggaatccaagttcgtggtgcgacgaacagccgaggcccccaccaaatcgggagtgatcggtatgctgtgcgccgcgctgggcgtctcgcgccccgatgcctcctatgagtggcttccgaggttgagcgccctgcgcatgggagtccggaccgaccggccgggcgtccgctggtgggactaccacaccgtcggcgcggggatgcagatgcgcatcgccgaaggcaagaccaaagccggcgcgatgctgacgcggcgggagtacctctgcgacgccagctttctggtcgctctgcagggtgagccgacactggtcgcccgcctcgaggcggcgctgcgaaaaccccactggacaccctacttggggagaaaggcctgcccgccatcccgcccgctgttggagcgtcccgccgaggagtctggcgacctgctgactgcactttgctccgtcccgtggcgaaagcggctcgcaacagaccgtgtgccggcaaccgtggagtgtctgctcgactggcagtcgtcgctggaggagccagtagcacccgccgacgccctcgtctggtacgatgtgccgctcacttttgagcctcctgcacacgcccctagattcgtcatgcgccgccggttgcgcgtcggtatcggaggcgaggtcagcatagccgacaagcctgcccagaatcggacgctatcgcctccgcgaccccgcgcggactaccggaataccgagtatcgcaatgcccgcgctaagcgcctgaacgacgactatggcctctgcgtgttctgcaaaagtcccgccaccaccgtgcagcacatcacctaccgtcgggcgggaggcgacgaaacccaggacgacctccgctcactctgccggctttgtcatgacgcggtgacgatgatcgaatacggctatggcatgggcatggatcgcatcaaccctgaggagctacgctggcgggaagacattatccagaagcgtcaagagatcatccaattccgctcgctggagacccgacgacgtcgcctcagccctgaggaggtgtagtagccatgtacctatcgtgcctcttgatcaacgtcggagataacccggaccgcccgcgccccggtcggctgtggctccgcaacctctatcgagttcaccagcgcctgtgcatggcgtttccgactgcatccagggtgtccgctgatccggacttccttcagcctttcaacccggacgatttcgggccaaagccagtacatgccgctcggagcatggatgctggcttcctgttccgcattgaccctcaacccagtggccgagttgtgattcttgtgcagtctgcaagcatgcccgactgggactacgctttccataatgcggactatctcctggcggctccccccagcacgaaagcatttgaaccgtccgccacaaaggagcagcgtctccaattccgtcttgtggcgaatcccacaaagcgattgagccagaactcacgggaaaaggacggccaacccgtcaaatcggaatggattgggaaacgagtccccgttccaaccgaaaagctagaggagtggctagcgcagcgagctgcacctgccggattccgcgtagagaagctccttagcgtacaacctggttacgtccacgcctccaaggatggcggcggtgggggaaaccgacttcgctccgtccggtatgacggtatcctccaagtcaccgatcccgcacctttccaagataccctcatacgcggcattggtcccgcgaaggcttttggctgtggtctcctgtcagtcgccccgccagggaggtgaaccatgaaagacttgcacgcgttacccaagatacgggatagctggagctacttgtacgtggagcattgccgcatcgatcaggaggacaaggccattgccctgcacgatgcccagggcgtcaccgccgtcccctgcgcgagtctgtcgttactgatgctcgggccgggcaccagaatcacccatgccgccatccatgtcctggcggagaacggctgcatggtcttatggacgggggaagagggcgtgcgctgttatgccgtcggactgggcgaaacccggtcggcccggcgcctgctccatcaggcctacctctgtacccacccttccctgcggcttcaggtggcgcggcgactttatgagatgcggtttcccgatcccctggaccctggcctcagcttgcagcaaatacggggtaaagagggcatccgtgtccgggaggcatatgcccaggccagccgcgccaccgggatcccctggtccggacgggcctaccgacggggggactggagtgtcgccgaccctatgaaccgggcgctctccgcagccaatagctgtctctacggaatttgtcatgccgccatcgtctctgccgggtactccccagccctgggtttcgtccatacgggcaagatgctctccttcgtttacgacatcgccgatctctacaaggtcgacttcagcatcccgattgcctttggggctgccgaagaagggtttcatcaactggagacgcgggtgcggcaggcaagcagggatgccttccacaaacagcggctcttggcccgtataatccccgatattgatcgcgccctcggcgtgaagcctaccgagcaggatgaggacagcgcctacgacgcagacgacgccctccccggcggcctgtgggacccggaagtgggatcggtaccggggggaacaagtcatgcgagcctagcgaggtgaaatgatgctggtgctaagacttgagcgggttcctgcatcgttgcggggtgaactgacacggtggctgctggaggcctccaccgggatgtttgtgggcagggtgtctgccatggtgcgcgaacagctatggacgctggtgtgccgcagcctgaagggaggtggagcggtacttgcctatagcacggacaatgagcaggggttcgcgctgcggacatggggcactccgtcgcgggaggtggtagacttcgaggggctttcgctggtgcgggtgccgcgttctgtgcctgaggagtagtgtttttctatgtattttccagtgttgtccccacacgcgtgggggtgaaccgtcatcgtgactgttgctaatttgaacttctacgttgtccccacacgcgtgggggtgaaccgatatagtgctaatgagcaagtctcaggtttaagttgtccccacacgcgtgggggtgaaccgtgggcccagcgcgtcaccgaggctgccaaccagttgtccccacacgcgtgggggtgaaccggtaagctggtcggtcaggtcgctggcgaagccgttgtccccacacgcgtgggggtgaaccgggggcacggcatgacgtgcaaacactgcgaccgttgtccccacacgcgtgggggtgaaccggagtacgctgcgcagcacgggtggacgccgcagttgtccccacacgcgtgggggtgaaccgggcacgacggtcaacgtagacgcaagatcggcgttgtccccacacgcgtgggggtgaaccgagaggaagtccttcttccgccgattggctgaggttgtccccacacgcgtgggggtgaaccggttggcccctgtaagatcggccctcaaccccggttgtccccacacgcgtgggggtgaaccggacctacaaacggaagcggtgcgaaacatcatgttgtccccacacgcgtgggggtgaggtaaaatggaggagagtcgaccattcactatccccacatagtatcacctgcaatccaggccggctgtcgcattccgtgaggataaccgccgggaggcagcatggctacaaggtgctgaggcttcctctcagcaaagggctcagcgatcgtccacggtttaggttaatgccccgggggtacgcacctctaacggaacgaacgtgtgctaagcgttggcgatctctgcgtcgatcgccaggacccgagcgtaagcctggaggtggacgaacgccccacgcgccaagaggagctcaccaagtccctcttgccgcagaccacgggaaagaaggaaactaccgaaggtgctgtggccccagcccaactcgaaggtctcgttcgccttctggaggtaacccaaggctgttcggaaggaacgctcagcctcccccgcgtccccgatgcgctcgttgaccagcgcacgcaccaagttggtcgtgcccaaggagtacgggtcatctgatgacgcgttttctaccgcccgctcggcagtttccctcgcctcctcgacttgcccaacgcccagcagcgcttgagccaatgtccggtagacctcgggagcgacgcttgtaagcccgtgctcacggcagatgatctccgcctgacgaagctcggctatagcgctctcgaaaacccctagttcgaggtcgacttgggcccggaggagcaggctgcgagaatacatcgcgctatctccagatccgccggtcaagcccacgcctcgttcggcg

SEQ ID NO: 706 - DNA, 8129 bp, Artificial Sequence
  Synthetic Oligonucleotide
cgtgatttttttggcgcaaagcccttgaaataacactcgctgtgaattacactctgtatgcatcggttgctcctgcttgaggtgtcaagaaccccattataacaggataaagcagccgatgcaccccttcccccctaaatctagtgagaaatacgggctaaagcacttcctggctaattatcgtcgctccaaggcaactctagagcacggctgaaaaatcatatttcacccccacgcccgtggggacgacgctaaaaaaatcctttatctacggcacacgggccaaaaaaagaccgtcgaagtcttcgattgatctagctgtccttccccagcttcgcaccttgtacccctgctcattgtcgctcgaatggagcagcaaacaccccccgcccttcgcctgactgcacgccttttcccaaagcttatcccgtaccatagccgaaactcggcccgtgaacacaccgggcttgggttccaggtaccaacgggtcaattctccccgcaaacttgagggaacacgttcaagaatcatgaccaccatcaccatcctccatatctccaaccgaaactgagtagaactgaccgccttcaacttcaccgcagactggatcccacaacttacccggtgcagcttcgtcttcagcatatctatcaggaatggtctccattccatccatcagcaatactcttttgatatccgggatgatccgtgccaatatacgtgtcgaaacaaactggtctcggcaggtcaagcgtacctgtcgctctagtcccggctgatttttcgctgccgcccgaaaagcgatggggatggtcacctcggttttatacaagtcggcgatatcataaacaaaagacagcatcttcccggtatggatgaatcccagggcggtcgaaaacccagccgaaacgatcgccgcctgacaaacaccgtagaggcaggaattggccgcagatagtgcccggttcactgggtcagcattgatccattggtcgcgcttgtagctccttcccttccagggaatcccggtctctcgagacgccttggcataagattcgcgaaccctgactccctccatcccccgtatctgctgaatgctcagaacggggtcaattttttcagaaaacctcgtctgataaagactgcgcacaaccttcatacggagggtttcattggcccacaatttcgcctggtgcaagaaattaactgcattacgcgtttcacccatgccgaccgcatagaaccggacgccttcctctccgcaccaagctaccaggcacccgtgatcggccagaacggaaacagcggcatgggtgattgaaacccccggcccaagcatcagcaacgccagattggcgcaaggcaccggcaccttgcctgtggtgtcgtgaatggcgatcgccttagcttcttgatccacacggcaatgttcaacatagaggtagctccagccatcgctgaacttcggaagaatgtgaagatccttgactctcaattcttattctccgattgttttctttaaaagagctacagatagcaaaccgaaaccaaatgccttcccgctcccgatgccgtgaaccagcgcttccttaaatcggactaaatcttcaactttaagaatcccatcgtaacgtgccgagcgaagccgtctgccttgccctttgccccctttattgatgtataggtagcccggttgtacgacaatagtttccttgtcgatggcaaatccatgcgatagggtgcggcgatccagccagtcacacaaccgatcatccgggaccggaactcgctttccgatgccattttcaattggttttccatcgggtccaagggagcacttggagagccgcctggtgggattccccaagagacgaaacttgaggttctggccatgctcgaaaggcaaattgacgcgtttcacttccggcgggcctgcaagaaaatgaccggcattgtgaaaggcatactcccaatcagggcaagtggcagactggacgatgatcaccgctcgaccattcggtataatatcgatgcggaaaagaaaacctgagtcagaagcacgctccacatggacttggccgttcgcgaactcttccggtttgtatggctttaggaaatcattatcgccatctttccgggaagcggagggaaaggccatgcaaagcctctggtgcacatgatagcggtttcggagccacagccgcccgggccggggtcggtcgggattatctcccagatcgatcaacaaataggattggtacatggctattccacctcctcggcggctaagcgccgacgtcgggtctccagtgagcgaaacttgaggatctcggcccgcttttccatgatccggtcacgccagagaagctcctccggattgattcgatccagccccattcccagtccgtattcgatcatggtcacggcgtcatgacacagaccgcaaagtgatcgtagatcatccagagtttcgttgccaccggctcttcggtaggtgacgtgctggacggtcatctgcggaccgggcgacttgcagaagacgcacaaaccagcatcggtttggatccgttcttcgcggcgcttccgatactctttgttttggtagtccgctttaggacgcggcattgccggggtaggcttatggagtggcttgccgatcatagttgaaaccatgtcgcgcaagacaaaccgcggtttgtggaccggcggatcaaaggaaaccgggatgtcataccagatttccgcgtcatctggggcaacatcgttctcggaaacgggccgccattccaagagtgcttccactttaccgttttccggcgtcgggtcgtctttgttccggggataccaggggatggcccgtagtgcggtggataaatcggggtaatggctgggattggtccacaattcgtcctcttggggtctaaccaataccggaacagatggcgggcaggacttgcggccaaggaaaataggccacaccggcgacacaagtgcggcattaatactttggattaaactcacatccccctggagcgcgaccaggaaactcgcatcggccaggtactctctgcgcgtcacgagagtgcccttggcgccagttttaatatcacctccggcggtagtcaatccgattccagcccctaccgtgtgatagtcccaccagcgcataccaggccggtcgatgcgcacacccatcgcaagcccgttcagactgggcaggtgttcccgcaccatctgccgcgaaagccccatagagcaacagatgagccctaatataccggacttggtgggcgcatccatgctccgccgcatcacaaattttgaggtgtcgccccaggactggagaggcccttcaaggcggaggaagagcgtgttggctggggtcattccatcgccccctccaccatcccttccaccttcacttttttcatgattgcttcaacaaacttttcgaaactcccaaattcgttgggaccaaccatggattgcacttgctcgtgagtactcttggccttatcgatccaggtcagtcgccggtgctgattcggtgagaaccagaaacggtcggccttgatgccgtagccttcaaaaagatcgtgggcgtattggccaagcctggcaatgctttcgccgatcaaaccccgttcagatttatccggcaccggatcggcaaaggcgttcgcatagctgataggcgtggccgacttggttttgacctcaactaggataccatcaggagggttgaaagccgcgaacgcatgctgtttgcccgatggattggccttggttgccgcttccaggaagcactgtactgtggtaatggcgagttctgtatcagttgccaggttcttctttaactgctcaaagtcaatgacgaagtgcttgtaaaaacaggccgagttgaacatggcttcgttgacgtgacctgcgccggcgtcctgaccgggcacgtcatcagctgccgtgaagtagtccacctcggtcacgaccgcgtgagtggagaaggcatgagcagcggatagtgcagcctctacagagaacttacctttaagtcctgagaagggtcctttcgcatcgaactcagtcatacggccacagagcgcgatgtcgggtgttttggcgaacttcccgataatctcggcgaagttcttgcccagatcgccgtttccttggcgcacggccgcgcccatttcctttatggcggattgaggcagaaagaagagaatgtcgaaagtgttctcatccttcaggccaacccctccgtccgtaaatactttccgaatggcttgtaaatgttgctcattcggttgattgccttcgctggccgctgccttggcgattaactcgattagccgccgtgtacgcacgccgccatctttctctaaagcagcagaaaattccgggctgcggcggatgctgcgtttcagacactggctggatattcgggcgcgggtggcgcctccgaagatgcaggtcttgggtgcgcccaagtcgtcccggttcaggttcgccgggctgtgattctggatcatgtggatttcaatgagcattttttgccctccttccttttaataaatagctttgatatatatttcagcccagatatctctaacatcgcgtccgcggcggtggtcctcgcctcggtcccagatggagagatcgtcgaggagttgcacccagtcgatgccctttacatcccgcgcctgcggcaggtgccccttaacagtccgggcgacctctctcagcgcccagcgcaaatgcggctccagagatgacagggacgagcagagcagagcgtcgaatcgggtccggaaacgatttttggccccttcgtcgcgcggttcacagcggcccaggatttcaggcaaaaccggaccagcgcctgtatccggtcggacgtgcggtaccttgaaagcactgaatagtttggcgacaagccatgatggatcctggcgcggaacagccggattcttggcgcgcaatggccaccacaaaccggtgaagagatcaaaacccggaagggtggaatcgaggggttgcccagccagtcggcgcaagcgtgagagttcgccctcatgtaattctgataattttttgatgtatttgttgctctgactcatgtcgatctcccttcttgcggcgaggtttcggtttgccgtgcgtaggctacgggcacaccctcactcaatggttgagccgcctcctcaagcagtatcttgattcttttgttcagtagggcttgtgcataattcttcgctgtttgccgcctcaacggcgaaccatggattacagatgcgatgacctgctcaaccattggcgcatatattctttttagaaaaacatcgtctgattcactgtcattcgttgtggcattgagccgcttacgaatctgatcctcggtttgaggtgtcaacagcaccaccgcagcgcggatttcaaggtgctgcaatttagggtttggggtcacctgaacaagcaggttacacaatttcttgcggaaattgccggagagcttggccagatttttcgcggcatcggaaacacctggcatatctacagaaagagcatcttgaaacgtaaatttattgacgactggtccaatggccgcaactcttccttcccgctcatgtcgtaaacggagggcattccgccaaaacctggaggagtgtgcggcgacatccgaccccaatccgggcagggatatgggctcgtcatccttcagtagttgggggtcggcgtcccagaactttttccttctcccgaccgccaatggcgtcgaccagccggcttcgttacacaggctagtgacctgcgcaccaaaactaacgcaattgacacatgtgcctggcccgctcccgacattcagccacaactttcggggccgccaggcaagcatggcaattgcgtctggcgaatccggctgtgtcgcacacagccatggagattgatcaactgcaatatttgtttctggaagatttgcctgaaacgtctgaagtagattcttacctgcaacaattgaataagccgcggagcccgggttgactgacgcaggataaaacctgttggccggagcccaggacgagaggcggaggattcccagcgcgcaacacgccgggcaaaacccatagaaaccgtggaagacgtggcgcatgtgattcaccgaatccgcacctgggaactcgacgagcaagtcagcaattggtcgagattcattattcttaaccgattcatcctgatagaatcgattgccatcacccagcaacttgaacgcggttctataattattcaatttggtcagccagtcttcaggcacgccggtgctcttttggttaagctctgtgaggtcagacttcacgttttccctgcaccacatgagtaccgcagacaaaaagcgaagcaaagccactctgtccattggattgctggctgcaatttgacggatcagatgagcgtctttaaatgcttgtaaaatacctactctctttgcagcgccatttgaatagagaactggaatccacttttcatctattaggttaaaactcacaatcacctccatccataaatctttcaattaatattatcaatagttttccctccctttgattgatccttgcaattcagattaggcacctcgcagaattgagagcacgactcattcacgatcggaaatattggcgttcttaagctcatcgaactttgcggccattgtggagttgcccttagtcagcttctttacggtcaagtcatcggctttgttattggcaagacggagattgttttcagaaccgagcaacgcttccttggtcttttgaagatggtcgatggttttgtcgatctcttcaatagctgttttaaatttcttggacgccagttcgaaattccgggcgaagccagtcttgaaagccttgagctcgttttcaaagttcgtgatatcaacgttctgtgctttcaccagcgcgagctctgttttgtacttgagtgagttctgggcggcgtttcgcagcagtgtaataatcgggatgaagaattgcggtcggacgacatacatcttccgataacggtgggacacatcgacaatgccggagttgtaaagctcgctgtcaggctcaagaagtgaaacgaggatcgcgtattcacagttcttttcattccggtccctgtcgagctctttaagaaagtcttcgttctttttcttggaagctgtttcgtcgcattcgttcttcatctcgaacatgatcgagactatctcagtaccagactcatctgagtcgcgaaaaatgtagtctcctttgctgccagatcgcactacattatctttttcgaaatatgccctgggaaacgctgtggctcgaatgcggttgaactcggtttcgcagtgctgctccagggtttcgccaaccatcttggtcgataggcgagccttcatgtcccggaggcgctcgatcgcgtcatcacgatccttgatctgcgtctcgtacttgtccttgagcgacttctcggcgagctgtttctcaagctgtgcctgcgcaaggttgctcttcagttcgtcacgctccttctcaactgcattgaccgcctcggtaatcgcgagcttctgggtgacctcgccggcatcgagcttaaccttcagttccttgatctcagcatccttgtttgcagcggttttttccaactcgctggtgaccttggttaccgccagctcaacagcattccgcttgtcccgctcggctaactcgagccgttcgtgcaactgctgctcgaactctttgtcgcgaacctgcttgagaatgtctgcgtacccagcctcgtcaatcttgaatgctttcttgcagtgcggacagatgatttcatgcatgactattcatccttcgccatttgccgaatttacagctatctgctcgctatcacaaccaggcagggatattttcatgggtggatggatgaaaagcagatgataaccagataaacggcaagttttctttactaaaaacagatcatcgattttcatcccacagcctccttaaattgacattattcttttatcgtatctggatgataattttatgattgttttatgtcaacctggcgccccctaccctggctaaatcctcacaaacagtttaatcaa

SEQ ID NO: 707 - DNA, 8123 bp, Artificial Sequence
  Synthetic Oligonucleotide
caatggattgctctattgcgcggcccgcggttaaattgatattcggaattactaacccgattatggctgtccacagaaccacatctcccagtccaatggccaaggccgctacggcaagccctttcccgcgcagcattgagttgccgctgagctgtccgatggccatgccggccaatatcatcgccacggggccggtcacaagcccgacgacgggaatgcccacaagggccacgatgaacgcggtcaacgccagagggtgcagtcttgtgacctctgatgaggcatcaattgaatacgatcgactcatggtgtcattacctttaactattttatcatattcaagctgcagcttcaggttttttctaacaccaatctaacgtgactgagagaatttacacttgattttcaggagagctttggactaagaagcttcgagagcaattattgctcttttagcggacttggagagaggagtttaagcatgactttgcagcaacttcgtcaaaaggccagaagaatgggtttgaagaacatcacccggtacagaaaagaaaatttgatccgagccatccaggagatggagggtaattctccttgcttcaggggaatacatgactgctgggagatggggtgcctctggagagaagaatgccaggactgatgccactgcgctttcaaaccaacaaaatttggggaacctttttcgcaagaaaaggctctccaaatccttccaagaaacttttaccatttgtctgaatccctgtttttccaagaaaaaatcgggattcagacaaaatgctggaagtgcttgggatggagttcggggaaacacttcttcaagaaggtttccccgatttcagttctttgagtacgaatagacatcatcgaccggtgagttcaattcacggttcacccccacgtgcgtggggacaacgatctggcggtacttctgcgggcctacgaaatcggttcacccccacgtgcgtggggacaactcggggtttgtggccaccattttgaggatgatcggttcacccccacgtgcgtggggacaacggctgaagctcccggattgccccacccataatcggttcacccccacgtgcgtggggacaacaaccttgccggagaggtagcccagatttggcacggttcacccccacgtgcgtggggacaacggtgtcaagcttttccgtgatactgtggaggccggttcacccccacgtgcgtggggacaacttacagaggaacggcattgtcgagagcggcagcggttcacccccacgtgcgtggggacaactcatccggttgcttgaaaacaagggcggctttcggttcacccccacgtgcgtggggacaacagaggatataactgaatcgggctacctgccgccggttcacccccacgtgcgtggggacaactccccgtccgcctcggttgcttcctcaataaccggttcacccccacgtgcgtggggacaactccccgtccgcctcggttgcttcctcaataaccggttcacccccacgtgcgtggggacaacggtgtatagcgtgttaaggtccttggctattacggttcacccccacgtgcgtggggacaactgtccaagtgaactatagggtcgcgtctggaacggttcacccccacgtgcgtggggacaactcatcccaaatgtccgtatggcccgcttcggacggttcacccccacgtgcgtggggacaacccctgttcgcggctgtcgtgtagttggtggggcggttcacccccacgtgcgtggggacaacaacgccgtagacttcccgactgcctttggcgtcggttcacccccacgtgcgtggggacaactggttgaacgtctgagtaagtcctgtcatgaccggttcacccccacgtgcgtggggacaaccctacatttaagaccgtgattccctggcgcgccggttcacccccacgtgcgtggggacaacggatccgacactccaactatcggaggaacggtcggttcacccccacgtgcgtggggacaacgaatcccgttccagcgggtgcggcaattccaccggttcacccccacgtgcgtggggacaacgcgttggcagccccgcctcccggagaggccgtcggttcacccccacgtgcgtggggacaacgtcttgtaaagttcgcaaagctttcacatccccggttcacccccacgtgcgtggggacaacgacccaggcaaccacctacaagacgaaacacatggttcacccccacgtgcgtggggacaacttaaggtagcgtctaatattgtctaggatcttcggttcacccccacgtgcgtggggacaactatcaaccatcaactacggggcgtttcgcgcccggttcacccccacgtgcgtggggacaacactggacaaaacggctctacttgggaattcgtaccagaaaaagaccctcgaagtcttcaaacaggcgtttcgactccccggaggagcgcattgcaaatccttgttcggtattgctgtcatgaatcatgagacagcctccaccccgtgactcctcacacgctttctgccagagtcggtctcgcaccatccccgaaacactgcccaggaagatcccggtcttcggctccaacatccaacgggtaagctcgcctcgcagccctgtgggcaccttttcaagtatcagcaccaccatcttcttccccaacttctccttcttccgcaaaattcttgccgctttccacggctccctccacggggtcccagagagaggctggaagagccggatcagaatcaagggccgatgatatccccggttggccggcgctctttattcgcagagcgaactgaatatcctgaatcaccttctttagaagcatgttctttttgaacgcgtccctcggcgctcttcgtgcccgggtctcaagctgttccaagccctcggcgacgatagagaacgctatgggtatggaaatgtcggtcttgtaaagatccgctatgtcgtaaacaaaggacaacatttttcccgtatgaatgaatcctatcgcaggggatagcccaagagccaaaatacctgcttggcagattccgtaaaggcaactgtttgccgcggaaagggcacgattaacagggtccgaggcagcccagttcttccgatcataggatcgccctgtccacggcactcccgtgtctctggaagcgcaggcataagcttctcggacacgtatcccttccctgcctcgaatctgcctcaggtcccatgagtccggcagaggctcgtcaaagcgcattttatagagtttgattacaacctcgatacgtgtgtccgggtctgaccataaacgagcctgatgtagcaagttgtccgcgttcctcgtctttccctggccgtaggcatagaagcgcacaccctcttctccaccccagcacaccagacatccattatcggctaaagctgaaatcgctgcatgagtgatacttgttcccggccccagcatcagaaggcacacagctgcacatgggacagggatcttcccgtttgcgtcaagcaccacgatggctttgtcttgctgctcaatcctgcagttgtccacatacaggtaactccaggaatcacggaacttgggcagaatatgcagatcatgtattctcatgccgccgcctcccggagtcagggcttaacaggcgccacagaaagaagaccgaaaccgaacgctttagccggaccgataccgcagatgaggctctcttgaaaatgggcagggtcagtgatcttgagtattccgtcgtaacggacagagcgcaggcgttggccagggccgtctgatgtcttgttcacatagatgtagcccgcctgcacggcggtggaatccctgtcgatggagaatcccgccgggtcggcgcgacgagcgagccaattgtaaagctcgtttgtccgcacaggaacgcgctttccattgcgtcgacacccatctggtccactcttcgtgtcgatcttgcgtgtcggatttgccacgagacggaatcgaagatgctgttccagtgagaaactgaaagcgggaaagttcacctctggaggagccgccagaagatgatcggcgttgcagaacgcgtagccccagttgggcttcgctgccgactgtacgagaatcacgaccccaccaccagccagagggtctatgcgatacaggaacccggcgtcgggacctcgagtaacgtgaacctgattggagccaaaatcttccggtttgaagggtttaagaaagtccgcgtcctcagatatcctggactcagatggaaaggccatgcacagacgctggtgaaccctgtatcgatttctcagccacagccgcccaggacgagggcggtcgggattgatacccacatttatgagcaacgtggagacgtacatcactccacctcctccggtttcaggcgtcgacgccgagtttcgagggagcgaaactcgatgatttcagctcgctttctgacaatttgctcgtgccagcatgaatcttcggggttgatccggtccaagcccatgcctaggccgtactcgatcatggtgaccgcatcgtggcacaatctgcagagcgaacgaaggtcttctcgctcttcattgccaccggcccttcggtacgtgacatgttgaaccgttgtagctggagccttgcaaaaaacgcacagctcgtggtcggcagtgagtcgggcgctgcgcgccttacgatactcgttgtttcgatagttcgctcgctgtctcgggggaggtggtgtcctatcctgagctgctgtttcagctacactgacctcacctgctgtgcctacacgtagtgccttgcggataacgaaccggggcctgtgtcccggcggttcgaacgtgagaggaacgtcataccagacgagggcatcattgggggcctcgggctgtgcaggcgtactctcccagtccagcaggcagtctacgatttgcggcgccgcctctctcttgaaccgcggacgccagggaatggatgtcagcgccgaatccaaatcagggtaagagccagccggatgctccagaagaggacgggagggcgggcaggcttttcttccgaggtatagcgtatatttgggctttcgtactgctgcatccaactcgtcgataaggcccggttcgccttgcagtgcaaccaaaaaggaagcgtcacacaggtactctcgtcgtgtgagcatcgcgccgggcttgctcttaccttggcctgcggcaatgcgcatttccatccctgctccgaccgtgtgatagtcccaccaacgcacacccggcgagtcgacgcgaacgcccatgcgcagggcgccgagccgcggaagccaaagctccgacgccttggaacgcgacagacccaaggccgcgcagagcattccgatcactcctgatttggtcggcgcttgagctgttcggcggacgacgaacttcgactcatgtgcgccccatgcctgcaagggaccctccaggcggagaatgagtgtatcggcgctcatgaggccaactcctggctaatgacgatcctctgaaccgagttccagtcatggtcgatggcagtaatcactgcggggatcaattcttccagcgatttgatgttattctcgctgaggaggatctcctgctcattttcgactacagtcaagcggtaacggagattaggcgagaaccataaccgtttccgcggcctgccgtatccagtgtccatgtcgtggatgtattgtcccaattgcgctatgctttgagagataatgtcacgctggccttgggctgccggtttagcgaaagcgttggcatagctgatgggcgcttccttaatttcaaccagcattccatcaggaggattgtgtgcggcgaagctgttttgttttcccgtgggattgaccaatgccacgccccgaatgaacgcgcccaccgtgtgggcggccaaatgttcggcgttgccctggaagccttggagattcttgacgagtgtctcccagtggatcgagaagtacttgtagaaacaggcagaagaaaacatggcttcgtctacatagcctgctcccgcatcgtcgccaggaatgtcgtctgcggcaacgtagtaatccacttccgggcgcgcctcatgggtggaaattgcatgagccacctgcaacgccgcttccacagtcgtgttttgcaggacgccggtttccagcattcttccactcagggccatgtccggtacggcagtccgttcagcgatcagtttcccaaattccgtcgcaagctcttcatctgtctttccgccgctctgcaaaagagtggccatttcgttgatcgcttcgcgagtcgtgtagaccagcatgtcgctcttgtcctcgtctcttggtttgatgccgcactctttgagaatctttgcagtgcgtttcttggcatccgccttacccccgactctctcagcgataagcttcgctaactgtcgcgtgcgaatgccaccgcagagtttcttgaactcatcactcgtgcggatgctgcgtttgaggcattgactggagatacgcgagcgcattaccccgccgaagtaacaggttttaggcgcacccaggtcgtcccggttcagatttgctgggctgtggttctgaatcgtgtgaatttcgatcaacatgagtccttcctttcataggttttcatgaattgctccgcccacttgagtcgcgtagattcgcgttcccaaatggagagatcattcgtgagtgtcacccaatcgagtttcgagctgtttttagccacccaatcaagcgcccagtgcagagcgggctcgatccggctgagcggcaggattagcatccgatcaaatcttttctggtatctttgccttgcctgctcttcgttcggctgacagtggcgcaattgatgcgcaagacaatcgccttgaaaatgcgggatggggcaaaaggcgtagagtttggcgatcagccaggcaacttcgcggcgaggagccctctcgtaactcgcgcgcaagggccaccacaggcccgcgaacaggtcaaacccgtcgaccgactcatcaagtccttgcccagcgtggctgcgtagcagacccaagtcaccctttttcaaccgagtcagaacatctatgtactgttccgtaggagtcacttttcgtctcctttcttggtgcggcgggttttcttcgtttgttcgaccccaggccgcatggcgggtgccacactggcaattagttttcgctgtcgcacagcatcggttgtgaaaccgggggaaagcgattttgcgataacggccatcattgagcgatattcatgggcggcgtgttcccacgtttgggaatcgtcaacgataaggttgctcgccatctcagagactttgtgttcgacgtgtgggcgaatagcatccaggaccggtggaatttcgatgtacttgcgggaagatcccttttcctttggaggacggattctgcgggcaagattggctccttccttctgccattgacgtatcaacgatgccgccgtttcctgtattgatcgtcttgacagtctcccaatggttcgttcccatacgtcaatgttctttgcctggtccgtagcaaagccgacgacgagaaacgatattgggccttcacgaagcccaaactttcccatttccacgatgcgggcaagcaggtcaagccacggtcggtccattttgaacttgcccgttgcggtcaaatcaggtgctctaatggactttcgtggattcttgtccaaataaacaacatggggatcactccacaactcattttcctgcttgccggcggtctgaaactcgcaggttctgataagcgccagtttctctgccccgcaaccgccacacttgcccgctggcaccgatggcttatgcagccaaacccgccgcgatagcagtgtcaagccggtcagcaggggtacggcctcacttgaagctggacggatgtctggttgaacccacgcgggatcgccaagctgcccgagttgcatccagttcctggaaagggtattcaagagcgaagtgcccaaaatcatcacatagaggggtggtatgccgtttatcccggccattaggttgggcaggccacttacggagaatagcggtagccgtagcagccccata

SEQ ID NO: 708 - DNA, 8114 bp, Artificial Sequence
  Synthetic Oligonucleotide
ccgccggttcacccccacgcgcgtggggacaacggatacggacgaggttggaatgtgcgcgccgccggttcacccccacgcgcgtggggacaacttctgcgacaccacacccatatcaagctacatcggttcacccccacgcgcgtggggacaacaccccaagaaataattcccctgggaaccgtaccggttcacccccacgcgcgtggggacaacttcaaactggcgttctttataagatgcagaagcggttcacccccacgcgcgtggggacaacgaaccctgcctgtaactacactcacgactccccggttcacccccacgcgcgtggggacaactttcagcggcaatgcgaatcgccgcgagctgccggttcacccccacgcgcgtggggacaactttggggtataaggccgctgtgctgcccgatgcggttcacccccacgcgcgtggggacaacacatccaagtgcttggtcttgatattgttttgcggttcacccccacgcgcgtggggacaactggggtacggtgatcctgcctgcggctgggaacggttcacccccacgcgcgtggggacaactccgcgaccttctcctccaacacggcccgctgcggttcacccccacgcgcgtggggacaacatcggtcgagcagaaggtgcaagccaccattacggttcacccccacgcgcgtggggacaacgcatcggccttggcctcagccttaacctgcgccggttcacccccacgcgcgtggggacaacgtgatcgaggaccgtgccttcaaagttctcccgcggttcacccccacgcgcgtggggacaacccgcagtctcacaagcgcgcgtcggccccagccggttcacccccacgcgcgtggggacaacatcgccagcacgcgccccgcgccctcggaggtcggttcacccccacgcgcgtggggacaacctaagtggattcgccttgccactcgccgataccggttcacccccacgcgcgtggggacaacatcaagcgccagccccggcacatgcagcatatcggttcacccccacgcgcgtggggacaacttctttccagcccatgaaaccttcagccccggcggttcacccccacgcgcgtggggacaacacttactaaattattgattctgcggcatgcgaacgagaaaaaggccctcgaagtcatcgatgacccgagctgtttggccccaggttcggactcgaaagccctgttcattgtcgcttgaatagataatcaagcacccgcctcccttggcctggctgcaggctttttcccagagccgatcacggaccatggcggagacgcgtcccacgaacactcccgcctgaggttccaaaaaccagcgagtcagctcgcctcgcaaccctggggggacgcgctcaagaatcaggaccaccatcgccgggctccgtttcaccgatttcgggggctagcaggcggccgccttcgacctctccttccagattgtcccagaggaagccgggggcggcggcatccaggtcgaaggtagtgtcccaggccgtcgcttttgccagcatcaacgccctttggacatccgggatgattctctccagaagccgcgtggatacgaactgatcgcggcaggtgatgcgcacccggcgttccaactgtcccgtcccctcggcggcggcgcgaaatgccactggaacggtaatttcagccttgtacaggtcggcgagatcgtagacgaaggacagcatcttgccggtgtggataaacccgagtgcgggcgaaaaacctgctgacacgatggcagcatggcagattccatataggcaggagttagcggcggacaaggctcggttggcagggtccgccttgctccactcatcgcgtttatagctgcggcccgaccacgtgatgccggcttcctgggcggccttggcgtaggcatcgcgcacccgcacgccctccatgccgcggatttgctggagggtcagggcagggtcgaacttctccgaaaatcgcaactgatagaggcggcgcaccacctgcatatggaaaccctggtccgcccacagcctcgcctgatgcaggaagttggccgcgttgcgcgtctcgcccatgcccacggcgtagaagcggactccctcctccccgcaccaagccaccaggcacccatggtccgccaacacggagatggcggcgtgagtaatcgagacgcccggacccaacatcaggagagccagattggcacaggggaccggcaccttcccggcttgatcgtggacggcaatggcccgctcttcctgatcgacgtggcaatgctcgacgtacagataactccacccgtcactgaacttgggtagaacgtggagatcttgaattctcacagagcctccagcccgtgctgtagcgtcgatctccgatcgacggcggttgtagcgtcgatctccgatcgaccggggttgtagtcgatctccgatcgacgttacggcggtcggagaccgccgctacaaaaccaggcgatggatctcaccctggtacggccaatcttccgggcgcttgactaaaccggcccggaccggattctgccggacatattcatatttctcccgataggattcttgcgatctcaggacgtgatcgaaaaagtctttctcccaatgtgtgccctcgccctcatcttcccggaggactttggataaatccccgcgcagcgccttgatccatttccctaaaggtggggactcacgacaaaagccggcgaaaagatggatgtgatcaggcatgatcatgaagaacccgacccaaacaagaaaatcgctcgcccgttcggagaatctcgtgaattcccggtgaatcgcaggatttgccaacgagcgtttgcggtcctgcgtacacagcgtgagatagtagattgggctgcccgtatagagccagtccagtcgccgcaagcggggtttgaatttcatattggctcgatctccgctcaagaaatgttgcacggatccccgatcgacaagggattgtagcgtcgatctccgatcgacgtaccggcggtcggagaccgccgctacagcgagagcggcgccacggaaagcaggccgaagccgaaggctttgccgtgcccaacgccgcccacgatggtttctctgaagctgtccgcgtcctcaaccgtaagcgtcccctccaataacgccgagcgaaatttcatgcggccgcccgtcggcctcgggtcggatcggtctcctgcgccccacccgatctgcaagacccggaaagtttccacttggaatccaccttggccgcccttgccggcgaaccattttcgtatcacatcgtcgcggttctggtccttgtcccaggtcagcgccacgcgtttgccttgggccttcgggcggccccgcttatctgtcccctctcgcgtcctcgtaagatcaacgccctctgtgctggtttttatcttcttactcagattggcgcggatacggaagcgaagccgctgacccttctcaaagcgggggtcgaattcctgcacctgagggggagcggctagaggattcagaagaaaacgggcgttgtggaaggcgtagccccagtcaggctttacggcagagttagactggacgaggatcacgacccgcccgcccggttgcgggtcgatgcggaagagaaagccggagtcgccgtcacgtcttacatggacctggttgttggcaaagtccgcgggtttgaaaggcttgaggaagtggggatcgtgggatattcggtctttggatggaaacgccatgcaaaggcgctggtggacgtgatggaggtttcgcagccagagccgcccgggcctggggcggtcggggttggtgccgacgtcaatcaagaggcaggagaggtacatggctattccacctcctcagcggcaaggcgtctgcggcgagtctccagagagcggaacctgataatctcttcccgcttctcgatgatcttgtcgcgccaacggggctcttcggggttgatgcggtccaagcccattccgagcccgtactcgatcatggtcacggcgtcgtggcagaggcggcagagggagcgcaaatcgtcccggagttcgccgccgcccgcgcggcggtacgtgatgtgctgcacggtgctggcgggagacttgcaaaaaacgcacaagtgatagtcgtcgtcgagccgctccttgcgtcggtttttgtactctgtgttcgtgtaatccgctcttgggcgcggaggcggtggcgtgtcgctctgcggtggctgcaccgcaagtgttacgtcgccgtccgctccgacgcgcaactgcctgcggatgacgaatcggggttggtgcgacggcggctcgaatgtcaacggcacgtcgtaccagacgagcgcatcatcgggcgcctcgggctgctcgttggtgggttcccaatcaagcaggcaatcgacgggtcgcggctggggatcgtccttcagccgccgacgccaggggaccgattcgagggcagaaagcaagtcggggaattcacctcccggatgctccagcagagggcggcaaggggggcagcactttctgccgaggtagagtgtccacttgggcgctttgattgccgcctccagttcctcaatgaggtccggttcgccctgaagagcgacgagaaacgaggcgtcgcaaaggtattcgcggcgggtgagcatggctccggacttggttcccccctcggcggtacgcatcggcatccccgcacccaccgtgtgataatcccaccagcggacccctggcgcatcgacgcgtacgcccatgcgcagccgggccagccttggaagccagccttcgcgggcctctggccgggaaacgcccaatgccgcgcaaagcatcccgatgacgccggacttggtcggcgcctcggccgtgcgccgaatgacgaacttggattgctgatcgccccatgcctgaagaggaccttcaagccgaagtagcagcgtctttgcgctcatggggcacctccggattcaggaccactttcttggcctcctgccagtcgtaaccgatttccttgagtacagccgctatcagttcgtcaagagacttaacatctttgtcggcaagcgggacctcacgctgtttctgttttccgtcttcgctctccgtggtggtagccgtcaacggatagcggagatttggagagaaccagaaccgcttcgtcggcttgccgtatcccgtatctatgtcgttcacataatgggcaagctgcgccacgctctgcgagatgatgtcccgttcgccctgaggagccgccggtttggcgaaggcgttggcgtagctgatgggagtgtttctgacttccaccaacatcccgtcaggagggttgtgcgcggcaaaactattttgttttcccgtggggttggccaaggccgcggcgcgaatgaaggcgccgacggtatgggccgccagtttttcgtgattcgtcccgaagggcttcaggtttttgaccagcgtttcccaatgaatggagaaatacttgtagaaacatgccgaaccgaacatggcttcatccacgtaacctgcgcccgcgtcctcgccggggacatcatcggcggcgacatagtagtccacctcgggccgggcctcatgggtggaaatggcatgggcgacttgaagcgatgcctcaaccgtcgtgtctttgaggactcccgtttcaagcatcctgccgctcagcgccatgtccggcacggcgacggattcactgatgagcttgccgaactccgctgccaaggcctcgtccgtttttccgtcgccctgctggaggagttcggccatgcgtgtaatcgcctcttgggtggtgtaaaccagcatcttgctcctctcagcactttcctgttcgtcttctccttcctgtttttttgctttcttaggctccagcccgcaggctttgagaatgttctccgctcgcttcctgacgtctttgcccgtcaccttttccgcaatctctttcgccaactggcgggtgcgaactccgcccagcaattgtctgaactcctcactcatgcggatgctgcgcttaaggcactggctggaaatacgggagcgcaagactccgccaaaaaagcaagtcttgggcgcgcccaggtcatcccggttcaggttggccgggctgtgattctgaatggcgtgaatctggatcaacatgactctcctcctcttggacagttcaaaaattcctcggcccatttgagccgggtggattcgcgttcccagatggaaagatcgttcgtcagccgcacccagtcgagttcgaggtgcttggaagctatgaggtcgattgcccactgtagggcgggttcgatttcagcaagcggcagcgtgagcatcctgtcgaagcgttgctcgaaacgctgccgcgctgttttctcgcccggccgggatcgcccgagctggcgagcgagggtctcgcggggtgaatgctcgaggggccggagggcgtagagtttggcgacaagccaggccacctcacggcgaggcgcccgttgggtttgcgcccgcagcggccaccaaaggcctgcgaaaaggtcaaagccctctaccgattcgtcgagcccttgcccggcatggttgcgcaagagcccgagctcaccgggtttcagtcgagtcagaacttcgacgtactgctccgttggagtcacttgtcccccccttcgtctttgttgtttctctttggccgcatgtccggctttacagcggcaatttcttgtcgcctccggagggaagcggttgtgtagcccggggaaagcgatttggcgacggcggccatcaacggacgatattcctgggccgcctcttcccatgccttaccgccttctgcgatcatctcgtcgatttttccggaaaccgttgcctcggcttggggacgaacagcggcgactgcggagagaatttcaaggtgtcctctgtttcgtgaagtctctcgcggtttggctctgccaacgagcttccagccttccttctgccacgcctggatttcttgcaaactcgcctgaaccttcacgtcgtcgagcgcggccaagaattgaatctcccgctcggctgcttccaggtatttgtcgttctgcactgtcgcaaagctgacgacccacaacttactgttccccttcggcttttccccgcacaggattcccgccacgaccttcgtccacttcccagccgcagcgtcggccgggccaagcgcgctgaaaggcttcacaatctcgtcgccttcgctgatggtgtgcgggtcgttccagattcgtgccagactgccttcgcctgtctttgtgctcccaatacccgcaaagacacattgacgtatcagagcctccctgcgcccgcaggcgatgcagttggactctggtgtctccggagtgtctaaccagacgcgccgcggtacccacgttaatcctatcaataatggaacattgccgtgttgagggaggcttatgtccggattttcccatgtgggcgtgcccaggttcatctccgacgtcttccgccatgagaggcgcagggtttcggaaaggcagtcgcccatcggcacgatgtagatcggcggtttttgattgacgcccgggggcttgccgcgcccggccgacgtagcaaagagcggaaggcgcaacaagcccattgcgcagcatgccggacataagccgtttctgaaatctgtcccatgccggaagtgccagaagtttgtgccggtcggcacttcttgcatcagatagttgacggacagcttcttctcaagtcggttaggcttgcgttggtaaaaccgcttcccatcgccctgaaggttgaaacagtctttgttgtcatcgagtttcttgaaccaatcagagggaaacgaagaaatcgagttcttgtcgtccgggggattccctttgcaccaatagagcaacgcaagcaggaaacgcaggatggccaggcggtccattgggttgctggccgcgatttggcgaatccggcctgcttgcctaagggcctcactaatgcccacgcgaccgctgtgcccatctttccacagaacgggaatccacttttcttcgagcaggttgtactccacggcttcctccttgcctgggcaagaggcgggtggca

SEQ ID NO: 709 - DNA, 7962 bp, Artificial Sequence
  Synthetic Oligonucleotide
gatttcggttcacccccacgtgcgtggggacaatgctcttctggcagtgttattccatcctctacacggttcacccccacgtgcgtggggacaatagtcgcaggcggcttatgcagtcctccgccttcggttcacccccacgtgcgtggggacaattcgcctcattcgtcctcctcctcgcccgctttcggttcacccccacgtgcgtggggacaatactgaaagaaaccgcgctcttagggcatccggacgagaaaaagcccttcgaagtcttcgatcgaccgcgcggtgcgcccccaactgcgtatctgaaatccctgttcggtgccgctcgtatagatcatcacacagccgccttcccttgcatgcccgcacgccttctcccagagttggtcccgcaccatggccgaaacccgtcctacgaacacgcctgccttcggttccaggaaccatcgtgtcaattcgcctcgcaatcccggcggcacacgctcaaggatcagaactaccatcgttggcctccgtttcatccacttccagcggatggatgcgcccgccttgcacctgtccctcctgcgggtcccacaacgagcccgggacggcggattcccggtcgaactgttcagtgtcgccctccgtgccccgcactgggagcgccagcgccatctggatatccggaatgatcctttgcagaagccgcgttgagacaaacatgtcccggcaagccaggcgcacgcgtcgctccagttctcccttcgcttcggcgaccgcgcgaaacgccgccgggatcgtgacctctgttttgtagagatcggcgacatcatatacgaacgacagcatcttcccggtatggataaacccgagcgccgaagagaagcctcctgacacgaccccggcatgacagatgccgtacaggcacgagttggcggtcgacaacgctcggttcaccgggtccgcgttgctccacttgtctggacgatagcctcggcccgcccagggcacgccggtttcccgagcggccttggcgtaggcctcgcgaacgcggatcccctccatcccgcggatttgccggagggtcaacgccggatcgagcttttcggaaaaccgcaactggtagagacggcatacaacctgtatgcggagttcctcgcacgcccacattcgcgcctggtgcaggaggttggatgcgctgcgcgtctcgcccatgcccaccgcgtagaaccggaccccctcttccccgcaccatgctacaaggcacccatggtccgccaagaccgagaccgcagcatgggtgatcgagacgccgggtcccaacatcaagagagccagattggcgcacgggacaggcaccttgcccgcggcgtcatgaattgcaacggcccgagcgtcctggtcgatccgacagtgttccacgtagaggtagctccacccgtcgcggaacttgggcagaacgtgcagatcttgagttctcatgtcggctcttccctgagtgaacgctggcagggcgctacagagagaaggccgaaaccgaaggctttgccgggcccgagcccacggacaagggtttcctgaaaacgagcagggtcggtaatcgtgagggccccgtcgtaacgggcggagcgcagacgctgtcccttctcgtcgcgtgttttgttcacatagatgtagctcggctgaacggcaatggaccgcttgtcgatggagaaccccgccttgcccgcccggcgagcgagccactcaacgagttcgtcggtcggcacagggacgcgctttccgtgtcgtcccttcatggcctgtagttcacttttggtgtgactctgtcgagcctctttctggagggtatcaatcttctttgtcggatttgccacgagacggaatcgaaggtgctgtccctttgcgaagcgcggctcgaatgacttcaattccggaggagccgccagaaggtacccggcgttgtgaaaggcgtagtcccagtcgggcttgacggcagattgtacgagaatcgcgacccgcccaccgggctgcgggtctatgcgaaacaggaacccggcgtcggtcgcccgagcgacatggacttggttggctccaaagtcttccgggttgaagggtttgagaaaatccgggtcatcggccatcctggacgccgacgggaacgccatgcacaggcgctgatggacatggtagaggttgcggagccacagccgtccggggcggggccgatcggggtttccacccacgtcaatcaagagccaggataggtacatgtctattcgacctcctcgggcgcaagcttacggcggcgcgtctcaagtgaacggaactggatgatttcccggcgtttctcaatgatcaactcccgccagcgttcctctgccgggttgatgcggtccaggcccatgcccaggccgtattcgatcatcgtcacggcgtcgtggcacaggcggcagagcgagcgcagttcgtcaatgcgctcatctccgccggcgtggcgataagtgacatgctgaacggtcgtcgcgcgagacttgcagaacacgcacaggtgatggtcgcggtcgagccgctcttgccgacgtttttcgtactcggtgttgcgatagtcggccctcggtcgaggagggcgcggcgtaaggttctgggcgggctcgtccgcgatgctgacttcgccgcccgtgcccacacgcaattgccgaccgatgacaaaccgggggcgatgcgccggaggctcgaacgtcagcggcacgtcgtaccagatcagtgcatcgtcgggggcttggggctgctggggcgtcggctcccagtcgagcaggcaatccacggttttgggcgaaggctctcctttgagccgcggtcgccaggggatcgatacaaccgctgaaaccaaatcggaaaaaacgccgcccggttgctccagcagcgggcgggatggcgggcaggactttctgccgaggtacagggtccaccggggcgccttcactgcggcatccagttcggcaatgagagccggttcgccttgcagtgccacgaggaaagaggcgtcgcaaaggtactcgcgccgagtgagcatcgcgccgggcttggtctttccctcggcttccgcgatgcgcatgtccattccggcgccgaccgtgtgatagtcccaccaccggacccccggcgcgtcaatgcggacgcccatgcggagggcaccgagcttcggaagccattccccgccggcctgcggacgggaaacgcccaatgcggcgcacagcatcccgatcactccggatttggtcggggcctcggccgtccgtcggataacgaactttgattgctggtcgccccacgcctgcaaagggccttcgaggcgaagaaagagggtgttgccgctcatgaggccacctcagaattcacgatggacttctgaacttcctcccagtcatagccgatggccttaatcacggcggggatcaactcttccagtgacttgatgttgttctcggcaagcgcgatctcctgcttgttctcgacgacgttcaagtggtaacgcaaattgggcgagaaccagaaccgttgcgtcggcttgccgtatccggtgtccagatcatgaacgtattgcgccaactgcgcgatgctctgcgagatgatgtcgcgttcaccttgggctgccggtttggcaaaggcgttggcgtagccgatcggggtgttcttgatctcgatcagcattccatcggggggattgtgcgcggcaaagctgttctgcttgccggtgggattggtcaacgccgccccacgaatgaacgcgccgagtgtgtgcgcggcgagcttttcgtgattctctccatagcccttcaggttttcgaccaacgtttcccagtggatcgagaagtacttgtaaaagcacgccgaggcgaacatggcttcgtccacgtatcccgctcccgcgtcgtcgccgggaacgtcatctttggcgacatagtagtccacttctgggcgggcctcgtgggtggaaatcgcgtgcgccacttgcaaagaggcatccacggtcgtgttgaggctctcccagacatccttcgcggccttgtcgggttccaacatgcgccccgacagcgccatgtccggcaccgccgtgcgctcggcgattagcttagcgaactcccttgccagttgtttgtcggtctttccatcgtcgttcgacaaaagtgcggccatctcctcaatggcctcgttggttgtatagacgagcatcttgctcttgtcggagtctttgagagccttgtcgtctgtgttttgcttggtcgcgctcttaggctcgaatccacacgctttgagaattctctccgcgcgtttctttacgtcggacttgcccgtgaccttctcggcgatcaatttcgccaactgcctggtgcgaatcccgccgagcagtttcctaaactccttgctcgtgcggatgctgcgcttgaggcactggctggagatgcgcgagcgcaggacgccgccgaagtaacaggtcttgggtgcgcccaggtcgtcgcggttcagattggccggactgtggttttgaatgacgtgaatttcgatcaacatgactgtcccctttcatcggttcccagaaattcctccgcccactcgagccgcgtggcttcacgttcccaaattgaaagatgatccgttagtttcacccagtcgagtttccggctgcttgaggcgacctcgtcaagcgcccagcgcaacgccggctcgatcttgtccagcggcagcatgagcatccggtcgaaccttttccggaatcgctttctcgcggtgtcgtcgtttggctgacagcgccctagttggcgggcgagcgtgtctccgggcgactgtgcaattggacaggagccatacagcttggcgatcagccacgccaccttgcggcggggcgcccgctcgttcttccgtcgtagcggccaccacaaaccggagaacagatcaaatccgccgaccgattcatcaagcccctgtccggcatgagtacgcagcagcccaagttcaccggtcttcaactgcgtcaagacgtcaacgtactgctccgtgggtgtcacctgtgccctcccttcttccggtcggatttctcggccgtatctgtttttggccgcatgtcaggcgctacgctggcaatttgttgtcgccgccgaaccgcctccgaggtaaagcccggagaaaccgatttggcgatcacctccatcatgggtcggtattcctgcgccgcgcgctgccatgcttgatcagtaccggcaatcagttcgcccgccttcgcggagactctgccttcgacatgggggcgaatggcggcgatagtggccgcaccctcgacctccgatcgccctatccgtttctccaatagcgagcccttctcccgccattgccgtagcaaggatgccgccatattgtggattgatgttcccggcggcacggcaatggttcgctcccacacgtcaatgttctttgcctggtcagtggcaaacccgacgacaagaagcgatgtcggtttttctcccggtccgaacttgcgcgtttcaacgacatgagcaaagagatttggccacgggcgatccatcctgaacttgccggccgctgtcaggtcaggtgctctcgcggcttttcgtggtgtcttgtccaagtagacaacatggggatcatcccacaagtcattctcctgcttgccagccgtcttgaattcgcatgtccggatgagagcgtgttgcttcgctccacatccgttacacatgcccggcggcgaggacggctcatgcaaccagacccgccttgacagtagcgtcaagccggtaagcagtggcacgacttgattcggggttgggcgaatggtcggctgaagccatgctgggtcgccaagttgcacacgtgtcacccagctggcgcaaagggtatccagcagcgacatgccccatggcagaagatacactggtgggacgccgttgattccagacctcaggtcaggcaggccactcacggagaacagcggcaaccgcagcagccccagggcgcagcatgcggggcaaagcccgtctttcttgtccgtcgaatgtctgaaatgccagaagttgttgcctgtagggatctcttggatcagatctgtagcaggtcgcggtcttcgtgcatcacgatcctgatagaaccgctttccatcacccagtagattgaagcaatctttgttgtcattgagtttcgagaaccaatcggcagggaacgggtcgccagagctggcttttgtggtgtctggtggactccccttgcaccagtatagcaacgcgagaaggaaacgcagaatcgccacgcggtccatgggattggtcgccgcgatttgtcgaatccggcctgcttgcgtgagcgcctccctgatgcccacgcgaccgggcttcccatcggtccatagaacggggatccattgctctacgagcaggttatagttcttgggattctcgcccatggcttcctcctccgcgtttgttcgtgaaacttcgcgtatcgaactgcgacttgtggggtttgagcaaagccaatgggtgctcgcgcgcgatgaccttgagtccgtcggcgtgggcagacggcctggggttgtatgtcgcattgctgttgaaaggtgggtcgaggttcataagatctcccgcctcgtctgacatatgtcgacggagcaccgctagattgtcacggtagtataggatattctcgaccgagccttcgcgccgctcccctcgcaacacaatgatacccccacaagggttgcgtgtcaagcgcgctgcactgctccgcttgaatcatccccagttctgtcaacttctcggaatcgcctcatcagacaggctggctcggagggacgtgcttcgaggacgccgttccttcgcagatgtttgatggtgtacatcgcaagctccatgttgcgcggcttaaatcctgcaagcacagggaagttctcccctttgtcgctgctgaagtcgaacactacagctgacaaaacgctgacgtagatacctcgatagttcggatggacgagattccctctctgaaagtaccgcaagcgcaaacagaaagggttgcttgttctttagaaagcaataccgtaattgtgcgaaagtgcttgacaaatcgttgggtctatggtgtctgtaaaatttctcttgactttagccgagagatatgctacactgacgatgtaagacgaaactgagaccggaaaggagggggatcggaacatggttagaaagggacaggcgcgaaacggtgacggcaagtttgtcgcgtattaccgggtgagtacggcgcggcaaggacgctctggtttgggactggaggcgcagcgtcatgcggtccaggagtacgtcaagtcgaagggcggcgtagtggtggctgaatacaccgaggtcgaatctgggagacgacacgagaaccgacctgagcttctcaaagcggttgcgcataccaaacggttaggcggttgccttgcgatagcgaaactggatcggttgacacgcgacccggagtttctttttcacttgatgaatgacgggctgaggttcgtggcggttgattatcctgacgtgaacgagatgacggttgggattctggcggtcgtagcacgagacgaacggcagagaatttcgacgcggattaaggaagcgctcgcagcggcgaaacgtcgagggacaaagctcggctcacaccgtccgggtcattggtctggacgcgaagcgcagcggcttgccgggggagcgaagggtcgaaaggtagcgcgtcaggtgataccggagttggcacgtcgagcgtatgaggaccttgcaccgacattcaaggaactgagaagcgcgggattgagctacgcggagatcgcccataagttgaacgaagcgggtcacacaacacggcgcggttacaagtggtgtgcaccaacggtccgcctggcgatgatgtacttggggataaagggataga

SEQ ID NO: 710 - DNA, 7959 bp, Artificial Sequence
  Synthetic Oligonucleotide
ctcccccaaccgcctgccttgctaactggcgaacgaacaattccagtatgacctcctttcagatcatcagatcagccaaacttcctggcgcaccaaagttcgcaaagcacgcaaagaaaatcaggggcgcagacactcttggctgcggacaaataaattcaatttccatccaccgatgacaccgaggacacagagaattcaaatcaatcttcaccgcaaagatcataaaaaccgcagatcagaactggcagagcagactcttgcctgcttaatttttaagcgtgttgcggatgttcggttcacccccacgcgcgtggggaaaatataaatgaggcaaattcaggattctataaattcggttcacccccacgcgcgtggggaaaattagttccgggcgggcttcgggcgcggcttgctcggttcaccccctcgcgcgtggggaaaatggcctgtgtccggacccgggcttggttctgttcggttcacccccacgcgcgtggggaaaatcagtggttaagcggcggcaccgcccaattgaccggttcacccccacgcgcgtggggaaaataaccaatgtatggcggcaggaatgcaaatgaacggttcacccccacgcgcgtggggaaaattcaggcctgcatgtgatgaactggccaattttcggttcacccccacgcgcgtggggaaaatcacccccgggctcttggtcggagacccccttgcggttcacccccacgcgcgtggggaaaattactcaagttcctccagcacgcccacgaatatcggttcacccccacgcgcgtggggaaaatgtggtagggaactgagtaaaattcagcgaccacggttcacccccacgcgcgtggggaaaatgacccggcccggaccatcccgtaatcgccgatcggttcacccccacgcgcgtggggaaaatgcgttgaaagagcgatccggaaacatagcggacggttcacccccacgcgcgtggggaaaatgaattccaccaattagatagatcatttatacccggttcacccccacgcgcgtggggaaaatcttggaggccatccccgccattcctcggttgcggttcacccccacgcgcgtggggaaaatgttatgagatcggcaagttgttgctgggcgtctggttcacccccacgcgcgtggggaaaataccaagctggcgtatttaagagtgaatacaaaccccgctaatagataagctctgttcccattccctacttttagtcaacccgatatgtcaaagaacctagacctttttatcctgcttgcacaatttctctgctttataaagcagtaatgcaatcccctcaaagtccacaaactgccttttggggtctccgtggacccggtatttatatccctgcgggttatgttcactccagatctggaccaccgctcccttccggcttttttggaccgccatcttccagagttcgtccctgacccgggcgttggggttgccaaggaacacgcccgacttcggctcgatcagccagcgtgacaattctcccttcaaactctccggggcattctccaagatcatcacgagcatccagcacctccgcaatgtccggcaggatgcgttccatcaatttgctttggtggaaaacatctctgcacttaagccttgccctccgttcggtttcctcgctcccctccgaggccacggtaaacgcgagcgggatggtgatttcagtcttatagaggtcggcgatgtcatagacgaagctgagcatttttccggtatggatgaagccgatggccggcgaatatcccgcggaaaggatggccgcgtgacagatgccatacagacaggaattggccgcggacagcgcccggttgaccggatcggcattatcccaatcgtcctggtcataacacctgccattccaggggatgccgacactgtccgaaataagcttgtaggtgttcctcacccgctggccctccaggccccggatctgttcaatggtaaagtcttcggaaagttcatactcaaaccttttcgcatacaaccgccggatcactttgagccggagagcatcatcgcaaaacattcgggcctggttcaaaaatctccgggaaaaatgcgtcccgccggtgctgtgcgcatacatccttacgccctgctccccggtccaacagaccagacagttgttttccgccaaggtctgcatggcgcgatgactgagagaagtcccgggcccgagcataagcagtcccaactggtcaatcgggaccggaatgtcgccatccttggtatgaaggaccaacccggagtcctctttgtccagcttgccatgctcaagatacaaatagctccaccggtcggaaaactttggcaatatatggagattcttcattttacctttgccacactcaacagcccgaagccaaaggccttggccggcccgatgccgtgaatcagtgtattttggaaatcgccgggtttagtaacttcaaggatgccttcaaacttggcagaaaacaggcggttgctcttttcgcgtttgccttctttgtcagcggcatggcctttgatataaatatagccagcctggaccgcctctaaatgctcaacctggaaaccgccatgctcggctttcctcgcgagccaatccggcagcttatcatttggaaccggaattcggctgccgatccatttttcatccaccggttttccgttggcatcaagggattttgcggtggctttcctcaccgggttagccaggaggcgaaatcgcaggggttgattcggatcaaattgcggattgaaagattttacctccggcattgcggcaaggaatggagaattttgaaaggcatagtcccaatcgggcttccttgctgattgcacgataattatgggtgatgaaccgggttgtgggtcaatgcgaaaaagaaaagcctgctgttcatttcgctcgccatgcacatgctggaagccttgcgggtcaaacgattttatgaacgatggatcttttcccttttgttccgaagacgggaacgccatgcaaagacgctggtgaacatggtagaggttcctaagccacaaccttccaggtcttggacggtcgggattatcgccaacatttattaaaagacaggagagatacattgctattccacctcctcggggctgagccgccgtcgtctcgtttccagcgaacggaattcaattatctcattccgcttcctgataatctgatcccgccattgcgagtcttccggattgatccgatccaatcccattcccatgccgtattcaatcatggtgacggcatcgtggcagagccggcaaagggaacgcaattcatcaaggcgttcgtctccaccggcgtgacgataggtgatatgctgaaccgtggtagcgggagatttgcagaaaacacaaagatgccggtcgccctcaattctttccttgcggatctttttgtattcggaattggtataatttgcccgtggccgtagcggtgaaggagtgcgactttgtgcgggtttctcggcgattttgacttcgccatccttgcccacgctcaattgcttgcggatgacaaacctgggaatatgtgaaggtggctcgaaagttagaggcacatcataccaaatcaaggcatcatcaggagcctctggttgttccgtcgtcggctgccagtcaagcaggcaatcaacgctttcgggaggtttatcattttcaaggcgctttctccagggtatgaatttgagagccgcgagcaaatcgggaaattcttccgcaggatattccaacagggggcgcgaaggcggacagcattttctccccaagtagagcgtccatttagggtttttaagcgccgcctcaagttcagcaataagttccggttctccttgcaaggacacaaggaagctggcatcacaaatatattcccgccgagtaagcattgcgccgggcttggtctttccctctctttccgcaatgcgcatgtccattcccgctccgatggtgtgatagtcccaccagcgcacgcccgacgagtcaactcgaacgcccatagaaagggcactgagttttggaatccatttctccgcggcatctggacgcgacacacccaatgccgcgcagagcatcccgatcacaccggacttggtaggggcatcagccgtccggcggatgacaaactttgattcctgatttccccatgcctgcaggggtccttccagcctaagaaatagggtattgtttctcatggggccacctgttggttcacgataaccttttgaacctccttccagtcataaccaattgatttgatcactgcggggattaaatcatccaatgacttcagattattttcagcgagagcgaactcctttttgtcttcaacaaccttcaactgaagacggagattgggcgagaaccagaaccgcttttgcggctttccgtatccattatccagatcgtggatgtattgggccagttgagcgatactctgcgagatcaggtcgcggtcgcccttgctgggcaccgggtcggcaaaggcattggcatagctgatcggggtgtctttgacttccaccagtattccatcgggcggattgtgagcggcgaagctattttgcttgcccgtgggattagccaatgccacgccacgaaggaatgccccgaccgtgtgggcggcaagttctttattccccttcagattcccgaccagggtttcccaatgaatagaaaaatatttgtaaaagcaggccgaggagaacatcgcctcgtccacatagcccgctcccgcatcatcgccgggaatgtcatccgcggcgacatagtagtccacttctggccgcgcctcatgcgtggagatggcatgggcaacttgtaaagaggcttccactgtggtgtcttcaagcactccggtttccagcatcctgccgctaagagccatgtcgggcacagcgatattttcgctgataagttttccaaactcctttgccaactcctcgtcggattttccagcgcttttttgcaaaaaagtggccattttttcaatcgcctcaaaggtggtatagaccagcattttgctcttatccgcacccgaggaaccggtttcttctgtttcttctttttttgacttcttggtttcgaatccgcaaagcttgagaattttttcggcgcgtttctttgcgtctttgtccgtcaccttttcagcaatcaatttcgccaattgccgggttcggactcctccgagcaattttttaaaatcatcgctcatacggatactcctcttgaggcactggctggagatgcgggagcgcagtaccccaccaaaaaaacaggtcttaggcgcacccaggtcgtcccggttcagatttgccgggctgtggttttgaatggcgtgaatttcaattaacatggctttcctcctttttagatttttaaaaattgttccgcccacttaaggcgggtggtttcgcgtttccagatggataggtcatccgtcagctttacccagtcaagtttcaaatttcttgaggcgatccgatcgagcgcccatcgcaatgccggttcgatctggtcaagcggtagaagaagcattctatcaaacttctgctggaatctttttctctccttttcctcgtttggctggcatttgcgcaattgcccggctaactcctcgccttctgttcgctctgcttgttttattggacaataagcaaatagctttgcaatcatccaagcaacttcgcgcctgggagcccgctggtttttctgacgcaacggccaccacaaacccgcgaacaggtcaaacccatccaccgactcatcaagcccttggcccgcatgggtgcgcaacaggcccaggtcgccctttttcagatcggtcaaaacttctatgaattgctcggtcgcagtcacttttcccctcccttcttccgtcccgtttttttctgtggttctattttacgccgcatatccggtaacaagttcccgatatgattccgtctttggaccgactcgctggtgaatcccggagagagcgagtgagccaaggcagccatcatggggcgatattcgcgggcggcctctacccatacagattcacccttggccaacaactcatccactttgccggagaccttgccttccacttccgggcgaatggaagcaataatagcggtcgtcccggtatcaggtcttgggattcgcttatccaataggttgccttcctgctgccattgcaaaatcatggatttagcggtatccagagatatctccgatgatggcactgcaataattcgttcccaaacatcaatgttctttgccttgtcggtagcaaagccgacgacaaacagagatattggcctgatgcccggaccaattttgccagcctccagcatgttgctgagcaaatatggccaaggccggtccatcctgaacttttttgccgcggaaaggtctgaggctctgctggattttcggggagtatcattcgaatagacaacatgaggatcattccaatgatcatttttcagttcgccagagctttgatactcacagctcaatatcagggatgtttccctcacgccgcagctaatgcaaactcctgatttctcaattggatcatgtaaccagacgcgccttgacaataaggtcaatcctgttagaatttgcacatcctcatccatagttgggcgaatgtccgcctgcacccatgcgggaactccaagttgcccatattgcacccagtttgcttgaagggtattcagcagcgatctgccccacggaataacatagataggcggtgtgccattgatcccggtcttaaggtcaggcaagctggtaacgctaaagatcggcagtctcagtaaacccattgcacagcaggcaaagcaaaggccatttatcttatctgttgaatgtctcaaatgccagaagttgttaccagaggggatttcctgcagcaggcttgttattgcccattctttctttgaagttttttgctgataaaatcttttttcttttcccagcaggttgaagcaatctttattttcatcgagtttcgtaaacccatccgcagggaatgatttgattttggttaattcttcatcacttggaggattccctttgcaccagtagagcaccgccagcaggaagcggatgatggccacgcggtccatgggattgcttgccgcgatttggcggattttgccagcatccatgagcgccttcttgattcccacgcgctcaactttgccattgttataaaggacgggaatccaattctcttccagcaggttatagctctgttcagctcccatttttcaggctccctcctgatcctttgcttatttcttgatcaatcatcatattagaacatttttatttatgatgtcaagcattttctttttatggtcaaaaatcgccatatcactattataccgattttaatgtcaaatccggttcctccttcgccaacagattgttcggacaggaaggggctatggaggacaggcatttcaaaattagggattcggaattgaggagcagaaaagcagcagccagtggctagtggcaagtgggtagttggcagtggatagtggtcagtagccgggggaatgcgaggaacgagaaatgaggaacgaggaacgggaaacggtgaacggtaaacggaagaaataaaatttttgcgacctctgcgtctccgcggtgaaaaaaatgttccgggttccgagttccgggttccgcgtttaaaagaaccagaaaaaaatctttgcgaactttgcgcctctacggtgagatctgaattgtatttcttcgcgttctttgcgctctgctatgtataaaactgtcaagtgtcctcagatctaacttttttgccgccttcctttttcgctctcgggcacaagggttatccacaaatccaccggcatatttttgagggccctcaaaggcccttc

SEQ ID NO: 711 - DNA, 7958 bp, Artificial Sequence
  Synthetic Oligonucleotide
tgccgtttgcgacagtgacccaaaaggtcaaagccgggcaaaacaagcatatccggatgtgcaggttacctccgacgcatctgaaatcttgcattcaccatccgttgatgcagtggccatcgtcactcccgtctggacgcatttcgagctggcaatggctgccctggaaaacggcaagcacgttttccttgaaaagccccttacttcgaatgcgatccaggctgagaggctgatcgaattggcagagaagagaaacctcaagattatggtggaccacacgttcctgtttaccggagcggtgaagaagatccgccaactgatcgatcaaggtgaactgggcaacatctactatttcgactccacgagggtccaactgggccttttccaacacgaccttgacgtgatttgggatctcgcgcctcatgatttgtccataatggaccacctcatccgaaaggaacccgaggctgtcgtcgcgaccggccaggctcacttgaacgtccatgccgacgtggcatttatcactgtgtatttcccgtccaacactattgctcacatcaacgttaactggttatctcccgtgaagatccgaaccacgctggtcgggggagagaaaaagatgctggtgtggaacgacttggaagccgtcgagaaaattaaggtctacgacaggggcgtgcaaatggccagcagggaaggagtctatgaattgcttgtcagctaccgctcgggagacatgtgggcgcccaagatcgagcagacagaagcactgaaggtcgaactggagtacttcttggagtgtatcgaaaccaaccaaacgccccttaacgacggtttggctggattgcgtgttgtcaaattgctggaagcggcaacagaatcactaaagctgagaggggcgtccgtttcggtatgaacatctaccacctcctcagcagtcacgattgtcttgccacaagcggggcactttagctcttcctcttcgcccacttcgatgatcgcgggaccgctcgtttgaatcgttgaggtaatacgagatcagaagaccggtgtccgcgtagaggatcatgcgggcttagtagctctcctcgtcccgcgccagcagaactaaattgggcagaattttgtcgccacaaattcgacgccgccgagcggcagcgtcgggccagcgaatcgggcgtccccgtctagccgccggccccacttccggcgccgtttccagttcgtgaacgccttcaaagaatttccggcgctcccgaggcggcaaggccttcacgtactccaatacttcattcgcgcccatcatcgaaaaatatcacgcacggggcgcgcagcgcaagttcggcgggctgccgcagggcgagcacagctctacgattcaccgtctcgccaaaacgcagagttgcactctgcgccagccagccttttttcttcgcggcacaaaggggcgctacagttctgctcccggacttgcctttcatccctcccaggtgtataccttcgtcatgtttatcctgtggtagccacctggcgggcggccgggtcgcgatcacccaacggccccaccacccgcctcttgccccgtgaaggaggaagcagtgaagtataacctgctcgaagaaaagtggattcccgttctatacaaggacgggatcagcacacgtgtgaatgtcattgaggcgtttacggaagccggccgcatccgcgaaatcgcggccagcaaccctatggaccgcttggccatcctgcgtttcctgctcgcgcttctctattggtgcaaggggaatcctccagacgaaaccgactcgatctcttcgtttccctcggattggttcaagaggctcgatgacaataaggactgtttcaacctgctgggcgatgggaggcgtttttaccaacagaagcctaagcgtcttgagaagaaactctcggccgactatctcatgcaggaggtgcccaccggcacaaacttctggcacttccggcatgggacagatttgagagacggcttatgtccggcgtgctgtgcaatgggcctgttgcgcctgccgctctttgctacctcggccgggcgcggcaagcccccgggcgtcaatcaaaaaccgccgacctacatcgtgccgatgggcgactcgctttccgaaaccctgcgtctctcgtggcggaaaagaccggagccgaacctgggcacgcccacatgggaaaagccggacataaccctccctcaacacggcaatgttcccctattaacgggattaacgtgggtgccgcgccgcgtgtggttggacgctcccgaggaaccccagtccaactgcatcgcctgcgggcgcagagaggctctgatccgtcgatgtgtctttgcgggtatcggcagcacaagaacagacgaagggagtccggcacgagtgtggaacgacccgcacaccatcagggaaggcgacgagattgtgaagcctttcagcgcgcttggcccggccgatgctgcggctgggaagtggacgaaagtcgtggctggaatcctgtgcggggaaaagccgaaggaaaaacaaaggttgtgggtcgtcagctttgcgacagtgcagaatgacaaatacctggaagcaaccgagtgggagattccgttcctgaccgcgcttgacgacatgaaggttcaggagagtatagaaagcatcggggcgtggcagagggaaggctggaagctccctggcaaaaccaaaccgcgagagatttcccaaacaaggggacaccttgaaattctctccgccgtcgccgcggttcgtccccaagccgaaagaacggtttccggaagaattgaccaattgatcgcccaaggcggcgacgcatggcaagaagccgcccaggagtatcgtccgctgatggccgcagtcgccaaatcgctttcacccggttacacaagcgcgtctctccgaagtcggcaagaaattgccgcagtaaagccggacatgcggccgaagaaaaaccacaaaaacgaagggagggacaagtgactgcaacggagcagtacgtcgaagttctgagtcggctgaaacccggtgagctcgggctcttgcgcaaccatgccggacaagggctcgacgaatcggtggagggctttgaccttttcgcaggactctggtggccactgcgggcgcaaacccagcgggcgcctcgccgtgaggtggcgtggcttgtcgccaaactctacgccttccggcccctcgagcattcacccggggagacgctcgctcgccaactcgcgcgctcccggcccggcgacaaaacagagcgaaagcgtttcgagcaacgcttcgataggatgctgacgctgccgcttgctgaaatcgaacccgccctacaatgggcaatcgacctcatcgctgccaagcaccccaaactcgactgggtacggctgacgaacgatctttccatctgggaacgcgaatccacccggctcaaatgggccacggaattcttgagctgttcaataggaggagaatcatgttgatccagattcacgccattcaaaatcacagcccggccaacctgaaccgggatgacctgggcgcgcccaagacttgcttttttggcggagtcttgcgctcccgtatttccagccagtgtctcaagcgcagcatccgcatgagtgaggagttcagccaattgcgcggcggagtgcgcacccgccagttagcgaaagagattgccgaaaaggtgacgggcaaagacgtcaggaagcgcgccgagaacattctcaaggcctgcggcctggagcctaaaaaggcaaaaaagcaggaaggagagggtgaacaagaaagtgccgagaggagcaagatgttggtttacaccacgcaaggggcgattgtacggatggccgaactcctccagaaggaagacggaaaaacggacgaggccttagcagcggagttcgggaagctgatcagtgaatccgtcgccgtgccggacatggccctgtgcggcaggatgcttgaaacgggagtactcgaaaacaccactgtcgaggcatcgcttcaggtggcccatgcgatttccacccatgaggcccgcccggaggtggactactatgtggccgctgatgatgtccccggcgaggacgcgggcgcagcttacgtggatgaagccatgtttggctcagcatgtttttacaagtatttctccattcattgggaaacgctggtcaggaacctcgagcccttcggcgcggatcacgaaaagttggcggcccataccgtcggcgagttcattcgcgcagcggcgttggtcaaccccacgggaaaacaaaacagttttgccgcgcacaatcctcctgacggaatgttggtggaagtcagaaacactccaatcagctacgccaacgccttcgccaaaccggcggctcctcagggcgaacgggacatcatctcgcagagcgtggcggagcttgcccattatgtgaacgacatggatacgggatacggcaagcccacgaagcggttctggttctctcccaatctccgctatccgttgacggctaccaccacggaaagcgaaaacggaaaacagaaacagcgtgaggtcccgcttgccgacaaagatgtcaagtctcttgacgaactgatagcggccgtactcaaccaaatcggccacgactggcaggaggtcgagaaagtggtcctgaatccggaggtgccccgtgagcccaaacacgctgttcattcggcttgaagggcctcttcaggcttggggcgatcagcaatcgaagtttgtcatccggcggacggctgaggccccgaccaaatcgggcgtaatcggcatgctgtgcgcggccttgggcgcctcccggtcagaggccgctgaggagtggcttccaaggctaagccggctgctcatgggcgtacgcatcgacgcgcccggagtccgctggtgggattatcacaccgtgggcgccggcatgccgatgcgcactgccgagggtggaagcaagcccggggccatgctcacccgccgcgagtacctttgcgatgcgtcgttcttggttgcactccagggtgaaccgggcctgatcgctgaaattgacgccgcggtcaagtcgccccgatggactctgtacctcggcagaaagtgctgcccgccctcgcgccctttgctggagcatccgccaggggaattttccgatttgctctccgccctcgaatcggtaccttggcgcaaacggctggagggagacccacagccccaaacgctggaatgtctgctcgactggcacccaaccgcagaccagccggacgctcccgatgattcgctcgtttggtacgacgtgcctcggagtctcgacccgccctcgcacgaagctcgattcgtcattcgcaagcaattacgcgtcggggctgaaggcggcgtgaccgttgcacctctgcccgcacagagcgccacgccggcgcctccccgcccaagggcggattacaccaataccgagtacaaaaaccggcgcaaagagcggctcgacgatgaccatcacttatgcgttttttgcaagtctcccgccaccaccgtgcagcacatcacctaccgtcgcgcgggtggcggcgagttgaaggacgatttgcgctccctctgccgcctctgccacgacgccgtgaccatgcttgaatacggcctgggcatgggactcgaccgcatcaatcccgaggacccgcaatggcgtgaccggattatcgacaagcgggacgagatcgtcaggttccgctcggaggaaacccgcaggcgattgctcgccgaggaggtggaataggatgtacatttcctgtctcctaatcaacgtcggtgacaaccccgaccgtccccgccccgggcggctctggctgcgcaacctttatcacgttcatcagcgcctctgcatggcctttccctcccatccccaaaaagatccccacttcctcgcgcccttcaagcccgcggactttgacgggaagcaagtccatgtggagcgcggtgcggattccggctttctctttcgcatcgacccgcaactgggcggccgggccatgattgtggtgcagtccgccaccaaacccgattgggactatgcctttcaaaatgcgggccatcttctggtgaattccttcgccgctccccctcaggtaaaagaactcgatccctgtttcagcgccggtcagcagcttcgctttcgaatccgcgtcaacctgagcaaaaagataaagaccagcacagcgggcatcgatcttaccaggccgcgagtggggacggatccccagggccgaccgaaggcccaaagcaaacgcgtggcgctcacctgggataaggaccaggacccgcaggacgccatacgggagtggttcgctaaaaaggcccagaacggcggcttcaagctgggagccttgcgcgctctgcacatcggctggggcgctggaaatgacccggactccacgcctgccgtccaggacagccgctcgggggacaggcgcatgaaattccgctccgccttgctcgaaggaacgctcacggttgaggaccctgctaaatttcgtgaagccgtcgttcacggcatcgggcccggcaaggccttcggtttcggcctgctttcagtagcccccgaagcccgctcagcgggcggcgacgtgtagcccacggcgcaagccagacccgtggtggtgacatgcgaactcaagatctgcatattctaccgaagttcagcgacggatggagttacctgtacgtcgagcgctgcaaggtggatcaggaagaccgggccattgccctgcacaatgaagcggggaagacgcccgtgccttgcgcaaatctggccttgctcatgctgggaccgggcgtctccatcactcacgccgccatttccgtgctggcggaccatgggtgcctagtggcgtggtgcggagaagagggggtccgcttctacgccacgggcatgggcgagacgcgcaacgccgccaattttctccatcaggcgcgcctgtgggcgcacgagggttttcgcatgcaggtggtgcgccgcctctatcagttgcgttttgccgagaagttcgaccccgccttgaccctgcaacagatacgtggcatggagggcgtacgggttcgagacgcctacgcgaaggccgccaaggaggccggcatcgcctgggaaggccgaaactatcagcgccaggagtggagccaggcggaccccgctaaccgggccttgtccgccgccaattcctgcctttacggtatctgccatgcggccgtcgtctcggctgggttttcccccgccctcgggtttatccatacgggcaagatgctctcctttgtgtacgatgtggccgacttgtacaaaactgaaatcaccgttccgatggcctttcgcgccgccgccgaagcgcaagatcaactcgagcggcgggtgcgcatcacctgccgcgacaggtttgtatccacacggcttttggaaaggatcatcccggatatccaatctgccctgatgctgtcaaaagcggcggcgcccgactctgaatttgaccttgatgccgccgcccccggctccctctgggacgatttgcagggcgccgtggaaggcggccacttgcacgccgtagaagaggaagaaacggagcccaaccatggtggttctgattcttgagcgcgtcccgccagcattgcgaggcgagctcactcggtggtttctcgaacctcaggcaggggtgtttgtgggacgcgtctccgctctggttcgcgatcggttatgggaaaaggcttgcgcccaagccaaaggaggcggatgcctgattctccactcaagcgataatgagcagggattccgtgtccgaacatggggcagaacagcgcgctgcatcgatgacttcgagggcctttttctcgtgcgtatgccgcagaatcaatagcttgggaagtgttgtccccacgcgcgtgggggtgaaccgtgggatgcg

SEQ ID NO: 712 - DNA, 7957 bp, Artificial Sequence
  Synthetic Oligonucleotide
gccgctgggacctcttcaagcttcaggtacagcaggagaaatatgcgccggtggcggggatgggcggggcgaccgagccgatggttgatgatgatgtctcgccggtctcaccggttaagaaggggcgtcagggccggcgcaggtaagctcccaagctaagacaaccgtgtcacagcaccatgctaaaatacaccgtgggtatcggaccacctcagctagcggtcacaaatagggccaggaggctaaagacgttgacctacaatctgcttgaaaaacagtggattcccgtcctctggacagatggcaatgtctcacgggtagggattagagaggcactaacacaagcaggttccattcgacagattgccgccagcaatccaatggaccgcgtggcgattttccggtttctgctggctctgctttactggtgccggggcgacccaccgactacgacagacactgcccccgaagaatccttcccaattgattggttttccaaactcgataccaatagagagtgtttcaatttgcttggcggtggtaagagattctatcaatacagggaacagggcgacagactactcacggttaactacctcattcacgagataccatcaggcactaactttaaccattttcggcactcgatagacggaactaaaggcttgtgtccggcatgttgtgctttgggactgctgcggctaccgatgttcgcgacacaggggggacagggcaagtcgcccggcatcaacgcaaagccgccaatctatgctattcccgtgggcgagacccttgcggagaccttgcggctttcgtggcggcaggtgtccaatttgggaacgccagcgtgggaaaagccggacttgccacttcccggggtgggagaggtaccgctactaactgggctgacgtggctcccacgccgagtttggttagacgagccgcagaaatctttgacacactgcatttcgtgtggccgtctggataatgtgatactgtccagcgtctttgctggcaaagggagtgccaagacagatgatggcactaagcgcgtctggcgtgacccgcacgttatctacaaaccagccaagaacggagaaacttcactgcattgggcagacgtaataggaagcgctgacgccggtgccgggcagtggtccaaaataatggctgggttactccagaatccccaaacggagcggaccagagcgtggatagttggcttttcgtcagaccagaataaatacttcgaggcatcggaattgtttctcccctggccaggctcattcgtttctatcgatgagctaagccaatggcaacagtcaaacaataatctaagccgaaagctgatgcagcttgacgaaaaacgatctcgaaaccatattgatatagcctcggtgctcgccgctattcgtccccacgttgaaagcagggtctttgcgaaagccgaagagttgctgtctggtgacaacacggcgtgggagcgcgcggccagcgaataccgacccatgatgcaaatcatttctaggtcattagcgcccggtgtaaccacggtagcagtcaaacgacgccgagaaatcggcaatgcactccctcaaacgggatcgacgtcgacgccagcaaagaaacccagcaaggggaaggcgaggaagtaaatgggtccaacagcgactgaggaatacattgagatcctgacgcagttgaagtccggtgacctcggcctgttgcgaatacatgccgggcagggtctggatgagtccgtccagggctttgacctgttcgccggtctatggtggccgttacagaacaagggcccgtttgcaccgcggcgggaagtagcctggctgattgccaagctttatgccttttcgcccatcccacattctaccggtgacacgctggcttgccaattgcgtcgttgtcaaccagacgacgagaacagccgaaggcgatttcaacagaaattcgatgaaatgttgcttatgccgttggctagtattgagccagccctgcgatgggcgctggcccaggtagccgatactggcaaaccgcttgattgggtaagactgacgaatgacctgtcaatatgggaacgtgaagcaacccgcctgaagtgggcggaggaatttcttggtaactaaggaggataatagcaatgctgattgaagtccacatgattcagaaccacagtccggccaatctgaaccgggatgacctgggtgcgcccaagacctgctacttcggcggtgtgctccgttcgcgcatctccagccagtgcctcaagcgcagcatccgcatgagcgatgagttcaaagcattactcaatggcgtccgcacacggcagttggcgaaattgatcgccaggggtactaaaggagacccgtttgatgaaaaagtacaagccgaccccaaagtcgtagagaaggccgagaagatcctttccgattgtggtttcaagccaaagaaggacgcggacaggagcaagatgctggtctacaccacgcgtgacgccataaaggagatgtccgcacttttagggaacggcggcgagaaaaacgacgccgtacttgcaaaggatttttccaggctaatcgccgaacgcgtctttgcaccggatatggcactgtcagggagaatgctggaaccttcggaggccagcgacttgtggaaagaccttgatactactgtagaggcggctttgcaggttgcacatgccttctccacgcacgaggcccgtcccgaagtagactattacgtcgccgcagatgacatccccggtactgatgcgggcgcaggctacgttgacgaagccatgtttacctccgcctgtttttacaagtacttttccatccactgggaacagttgctcaagaatctgggcggcgagatcaacctggcggcccacaccgtcggggcattccttcgcggggcggcggtggtcaccccaaccggcaagcagaacagcttcgcagcacacaattacccggatggcatactggttgagattcgcaatacgcctgttaactatgccaatgcttttgctcgaccggttgttcgagatgggcgggacattatctcccagagcatcgcccagctgggccagtacgtccatgatctggacaccggttttggcccgccacaacagcgcttctggttttctcctaacctgcggtatcccttgactgccagaacaaaggtaaaggaaggagaaagggaggtcgaaaaggacatcgacctgacagggaacaaagtcaagtctctggacgaattgataccggcggtggtcagcgccatcggctgtaactgggaagaagccaagaaagctatcataaatctatcggtgtcagcatgatggccaataccctgtttttacggttcgagggtccacttcaggcgtggggcaaccacgagtccaaatttgttgtccggcgcaccgctgaagctccaactaaatcaggggttatcggactgctctgcgcggcgctcggcataccacggtcagccgccgctgaaacatggcttccgaagctgtctgccctgaaaatgggtgtccgtatcgacagcccgggcgttcgctggtgggactatcacactgtcggcgccaggattggcatgcggaaagctgacggtggcttcaagaagcctgaatcaggaaaggagactttactcacccgccgtgaatacttgtgtgacgccagttttctcgttgcgctacagggcgatgccacactggttacggaactaggaacggcgataacgaacccaaaatggacactttacctcggccgcaaatgctgtcccccgtcacgcccgctgctggaacaccccgccggtgatttccctgacttactttcggcgctccaatcagtcccatggcgaaagcggctgaaggacgacccaccgcaagaaaccgttgattgcctgcttgactggcttccgacgccgcaacagcctgtagcaccaactgatgcgctcgtgtggtacgatgtcccgctcacgttagacccgccttcccattctccccgctttgttattcgacgaaaactacgggttggtaccgaggttagtatcgcagaaaagccggcgcaaagcgagactcccagacccctccgacttcgtgctgactatcagaacactgaatataagaaggctcgcgccacgcgtttaagagcagactatggcctttgtgttttctgcaaggcacccgccaccaccgtccagcacatcacctaccgccgcgctggcggcggggaaactcacgatgacctgcgctcgctgtgccgcctctgtcacgacgcggtcactatgattgaatacggtctggacatgggcttagatcgcattaaccccgaagaccccaaatggcgggatgaaatcattcagaaacggggtgaaatcatctgttttcgctcgttggagacccgccgccgtcgcctcagtccggaggaggtggaatagccatgtatctttcgtgccttcttgtcaatacgggggacaaccccgaccgccctcatcccggacgactgtggttacggaacgtgtaccgtgtacatcagcgcctttgcatgggcttcccctcggcggaatctaaggaacatgacccgcttttcttaaaaccatataagcccggccgctttccggaagaccgttacctgtctgacagaaagaagctggaggtgcctgacgatgtcctcaggcaaattcactcaccgcgagataaccgcagtggctttctcttccgcatagacccgctgccctcaggccgcgccatgataatcgtacaatcagcggtcaaaccggactgggactatgcctttcgtaatgctatgcacttgcttgccgcaacgcctgcaattaagccatatgacccgcattttcagaacggacagtgtctcgtttttcggctgttggctaaccctacccgcaagagggacagggaaaaccggcccgcaggcaggaataactggggcaggagagtcccagtacctcgtaatgaaattgaagcgtggctcaccagccgtgccggccggtatggatttagcgtggagtgcttcgataacgtgcaaacagggtatgttgtagcttccaaaggcaaggagatagatggtagcagtgagattgccgacgatgaagaagcaaaagggaggttgaggcactttttctatgcgcgttacgaaggcaaactccgtgtaaccgccgctgattctctccgcagtgcaattatacagggtatcggccccgccaagggcttcggcttcggattgctgtccgtagcccggtcaagggagtgagttgtgcgcaccctttatgagcttccgcattttaaggaccgctggagctatctttatctggaaatgggccgtctcgacgtcagtgacaatgggttgagtttccatcagggtgattcggtaacgccggtgccgatcgaccagctaagcgtggtgatgctcggtccggggtcaaccattacgcacgctgccgtgaaatcgctctcccagaataactgcttactcgcctggactggacaggacggcattcgtttttattcggcgggtatcggtggtacatatagctcccggagacttatttggcaggcgcggttggccagtgatgaatcaaagaggctggaagtcgcctggcgcatgtataattttcgtttcaagaagcccgtaccaaccatcgtcagccttgaggagatccgcggtatggagggaatccgggttaggcgggcctatgccgaggcttcagccaagtacggcgttgagtggaaaggacggcgctatgaccagaaagactgggccaaaggtgacccggtaaatcgggcgctttcggcggccaatgcctgcctttacgccgtctgccatgccgcgatactgtctgcaggctactccccggggctgggctttattcataccggcaggatgctgagcttcgtctatgacatcggggacctgtacaagactgagacaacgattccgattgctttcaaggttgccgcacgggccccgcaggacattgaaagggcggtacgtacggagtgccgccaggcgttttacgacttcaaactaatggaacgaatcttacctgatattgcggaggtgctcggtgttagtgatgatactggagaaagtgccgacgagcttgaggggcgcattgtcacggtggcttctggaaccgaggacgggagttttcctgggcaatccgagtgcgagagtcagggacgagctctgggcacggtcgctcaaaaataccagggaaagcgggacgatattgcaggtctggacggacaagaatccgcagggattttcctatcgtcaggcaggcaaccactggcggcaattggtcgacttcgaaggattagccctggtaagtataaggtcgcgcgacgccgggccggaggaggcaatgcattccgataaccgaccttagtgagcgtgagtcagcgaacacaggcacatgggcgttgacactggaatgcctcaaccacctttgaggtagttagggcttggctttgaacttctagggtcttccccacgcatgtgggggtgaaccgctaccacatccttaaaaatactagcacgccctgtcttccccacgcatgtgggggtgaaccgtacgagaggcggcgcaagaaggatcagctcaagtcttccccacgcatgtgggggtgaaccggatttgctggtcgatgggtataggcctgaggaagtcttccccacgcatgtgggggtgaaccggtggcgcagtggatagccgaccgggtgctggcgtcttccccacgcatgtgggggtgaaccgacatgtttgccgtgggtcgattggcgggtgacgtcttccccacgcatgtgggggtgaaccgcgcactcgcgatgggtcaccaccaatattcgcgtcttccccacgcatgtgggggtgaaccagtatcggatcccatatatttcggggaccaaccgtcttccccacgcatgtgggggtgaaccggtgtgtggtcgctggaggcgcagcggaatggagtcttccccacgcatgtgggggtgaaccgcgcactcgcgatgggtcaccaccaatattcgcgtcttccccacgcatgtgggggtgaaccgacacgcggcacgagcgatattgatgagatatcgtcttccccacgcatgtgggggtgaaccggcgacgacgccaatcaccacagtgaccagtccgtcttccccacgcatgtgggggtgaaccgtaaacgcttacttacattggtcgaaagtaaacgtcttccccacgcatgtgggggtgaaccgacacgcggcacgagcgatattgatgagatatcgtcttccccacgcatgtgggggtgaaccgcgttacttcccgcataagcgggtgctgcgggagtcttccccacgcatgtgggggtgaaccgggtaaggtgcgctcagcaactgtaattgacggcgtcttccccacgcatgtgggggtgaaccgtaccgtctcggtggaggcggcgggctgctcggtcttccccacgcatgtgggggtgaaccgatgttgatccggatgtcgtttccggatttaccgtcttccccacgcatgtgggggtgaaccggctaggccgactatatgccagctcagccagtcgtcttccccacgcatgtgggggtgaaccgttcactgggtccacaaagttcactgggtccatgtcttccccacgcatgtgggggtgaaccgccagttttcaagcgtgttaggtctgctaaaacgtcttccccacgcatgtgggggtgaaccgaccagctcaatcccttcgactacgtgcaggctgtcttccccacgcatgtgggggtgaaccgttcactgggtccacaaagttcactgggtccacgtcttccccacgcatgtgggggtgaaccgccagttttcaagcgtgttaggtctgctaaaacgtcttccccacgcatgtgggggtgaaccg

SEQ ID NO: 713 - DNA, 7930 bp, Artificial Sequence
  Synthetic Oligonucleotide
agataatgacgcgttttcgctaggaattaaggtcggatgtagccacgttcgaggatgactgcgttccgctccaaggcgcggacgagatcgtttgtcgtctacagaccgctgctgctgctgcgcttccgggggggtcgaagtgatcgcgtgccacgagccgaggtcacactacaccttcagcgatcgcgcaggtggggccgtgcgcatcatccgtctaccttggggctcgatggtcacttggtacagccctcaaggcctgcgccgtgcctacgacatcctgagccgcatggagattccgactgactggctctgtcgcgatctggccgcacagaggaatttcgccatgctcgtgccgccggttgcgagcaatgatggcgggaccacgtacatcgggaatgagcatcgaggagtcgagaggcggttcatcgcctgagaatccagtctcgaaaacgcacgcgactttttctcgcatttaacaacttgacgggttgtgcatagggagctagtgctgctgttcgcaggtcgtgagactcttgtaacccagtgctgaatgcagatgctggcgattgtagaaaacttcgatgtggtcgaacaggtgacctgccttgactcatttcgtccgccatcagttgaacaatcgtcaagttatcagcctgaatcacagcgatggttgagtgctggaatacggggattatgcaattttctgttgtatgacgcagccatttgatatagcagatgccaattcatgaattgagcgtcttcctaatcattgctattgtggtgggctatacgaacccatcatagaccagtatgcctcggcaaaaagtacgttaaactgttcacactgctaggcaggattcaagttttggacagggtgtagatcaagtgacacctggaccatggcgaggccgtcgccccgatgcgcatcgtcggcacccttcacggcgagtctaagctgggccgtgcaaccctagaggcagcacccgattgggatatggacagtctgatgtgggcacgtttgatgtaactgggagggctaggcgatgagctttaatctgatcgaagagcaatggatcccaatcctccgaaccaacggcgcgccggatcgcgtgggtatcaggaacgccctgatcaatgcgggcgatatccgtctgactgccgcgtcgaacccgatggacaacatcacactattgaggttcatgctggccgtattaatgtggtgcaagccgagcatgagcgatgaggaccgcaaggtactcaatggcggaacgggcatcccggaggagtggataactaatcttggcacgcctgcgaaacctgcggaggcgttcaatctgcttggggatcaggaacgtttttttcaagaccgccaactactcgaagttctgttgaaagagaggcagaggcaatgggacgcgcgcgaacggaagaaggcaactaaaggtaagagccagcgaccaacttcgctgattgatgaagattaccgccccatcggtgatctactagtcgaattcccaactgaaaccaagagcgtccattttcgccatgtgcgagacaaagagtacggattttgcccggcctgctgtgctctcggcatcatccgcttttgtggttgggccaatgcttatggcggcggccgatacacatctgcaatcaatggacctacaccagcctatgcggttccgtacggcaccacgcttcttcaatcacttgcaatgaattggccatcaggcacaactgaggcgactaagccgccttggctgaccaacaacgcaccatcaaaggacaatctcaattcgcttcatgcctttgcgtggagatcgcgtcaaatttggctaggcgatcaacagcctaccatggagccctgtagctattgcggggatgtcgcaagattgatctatcaacacgtgttcactggcaactggaagccgccgttcgcaactgttggcacgcaaaaaaaattctgggacaaggattcgcatttgatccttgaggcgaagtcgacgaacagcgacaacgaggatgacagcggtagtcttgacgaagatggcataaatccagattcttcttcaattgactccagtgcctcacaaaaacgaaaaagtacaaagccaacgcagcaaacaacgctcgggtttccttctccgggatcaagcgccacggctcataaccgattctggcgccgagcctggcgagccatactcgctggagatgacaatcgagcgggacacacaaccatggtcgtcggcccggcagcgaacaaagggctttatcaggatgccaccgtgttgaatttgccggctgttcctacgaatgccagtcaagaagttcgggaaacaatcaattcgctttttagtaccacagagcaactcatgagtgtgctcagaagaagcacactgaaccctgaccgacaacaccccaacagaaaagcatgtctggatgcacggtcacctgacttggaagcatatttccgcatgcaagtcgaacagtggcttgccatcatggcaaccccggatgcagatgcttcgctgaacagttactcagagcagttggcaagcaaactttattgcatcatcaatgacgttgttcgctccacaacggtcggttcaccacttcgccgacgtgaggcgatgcaacgcgcggcaaaggctctcagtgaaacattacgtaagtatgggtcgcactcaaacaagctgccgccatcaggcggctctacgcccaagcaccaagatcccaatgcgaaggagagccatacatgagccagtccgagtccttcatcaagcgtcttgaggcgttgcaggagggcgagcgcgcctgtctgcgccggctcgcaggcatgccgctggacaccacggttgctggatttgacctgttcaccggcctgtggtggccactgagacagaaaagtcctgtcgccccgcgtcgcgagacgagttggttgatcgccaagctctatggggcttttccaattccgaacactccgtttgaagacgggaagaatcgacaattgctagcgcgggtgcttcgtcgctgtgagccgcatgatgatcacaatggcccgcgtttccgcagtcgcttcgatgccctgttgtgttcgccattgccgtccatcgagccgcatctgcgctgggcattgggcgaaatctccaaagcgatcgccgggcgagtgcagtgggccaagggcgtcactagcattaattgggcacaactactcgatgatctgtcaatctgggaccggggcgaggaccatcgccggggccgtgacattcgcgatatctgggcggaagactatctgaacgacacacaccaactgcaaggagccagcaatgctgattgagatacacataatccagaaccatagcccgtcgaaccttaaccgcgacgacctaggagcacccaagacgtgtctattcggtggtgtcacccgggcccgcatctccagccagtgcctcaagcgaagtatccggcgtagcgacgactttcagcaagcggtggcaaagcacggagccatccgcacccgcggtctcatcagcgagatcgctcgccgagcacaaggcaatggcgaaccgcaggatgcgctgctcaatcgaatccgcaagattttcgaagatggaggcgttggcgtcaacgagtccggcggggacgcgaccgctaccgacattctattctttgttcccgattcggcgatccaacagatggccgaggcggctaatgcgaacgaacccaacatggcggatgtatttgccaaaatcctcaacgaagccgcgcacgtccctgacattgccctctcgggccgtatgaccgagttcaaagcgaagggtcatttcgcaaaccttaacttcaccgtcgaagcggctctgtccgccgcccatgccatctcaacgcacgaagtgatcaacgaggtcgattacttcacagcagttgatgaccttgccaccggaaccggcgcggggcacgtaaacgaggccatgtttgcgtcggcctgcttctacaaacatttttgcatcgactgggaccaactcgtcaccaatctcggcggagatgtcgagcttgcgacaaccacagttcggcagttcctcaatgctgcggccctggccacgccatcgggcaagcagaagagtttcgcggcattcaatcctcctgagggcgtgctcgtggaaatcaagacggagcggtgcgtaccggtgagctatgccaacgcttttgcagacccggtgctgccaaagtccccacgtggcatgatcggcgaaagcatcgctcgtctcggccagcacgtccacgagatcgccgaaggctacggcattatggcgacgcgctattggttctcacctggaaaccggtatccgctcacttggttagatcgcgacgaagccagtgtggcaaagcaggaaaagccagtggttggcggtgctgagagtttcagttcgtttgaaacactcgtaacgaaggtgatgaacaccgtaaatatggacaacgctgccaccgccggagccgcattatgattcaccataccgtgttcctacgcctcgaaggcccccttcaggcttggggcgacacttcgaagtttgtcgtccgtcgaagcatggacgcgcctacgaaatccggtgtactgggtttgatctgttgcgcgatgggattgtcgcggcaggcggcacgggatcgattggtggatttgaacggccttacgatgggcgtgcgtatcgaccgggcaggaacgcgctggtgggactaccacaccgttggggctggcattgggctgattacagcagcgggcaaactaaagatgggggcacagggcactctcgtcacccgccgcgaatacctcgccgatgcaagtttcctagtcgcgctcagcggcgacgccgcgattatcaacgaagtcgctctcgcactttcatcacccatgtggccaatctacctcggccgtaagtcctgctcacccgccgtaccaatattggcacggccgcgtgagggtgagtcttggacgaaccccgggatccacagcaacctgacagctgcgcttgaggcagtgccgtggccacctcgctatgacaccgatgccccatacgatgcgagacacaacaggatcaagacgattgatctgccatgcttgatcgaatggtgcgcgacggagttgcaaaccatcgcgccagccgccgccgaggtctggtacgacgctcccgttgccttcaccccgcaggtccatcagccacggctcgttgtccgtaaatcggtcgaggtcatggtcggcaaagcacttcagcagcatgcttcagcaccgcctcgcccccgtgctaactacactaattctgaatggaccagcgaacggctcgtggatgttgtgaatgaacgaaccggcgaagtgacgcgggaaccctatggcgcaagaccccggcgactacatcgcgatcacggcctttgtgtcttctgcaagtcccccgccaataccgtgcaacacgtcacctaccgccgcgccggtggcgatgagacgcaggaagacctccgctcgctttgccggttgtgccacgatgcggtgacaatgatcgagtacggactgggcatgggcttggaccggatcaaccccgaggattctcagtaccgcgagcggatcatcgccaagcgaacggagatcatccagtttcgctcactagaaaaccgccgtcgtcagctacaagctgaggagatcgaataacgatgtacatgtccaccttgctcattgatgtggggatcaatcccgatcgggttcgcccgggtcggcaatggctgcgcaatatgtaccgtgtacatcaacgtctctgtatggcgttcccattccctgatacgaaggcgaacgatcctgaatttctaaagccctatcggccagacgcattccacaatccccagccagaccgaggtttcacaagtagcgtagtgaatgcaggagagcctaatgctttgagcaacagacctgtgcatgagccgcgcgatgactcgcacaacttcctattccgtgttgaccctctgcccggtggacgtgttgtgatccttgtgaaatcagccatccaacctgattgggactacgctttccacaacgcccaacatttgctcgctgccccgccttcaatcacagggcatgttcggttgtcgtttggaatggatgcgatattacggttccaactggtcgccaatccaacacgcaagatcgataccaagagcgacgccgacggacgacgccgcaatggcaagcgtgttcctgtgccgccgaccgatgaagcgctgcagacctggctgcaacaacgggcagatgccaacggttttcggcttggcaatttgtcactgatccagcccgggtatgtgtatgtcaataagtccagtacggcgggcaagggacatcgtcttcgcagtgtgagattcgcgggcatcctcgaaatcaacgacccgcaacggtttagcaaagcgttgattgccggcatcggccccgccaaagctttcggcttcggtctgatttcagtcgcactgacgggcaacggaacattgtgatgccctcaaatgtcacaccttgcaatagccgatctttgacaagtgaatatcaacttcggtttattactcatggccctagcgaccgaagaatgaaccatccggggtgtagacatgaaaaccagcctttttgaaatcggacgtttcgatgatcgcctttccttcctctacatcgatcgcgccatcatcaagcactctggcaatggcatcgcgatccatgaactggacggcgtgactgaagtgcctgtagcgtcgctctcactgctgatgcttggccccggcgtcagtatcacccatgaagccatcaaggcgctggcggacaacaactgcctgcttgtgtggtccggcgaattcggggttcggttttacgcctgcggcatgggcggtgcgcggcacagtcggaatcttttacggcaggcaaagctcgcactggatgaacgtacccgcctacaagtagtcgtccgaatgtactgcgctcgctttaccgatgagacgatcgatcccggcctgaccttgcagcagcttcgcggcaaggaaggcatccgcatgagacagacttacgcggatgcttcgaaggcgaccggcgtgccgtggctgggccgcaaatatgcccgcaaggactggttcgccggagatccagtgaaccgtgcactatccgccgccaatgcatgtctatacggcttggttcacgctgcgattctttccgctggctattcacccgccatcggctttattcacaccggcaaacaactctcgttcgtctatgacatagcggacctttacaaggcagagctgacgatcccactggcatttgagatcgctggaagacagccaaaggaactggaaagggatgttcgcaccgaggcgagacgtcgatttcatcagatgcacctgatgaagcggatcattcctgatatgcgaaagcttctgaatgttgaagcagaagagatggatgagtttgcaggagacgaggcgcgtcctgctgaattatggcagccaaagtcgttctccttggataccccgatcgggcagatattaacgcagcgcccagaaggagaggatgtcgcatgatggtgctgattgtccgaaatgtgcgccccgggctacgaggtcggttgactcgctggctcattcaaccgcagacaggtgtttacgtgggacacctgtcgggtcgtgtgcgggaagaactatggaagactgtctgtgatgaggttgatgagaatcgtggctccgcgatcctcatcaacccggcagccaatgagcagggctatacgatcctcactcgaggcgattccgatcgtagttttgtagacttggacgggcttatcctgccgaaaaccatgatttcggagtcgtaagccagtgatgtccccacgcatgtgggggtgaaccgtgataacagtgcgcggacatc

SEQ ID NO: 714 - DNA, 7886 bp, Artificial Sequence
  Synthetic Oligonucleotide
tcggctcgccgcttgtagttgagctaccggttcacccccacgcaggtggggaacacggacacggcatttccatgatgggcaagaataccggttcacccccacgcaggtggggaacactggcgtggacgctatgtccatgcgcttcagaccggttcacccccacgcaggtggggaacacttgcctttcttatattccacccagtctccgaccggttcacccccacgcaggtggggaacacatcctggaacagccagccccgaaacaagcggacggttcacccccacgcaggtggggaacactcgacaatggattttgttttccattcggttgtcggttcacccccacgcaggtggggaacacgctggacgcgcttcgtccacgttgaccgcgcccggttcacccccacgcaggtggggaacacattatcacagtatagccgctcacctctgcgatcggttcacccccacgcaggtggggaacacacttcgaaagtagacgctttgaggccattgaacaggcttcaagtatggatcacggatgcttggtcatcaatttcaatccttcccattctgtcactatcctttccgcggcaccccaaaactcaattccaaagccttgttcgcaatgcttgctgtaaatcatgatacaagttccaccggcacaaccagacctggccttgtcccacagcttttcccttatcatggccgatacctgaccgacaaatactccagccttgatttcgaggagccagcgtgtaatttctcctctcaggccagagggaactttttcaagcaccagaaccatcatcatggcctccaggatcatccagaccccatgacaagccgccggggctcactttatcatctgggttccaaagcccgcctggcacggctggatcgacatcagcaaggtctggctcatcgtccgaagtttccagaataccgaaaagggcgtgaatgtcggccactatcttctttagcagaccaaattgatagaactggtcacggcaggcaatgcgtgtccttctgtccaggttatcgacccctgcggctgtggctatgaaagccgcgggcacggaggtttccattttataaagatcggcaatgtcataaacaaatgacagttgtttgccagtatgaacgaaacccagggcaggtgaatagccagcggccactatcgcggcgtggcagatgccatagagacaggaattggcaacggacagggctctgttgatggggtcggttttattccagttgctcctgtcgtaattcctcgcactcatgggcacatcgaattcttttgaaagtctgaaataggtatcccgtactctcgctccctcttttccccttatctgttcaagagagagggttgggtccagtttttccttgaacctcaattcatacattctgcgaactatccgcagatgcgtatctcgatttgaccaggcggcagcctgacgcataaggttggcggaactacgggtggtccctgtcccggatgagtaaaagcggactccctgttcccccacccaagccaccaaacagccgcattctgctaaaacaaggatggccgcatgggtgatggatacgcctggccccagcatcagcagggccagtccagcgcagggaacaggagtggagcccatggcatcgtgaaaggcgattgcctgttgttctttgtctattttggcatgctccacatagagataggtgaagcggtcccgcatttttggcattaggtgaaggtctctgttacgcatcacttgccggaaccacggaaaggaggccgaagcccattcctttggcgctgccgatacctttttccaaggcttcccggaacagaaaggcatcatccactgtcagataaccttccagcagggcggaacggtatctcaggggacggtattcgttctcacgccggggcgaatttccccggggctccggtttggaaccgtatacccagcccaggcttaccagttcggtctccccgggcgtgaagcccagtctgccagccttggcggcaaaccattgcgccaccgcatcctttgggttggaatttgtgtcccaggtaagggcgacccgtttgtgcagaacccttcccgttttttcctttcctccgggtccttcccgcaactcgtcgattttgcgtttgacactggcattcacgaggatgcggaagcgcagccgctgacctgctgagaactggggatcgtattccttaacctggggaggggctgccaaaaatcccgtggcattctggaaagcccagtcccaatccggcggcagggacgactgcaccaaaaccatcgccctttgattttctccatcggtgttgttgtccacccgaaagaggaactggcgcttttcaaaatctgcggggtcaaagggctgcagaaacctcgggtctccttccttgcgcttgcgcatggggaaagccatgctgagccgccggtggacattatagatattgttcagccacaagcgcccgggccttggccggtcagggttgccgcctgtgtcgatgagcagttgggatagatacatcatccgttctcctccttcggatcgagtttgcgcctgcgctgctccagcgagcggaatttgattatttcctcgcgtttggccaagatgcgctcacgccaggcggggtcacagggatctatgcggtccatggtcatgccgctgccatattccagcatggtgcaggcatcgtggcagaggcggcagagggcgcgcaagtcctccggcttctcgctgcctccggcgcgtcggtaattcacgtgctgcacagtagtggcgggtgccttgcagaacatgcaggcggcattgtccatcaccaaacgctcagcgcggacccttttgtattcaggattgtcgtaatttgcccggttgcggggcggttgccaggctttgccggaaagcacggtctctgcctcgaagttgcggtccaatggcaggttacagcggatcaccagccggggcaagtggtggggaggctcaaaggacaccggcacgtcgtaatgcgcttcggcgttcggcggagcgtgcacgtcatcatgggccggaacccagtcgagcacacagggaacactgtcaggtatcggttcgcctttttccctcagttgcgccgggatcgaccgcaaagcctctttcagactggcataaaaccctggcgggtgttcatccaccggacgggaggggggacaggattttcgccccagataaagcgtccagactggttttttcagcgcttcagccagttgtgccacgatatccggttcaccctggagcgcaaccaggaagctggcatcagccaaatactcgcgtcgggagagcaaagccccgggtttggatttgatcttgtccgcgcccaggtttttggccagggcagtgccaaccagaactaggccgttgggcattttcaggtcagaaatgcgcagcttctgctccgctcccacagtatggtaatcccaccagcggatgcccgggcggtctatccgcacccccatgcgcaatttggcaatttcacccagccaatactgtccggcttcggcccggctgattcccagggcagcgcagagcaggcctgccactccggatttggtgggcgcgtcggctgtcctgcgcacggcgaatttggcctcattgcttccccaggcctgaaggggagcctccaatctcaggaacagggtattaggcggagaagacatttcaactctctactttctcgttttttacatcatcccattcaaaacccaacatctcaactgcttcgcgaacaagttctagcaggttgcaaactggctttatgtccagcgtgccctgttgaggctttaggggataacgtccattgggcgagaaccacagagcgttgcctttcatctgtccagggaagaaaccggcacttatatccttcacatagttggccagttggccaatgctttgttctaccaagtcagaatccttaacgattcccaccggtcgcacaaaggcatttgcatagctgacaggtgtctcttttatttctaccaatattccatcgggaaggttatgtgcggcaaagctgttctgctttccgctgggattagtgagtgcagcggcctggataaaggctccgacagtatgagctgccaacttttcattaccctggaggttgattatcaaggtattccaatcaattgagtaatatttgtagaaacaggccgaagcaaacatcgcctcgtctatgaatccagcacctgtgtcgtcgccaggctcgtcatcagctgctacatagtaatctatttctgggcgggcgatgtgggttgaaatggcgtgcgacacctgcagggctgcttcaacagtggtattttcccacttgaccttgtctgtgttcttgtccttggtatcgggctcgagcattcttccgcacagagcgatgtcaggggaatgtattgcccccgatattacatctgccgctttcttggctttctctgcaacactcaggccttcgctggtgacaatttgagcaagggcatcgatcttgttccgggtcatgaacaccagcatcttactatgtccgttttcgtgtttcaaaccggctttgttcagaacttcctctgcctgattcctgcagtcctgtcctgtagcttttgtaatcaactcggccaaccgacgggtacggatacccccgagcaagtttttgaattcatcgctcatcctgatgctccgctttaggcactggctggagatgcgggaccgcaacaccccaccgaaataacaggtcttgggcgcgcccaggtcgtcccggttcaggttggccgggctgtggttttggatcatgtgtatttcaatcaacatttgattcctccttgctgattattaaatgctgaaataaatgtgtctgaccatatcgctctgtttgattcccgttcccaagcggagaggtcatcgatgagggcaacccagtccagactggcaatgtcatgtctttttaaaatcgcgagcacttgcgccagcggttcctccagttggttcaactcgagcgtgagcaagcggtcgaacctggctaaaacacgtgggaactctttttcttctttaagtccacggcatattctgcccatgagccaaggcaggctggcgcctttcttttgctcaaagcggaattccgcgaaaagcttggtgactagccagaccaccttccgcctgggggttttggggcttatactgcggagtggccaccacaggccggaaaacaggtcgaaacccggcagggattcatccagacggcgacccctgagctttctgagcaagcccaggtcgccctctttgagttcgcccaggctccgaacaaatttcacggtgctctcattcattatcgcctccggatgaaggttttttaattgattttggttttaggggccagggcttgcgccgagccagttgttctcgttcaagcttggcggcaaccgtaatttccggcactagagaaacggcaaaacgcttcatgaagaatccgtaatcttcatccgcttcctgccagacattgccgctgttttccaccatctcgcccgaatggacgtcaacccgatgctctacgtgcgggatgatgtccgccacggcggtgattcccacggattccttgtaatcgccccggcggtcttgtttcctcatcctgtgcagggagtaggctctttcggatatctggtccagcagttcctcggagcttgtttttccggatagggcaatggtcttttcccaaacgtccacacatttggcttgaacgcttgtgaagcccactaaaaacagcgtggcggtccgagacatgcctttcgcccgtaagaagccgaccaggggtttatgccaatccctgttagcgaaagtgtatttgtccccggacatcagagccacctgggcagtcaggccattattgtcatcccggtaaatcgcgtgagggtcgttccagacaaggttcggaggcactttcaccgcctcattgttgcaggcatagaccagaggctcatgctcttctccgcaggcgctgcattttgctccgtctgacaccgggccaagcaggaataccttgcggggcagccaggtgaggccagtcagcaaggctacatccttctcgttttgggatccaaacgggttcagccaggcaggaacacccaaccgggaagtgggttcccaattcaggaatatcgattccgacagactatcaccctgccagatggcatagaagggaggagttctgttgatgccggctccgattccgctgccgcctacggtggtaaagagtggcaggcgcagcagaccggtaacgcagcaagctgggcaaatgccatcgatgaaatcggtcacatggcggaagtgccagaaattgtttgccgtgggaagctcgtggataaggtccgtgctggggcgtattctggatgttcctggggattggtagaatctggggccatcaccgaacaattcgaaatattcttggttttgttcaagccagtccgtccatgcctgaggcagtggcttatctgataccggcgcttgttttgtattggcaaaacaccaatagcccagggcgaggaggaaacggaaaacggacatgcggtccatcggattgccgtaagccaaacgcagtgtgtgtgcttttcgcaggacctcagccaggccgagcctggcagaatgcccgtcaagctgtagcacactgatccagggtttgtctgtcaaattataatacattgaagctcctgtcgcatggggagggttgatagcttgttgatcctttacagaggccgttccacaggctaacatcattatgccccatagctattatacaccaaatttaccaaggaataatttgtcaagtccaaaatagggctctaatttcaaacttccttaaggccggcaaggtcagattcacaaattcacaaccggtaaatatggcttgtgaatccgtgtgttattgtggcacagtgagttgggggacaaattcacaaaatacgcttatctcttatatccagccggaccaggggagaatgccggtttgcagtggctcatgccgcaaacaagagatgaagggaaggtagagatgatataatatcaatatataataatatataatactattatatattatatatactatttctatatgtattatagactggtagcgtggatacatcatatcctgtttacaatcggcttccgcggatgtataagagaccccttttttgtgaattagcctcataattacccgtctatcagcaggttgcaaattcacaagccatatttaccggttgtgaatttgtgaatttgccttccaacgttggtgagcctggagtgcagcgagcttgcgagtatggactacaggagatgttgctggcgtccatgctcgtgcctcgctcgacgccagcgtcaggaaggtcgatgtccccgtcggccaatcgttctgggaccttcgggctccaaacatatggattacttgcccgattgggaagtaagtcctttattttaggttatctaccacagttggtagcgtaactggaaaagcaattcgtatgaattcgcgcaatttgtggacttcctcccattttgatacccactatcaatagaagccccatttgccccatcccatacacatctaaaatacttcccgctgagttcccattggccgggcgggaatttaaggggaggtttacgggatgttagtgggaaggggcaaacggcctgtccgtgggcgaaaaaggctttgggaaaggaatccgcagttattgtggcagattcggaacgattcttgcatctactatatgcataatcataaattttattcccctgggaggatttgaacatggtgaaaaagcagatcgtactgttcgcggcggtgctgctcatcctttgcggatgct

SEQ ID NO: 715 - DNA, 7860 bp, Artificial Sequence
  Synthetic Oligonucleotide
acactaggttcggctcgccgcttgtagttgagctaccggttcacccccacgcaggtggggaacacggacacggcatttccatgatgggcaagaataccggttcacccccacgcaggtggggaacacatcgccattgccacccaatctttccagatgtccggttcacccccacgcaggtggggaacaccttgatttcgctatgcctatgcggttggttgccggttcacccccacgcaggtggggaacacggggaacggggcgggcaaccgcccccaccccacggttcacccccacgcaggtggggaacacgtcaatgacggacagggagcgagcggtctcagcggttcacccccacgcaggtggggaacactgcttgtcctgtgcggagctaaggcccagaggcggttcacccccacgcaggtggggaacacaagcgggccgttatacgcccaaaaccgctcttcggttcacccccacgcaggtggggaacacgcatcacggtagggacaagcttggcgaatccgcggttcacccccacgcaggtggggaacacacttcgaaagtagacgctttgaggccattgaacaggcttcaagtatggatcacggatgcttggtcatcaatttcaatccttcccattctgtcactatcctttccgcggcaccccaaaactcaattccaaagccttgttcgcaatgcttgctgtaaatcatgatacaagttccaccggcacaaccagacctggccttgtcccacagcttttcccttatcatggccgatacctgaccgacaaatactccagccttgatttcgaggagccagcgtgtaatttctcctctcaggccagagggaactttttcaagcaccagaaccatcatcatggcctccaggatcatccagaccccatgacaagccgccggggctcactttatcatctgggttccaaagcccgcctggcacggctggatcgacatcagcaaggtctggctcatcgtccgaagtttccagaataccgaaaagggcgtgaatgtcggccactatcttctttagcagaccaaattgatagaactggtcacggcaggcaatgcgtgtccttctgtccaggttatcgacccctgcggctgtggctatgaaagccgcgggcacggaggtttccattttataaagatcggcaatgtcataaacaaatgacagttgtttgccagtatgaacgaaacccagggcaggtgaatagccagcggccactatcgcggcgtggcagatgccatagagacaggaattggcaacggacagggctctgttgatggggtcggttttattccagttgctcctgtcgtaattcctcgcactcatgggcacatcgaattcttttgaaagtctgaaataggtatcccgtactctcgctccctcttttccccttatctgttcaagagagagggttgggtccagtttttccttgaacctcaattcatacattctgcgaactatccgcagatgcgtatctcgatttgaccaggcggcagcctgacgcataaggttggcggaactacgggtggtccctgtcccggatgagtaaaagcggactccctgttcccccacccaagccaccaaacagccgcattctgctaaaacaaggatggccgcatgggtgatggatacgcctggccccagcatcagcagggccagtccagcgcagggaacaggagtggagcccatggcatcgtgaaaggcgattgcctgttgttctttgtctattttggcatgctccacatagagataggtgaagcggtcccgcatttttggcattaggtgaaggtctctgttacgcatcacttgccggaaccacggaaaggaggccgaagcccattcctttggcgctgccgatacctttttccaaggcttcccggaacagaaaggcatcatccactgtcagataaccttccagcagggcggaacggtatctcaggggacggtattcgttctcacgccggggcgaatttccccggggctccggtttggaaccgtatacccagcccaggcttaccagttcggtctccccgggcgtgaagcccagtctgccagccttggcggcaaaccattgcgccaccgcatcctttgggttggaatttgtgtcccaggtaagggcgacccgtttgtgcagaacccttcccgttttttcctttcctccgggtccttcccgcaactcgtcgattttgcgtttgacactggcattcacgaggatgcggaagcgcagccgctgacctgctgagaactggggatcgtattccttaacctggggaggggctgccaaaaatcccgtggcattctggaaagcccagtcccaatccggcggcagggacgactgcaccaaaaccatcgccctttgattttctccatcggtgttgttgtccacccgaaagaggaactggcgcttttcaaaatctgcggggtcaaagggctgcagaaacctcgggtctccttccttgcgcttgcgcatggggaaagccatgctgagccgccggtggacattatagatattgttcagccacaagcgcccgggccttggccggtcagggttgccgcctgtgtcgatgagcagttgggatagatacatcatccgttctcctccttcggatcgagtttgcgcctgcgctgctccagcgagcggaatttgattatttcctcgcgtttggccaagatgcgctcacgccaggcggggtcacagggatctatgcggtccatggtcatgccgctgccatattccagcatggtgcaggcatcgtggcagaggcggcagagggcgcgcaagtcctccggcttctcgctgcctccggcgcgtcggtaattcacgtgctgcacagtagtggcgggtgccttgcagaacatgcaggcggcattgtccatcaccaaacgctcagcgcggacccttttgtattcaggattgtcgtaatttgcccggttgcggggcggttgccaggctttgccggaaagcacggtctctgcctcgaagttgcggtccaatggcaggttacagcggatcaccagccggggcaagtggtggggaggctcaaaggacaccggcacgtcgtaatgcgcttcggcgttcggcggagcgtgcacgtcatcatgggccggaacccagtcgagcacacagggaacactgtcaggtatcggttcgcctttttccctcagttgcgccgggatcgaccgcaaagcctctttcagactggcataaaaccctggcgggtgttcatccaccggacgggaggggggacaggattttcgccccagataaagcgtccagactggttttttcagcgcttcagccagttgtgccacgatatccggttcaccctggagcgcaaccaggaagctggcatcagccaaatactcgcgtcgggagagcaaagccccgggtttggatttgatcttgtccgcgcccaggtttttggccagggcagtgccaaccagaactaggccgttgggcattttcaggtcagaaatgcgcagcttctgctccgctcccacagtatggtaatcccaccagcggatgcccgggcggtctatccgcacccccatgcgcaatttggcaatttcacccagccaatactgtccggcttcggcccggctgattcccagggcagcgcagagcaggcctgccactccggatttggtgggcgcgtcggctgtcctgcgcacggcgaatttggcctcattgcttccccaggcctgaaggggagcctccaatctcaggaacagggtattaggcggagaagacatttcaactctctactttctcgttttttacatcatcccattcaaaacccaacatctcaactgcttcgcgaacaagttctagcaggttgcaaactggctttatgtccagcgtgccctgttgaggctttaggggataacgtccattgggcgagaaccacagagcgttgcctttcatctgtccagggaagaaaccggcacttatatccttcacatagttggccagttggccaatgctttgttctaccaagtcagaatccttaacgattcccaccggtcgcacaaaggcatttgcatagctgacaggtgtctcttttatttctaccaatattccatcgggaaggttatgtgcggcaaagctgttctgctttccgctgggattagtgagtgcagcggcctggataaaggctccgacagtatgagctgccaacttttcattaccctggaggttgattatcaaggtattccaatcaattgagtaatatttgtagaaacaggccgaagcaaacatcgcctcgtctatgaatccagcacctgtgtcgtcgccaggctcgtcatcagctgctacatagtaatctatttctgggcgggcgatgtgggttgaaatggcgtgcgacacctgcagggctgcttcaacagtggtattttcccacttgaccttgtctgtgttcttgtccttggtatcgggctcgagcattcttccgcacagagcgatgtcaggggaatgtattgcccccgatattacatctgccgctttcttggctttctctgcaacactcaggccttcgctggtgacaatttgagcaagggcatcgatcttgttccgggtcatgaacaccagcatcttactatgtccgttttcgtgtttcaaaccggctttgttcagaacttcctctgcctgattcctgcagtcctgtcctgtagcttttgtaatcaactcggccaaccgacgggtacggatacccccgagcaagtttttgaattcatcgctcatcctgatgctccgctttaggcactggctggagatgcgggaccgcaacaccccaccgaaataacaggtcttgggcgcgcccaggtcgtcccggttcaggttggccgggctgtggttttggatcatgtgtatttcaatcaacatttgattcctccttgctgattattaaatgctgaaataaatgtgtctgaccatatcgctctgtttgattcccgttcccaagcggagaggtcatcgatgagggcaacccagtccagactggcaatgtcatgtctttttaaaatcgcgagcacttgcgccagcggttcctccagttggttcaactcgagcgtgagcaagcggtcgaacctggctaaaacacgtgggaactctttttcttctttaagtccacggcatattctgcccatgagccaaggcaggctggcgcctttcttttgctcaaagcggaattccgcgaaaagcttggtgactagccagaccaccttccgcctgggggttttggggcttatactgcggagtggccaccacaggccggaaaacaggtcgaaacccggcagggattcatccagacggcgacccctgagctttctgagcaagcccaggtcgccctctttgagttcgcccaggctccgaacaaatttcacggtgctctcattcattatcgcctccggatgaaggttttttaattgattttggttttaggggccagggcttgcgccgagccagttgttctcgttcaagcttggcggcaaccgtaatttccggcactagagaaacggcaaaacgcttcatgaagaatccgtaatcttcatccgcttcctgccagacattgccgctgttttccaccatctcgcccgaatggacgtcaacccgatgctctacgtgcgggatgatgtccgccacggcggtgattcccacggattccttgtaatcgccccggcggtcttgtttcctcatcctgtgcagggagtaggctctttcggatatctggtccagcagttcctcggagcttgtttttccggatagggcaatggtcttttcccaaacgtccacacatttggcttgaacgcttgtgaagcccactaaaaacagcgtggcggtccgagacatgcctttcgcccgtaagaagccgaccaggggtttatgccaatccctgttagcgaaagtgtatttgtccccggacatcagagccacctgggcagtcaggccattattgtcatcccggtaaatcgcgtgagggtcgttccagacaaggttcggaggcactttcaccgcctcattgttgcaggcatagaccagaggctcatgctcttctccgcaggcgctgcattttgctccgtctgacaccgggccaagcaggaataccttgcggggcagccaggtgaggccagtcagcaaggctacatccttctcgttttgggatccaaacgggttcagccaggcaggaacacccaaccgggaagtgggttcccaattcaggaatatcgattccgacagactatcaccctgccagatggcatagaagggaggagttctgttgatgccggctccgattccgctgccgcctacggtggtaaagagtggcaggcgcagcagaccggtaacgcagcaagctgggcaaatgccatcgatgaaatcggtcacatggcggaagtgccagaaattgtttgccgtgggaagctcgtggataaggtccgtgctggggcgtattctggatgttcctggggattggtagaatctggggccatcaccgaacaattcgaaatattcttggttttgttcaagccagtccgtccatgcctgaggcagtggcttatctgataccggcgcttgttttgtattggcaaaacaccaatagcccagggcgaggaggaaacggaaaacggacatgcggtccatcggattgccgtaagccaaacgcagtgtgtgtgcttttcgcaggacctcagccaggccgagcctggcagaatgcccgtcaagctgtagcacactgatccagggtttgtctgtcaaattataatacattgaagctcctgtcgcatggggagggttgatagcttgttgatcctttacagaggccgttccacaggctaacatcattatgccccatagctattatacaccaaatttaccaaggaataatttgtcaagtccaaaatagggctctaatttcaaacttccttaaggccggcaaggtcagattcacaaattcacaaccggtaaatatggcttgtgaatccgtgtgttattgtggcacagtgagttgggggacaaattcacaaaatacgcttatctcttatatccagccggaccaggggagaatgccggtttgcagtggctcatgccgcaaacaagagatgaagggaaggtagagatgatataatatcaatatataataatatataatactattatatattatatatactatttctatatgtattatagactggtagcgtggatacatcatatcctgtttacaatcggcttccgcggatgtataagagaccccttttttgtgaattagcctcataattacccgtctatcagcaggttgcaaattcacaagccatatttaccggttgtgaatttgtgaatttgccttccaacgttggtgagcctggagtgcagcgagcttgcgagtatggactacaggagatgttgctggcgtccatgctcgtgcctcgctcgacgccagcgtcaggaaggtcgatgtccccgtcggccaatcgttctgggaccttcgggctccaaacatatggattacttgcccgattgggaagtaagtcctttattttaggttatctaccacagttggtagcgtaactggaaaagcaattcgtatgaattcgcgcaatttgtggacttcctcccattttgatacccactatcaatagaagccccatttgccccatcccatacacatctaaaatacttcccgctgagttcccattggccgggcgggaatttaaggggaggtttacgggatgttagtgggaaggggcaaacggcctgtccgtgggcgaaaaaggctttgggaaaggaatccgcagttattgtggcagattcggaacgattcttgcatctactatatg

SEQ ID NO: 716 - DNA, 7858 bp, Artificial Sequence
  Synthetic Oligonucleotide
ctgttccctgtctttctgttccctgtctttctgttccctgtcttcctgttccctgtccactgtccactgttccctgtaacctgtccgctgtcttctcatattcgtgcgctgctcgatagggaaactatgcagcaggacggtggccaaagccgcgccctgcgaggccaaaggtgacagggaaagaggagagaataggcaataggtgacaggttacaggtgacagggaaagaggctgcgccctgcggcgccaaaggtgagcctgttccctgacgcctgacacctgttttcccctgttccctgtccacggtcctctgccttcgggttccctgtcttcccctgtcccctgtgacctgtaacctgtcacctctcttcctgctgtaccctgtcccctgtaacctatcccctgtcctgaccgctcagagccctacgctacagccattttgtccagcccgctcatgacaccttaagtctgatgaccaagctactcacccgttggagagtcagcccttccctggcgcgctgtagtggcggtctctgactgtcggagggtgttgtggcatggccaacttggggtagcgccctaattctgtgttggtcccctccctcttgacaaactgcgatcgcacgtagcatctttccagcagcgaaaaacaaggtaaggaccccgctgctgtcgaacttggacggaggggcggcgaagcgatcgctaggtgcggccctgcttatctcaagtggcttcagtcttagcggttgacccgtaagggaggaagaccgaagtctaaatagtgaaaacgtgtttgaaaatggcacctgactcactcgggatgttgaccgcgattttgatatccgttggcctaatcgtaagcggagtgcatcttcgtcgtgtacctaaacttaaaatcgtgggagcgctgctggctgtacttggcatcttcggactcatggcagctctgggcttcatcagggtttattaacagcactcaccacaatcttcatctctgccagaacctcttggccgatcagcacgcgcgttgagtgcctatattggtaaaagccatgaccagcgacgtatgccccaaatgcgagagtatgaatctcgccgactcccatcggcgaggttggatcgagcggtggattcttagcttttttggtatcgtgcccattcgctgcatggactgtaatacccgtttttactccttccgccgtcccctctactgactccttttttcttcggcactcggttcagctcgccaagttgcacagatttcctttcggccgtcaatgtaacttctcagccaatacccctggactgacttgacaaaaccccattggatgggttaatataggtttccggtagtctagccaaaaggggaggggctgccgatgcaaacaaatgcctccgttaattcgcgccggtgtgagcgcaaaatagcaacaattccaatcaaacttgtggtgaaggccgacctcttcaatgcagacgattcagctctcgcggtcgacatttctccgcgcggcgcctgtgttcgaaccaagctggagttagatccaggagagtgggtgggtgtcgttcccaagggaggatacccgtatgccatccccactcgcacgatttgggtgcgggaggatgagttcagccattggaccttcgcggggcttgagttcttaaacaccccggaaggttagaaaatgcactccatggcacacccttccagtgtttgattggaattccaaaaccccaccaacacacgtttaggacgctacctgcctccccgaaggggaggaatatcattagccgtaggtgaaacctacggaccgagacggcgacgaaaggaacctaattttccgcgtttcctttccgtgggtttcacctaaggctatgggcgacaggcagagggcacaggttacaggtgacaggccaagaggcagcgccgtccggcgcccaaggtcagcctgctgcctgacacctgatacctgacacctgttttcccctgttccctaacccctgttttcccttctttcccctgtaacctgtaacctgtcccctgccttgcggtggcagagccgctggggctcttgcgtgaggcggaagaaccactcgaggccgttctcctgcatccatgcttgcttggcagtcccggcgatgaagtcgaaggccgctcccaccccggccatcgccggcacgcctagccgtgagcggtgctcgaacatcgagcgttcctgtttgggagtgctcaagcctacccagacgacatccggcgccgccgcctggattcgtagctccacttccaccttttcttcctgggtcagcggccgaaagggtggcgagcaggtggctcctggttcgcgtctgctaagcagaggcgataaccgttcttgtggtcttcgggccttgcctttctcgcgtgccgggtgtataccttcatcgcgttaatcatttggtagacagccacccgacaatcgggccgccaggagcgcaacgggccgcccaccagcctcttgccaaggcaaggaggaagttatgagctataacctgctcgaagaaaactggattccagttctatggaaagacgggaatagcaatcgcgtgggcattactgaagctcttaggcaagcaggccggattcgtcaagtcgccgccagcaatcccatggaccgtttggccatcctgcgtttcctcctcgcgcttctctattggtgcaaggggaatccgccggacgatgaagactcggtctcttcgtttccctcggattggttcaggaaacttgatgacaataaggactgtttcaaccttctgggagatggcaagcggttctatcagtgcaatgccaagtctggaacagagggaaagctttccgccaactacctgatgcaagaggtgcccactggcacaaactcttggcacttccggcattcgacagataaagaggacggattatgtccggcgtgctgcgccgcggggttattgcgtttaccgctatttgctacgtcaggggggcgcggcaagccgccaggggtcaaccagaaaccgccggtttatgtcgtaccggtcggcggttcacttgcggaaaccctgcgtctctcctggcgcaaggtatcggacacggacttcggaacgccggcttgggaagagcccgatcttagccttcctcgacatggcaatgttccgctgcttgtgggattgacgtcgctgccccggcgcgtgtggctggacaatccgcaggaacccgacgccaactgcatctcgtgcggacgtaaagcgcctctaatacgccaatgtgtgtttgctggtgtcggcagcgcaaaaacggatgaaaatggcctgggccgcgtatggagcgacccgcacaccatcactgacggcgaggatgtcattaaacccagcaatgcccttggtgcaaccgacgcggcggctgggcaatgggcaaggatagcggcgggaattcttcgggagaaaaagcccaatggcaaaagaggcttgtgggtcgtcagctttgcgacggtgcagaacgacaagtacctggaagcgatggaatatgagattcctctcccgagcacgctagatgatcggcaggtcgcggagagtgtcgaaacgattgacatgtggcaaaaggagggccggaagcttgccggcaaagccaaaccgagagggacttcccgaagacatcttgaaattcctcccatggtcgccgcagttcgcccgcacgtagaagcaaaggtctccgggaaggtcggcgagttgatttcgcgaggccgcgatgcgtgggagcaggcagcccgggaatataggccgatgatggccgccgtcgccaaatcgctttccccgggctataccaccgctgcgctccggcggcgacgccagattgtcaatgtaaggccgaacatgcagccaggcaccccaccggccgggagggccggacggaagaagggaggcgacaaatgactccaacggagcaatacgtcgacgtcctgacacatctgaagtccggtgatctcggactcctgcgcgagcatgccgggcaagggctcgaccaatcggtcgatgcctttgacctcttcgcggggctctggtggccgttgcgggagaggaatcagcgcgcgccccgccgtgcggtggcgtggcttatcgcaaaactctatgccttccggccgatcgagcattcacccgggcagacgcttgcgtggcagcttgggcggtaccggaacgacaatgaccccgagaaagaccctgtcgcggaaaggttcgacaggatgctgaccttgccggttgatatactcgagccggccttgcaatggtcgcttaacctcatcgcctccaaaaacccgaagctcgactgggtgacgctgacaaacgatctttccatttgggaacgcgaaaccacccggctcaagtgggccgaggaattcttgaagtcttcgaaggaggaccgtcatgttaattgaaattcatgccattcaaaatcacagcccggccaacctgaaccgggacgacttgggcgctcccaagacctgctacttcggcggagtactgcgctcccgtatttccagtcagtgcctcaagcggagcatccgcatgagtgacgaattcaagcagttgctcggcggcgttcgcacacggcgactggcgcaattgatcgctccaggcggcccggataccgccgagtttaaaaaggcgatcgcggttttagaaatctgcggcatcgcggcaaaagagaagaaagggaagaaaggcgacgacgaggaatctacgcccgacgaaaaaagcgccggagtggtttatgtgagcaaacaagcggtcaacgagatgtctgagcttctgaaaaccaagtcggccaagaccgataacgagctcgccaaggaatttgcccagataatcgctcgccatacgagcaccccggacatggcactctgtggcagaatgctggaaccaaagaaagcgaaaaagcaggcgtcggaggaaggcggcgcgaagcccaagggcggcgacgtctggaagggacttgacacaaccgttgaggcggcgctgcaagttgcccacgcaatttctactcacgcggctcgcccggagattgactactatgtggccgctgatgatgtgcccggtgaagacgcgggagcaggctttgtagatgaagcaatgttcggctccgcctgcttctacaagtatttttcgattgacttcgaaaccctcatcaacaatctgaagggcaacaaggaactggccgctcatactgtcggcgcgttcatccggggagcggcgttggtgaatcccacgggcaaacagaatagtttcgccgcgcacaacccacccgacggaatgctggtcgaaatcagaaactcacctctcagctatgccaacgcttttgcccgaccagccatagcccagggcgaacgagacatcatatcccagagcgtcgcgcaactcggccagtacgttcacgatatcgacaccggatacggcaaaccaacgaggcggttctggttctcgcccaatcttcgctatcccttgaccgttacggagggggataaggaaaacgccttggccgaaaacaatatcaagtcgctcgaggaattgatcgaggcagtcatcaagggaatcggccatgattgggaggaggttcagaaagtggttgtgaactcggaggtggcctgatgagcgcaaataccctctttctccgcctcgaagccccccttcaggcatggggcgatcagcagtcgaagtttgtgattcggcggacggctgacgccccaaccaggtctggcgtcatggggatgctttgcgcggcgttgggcgtctcccgctcggcggcgccggaaggctggcttccaaggcttagccgcctgcgcatgggcgtccgcatcgatgtgccgggggtccgctggtgggattatcacacggtgggcgccgggatgccgatgcgcactgccgaaggtggaaccaagccaggggccgtgctgacccgccgcgaatacctttgcgacgcctcgtttctcgtcgcttttcagggagagtcggacctcattgccgaactggagtccgcaattaaagcgcccaaatggacgctctatctgggcagaaagtgctgccctccctcgcgccctttactggagcatccggggggtgaatttcctgacttgctttctgccctcaaatcggttccctggcgcaagaggttggagggagacgatcagcccgaagcgctggattgcctgcttgattggaagtcaaccgaagagcagccggaggctcccgatgatgcgctcgtctggtacgacgtgcccgtgaccttcgacccgccctcccaccagccccgatttgtcattcgcaagcaactgcgcgttggactcgacggcgaagtaacgcttgcaactcagccagcacagagctacacgccagcgcctccccgcccaagagcggattacactaataccgagtacagaatccgacgggaaaagcggctcgacgacgactatcacttgtgcgtcttttgcaagtcgcccgccaccaccgtccagcacatcacctatcgccgcgcgggtggcaatgaactcgcggatgacttgcgctctctctgtcgcctctgccacgatgccgtcaccatgatcgaatatggcctaggcatgggcatggaccgcatcaacccggaagagccgcgttggcgcgacttgattatccaaaagcggaacgaaatcatcacgttccgctccctggagactcgccgcaggcgcctggtcgccgaggaggtggagtagccatgtaccggtcctgccttttgattgacgtcgggagtaaccccgaccggcctcggcccggaaggctgtggcttcggaatctctatcacgtccaccagcgcctttggatggcgtttccctccgagaaccgaaaatcccatgatcgcgattttcttaagcctttcaaacccgcggactttggcgagaagccggttcaggtagaacgcggggcgggttccggctttctttttcgcattgagccgcagcccgccgggcgggtcgtgattctcgtccagtccaactccgccgtgaagccggattgggactacgccttccacaacgcccgttttcttttgaatcctctggctgctcccccgcaggtagaggaattcgaccctcgcttcgccaagggccaacagcttcggttccgcatccgcatcaatctaagcaagaagttaaaaacgagcgcaaagggcgtcgatcttaccaaggcgggcgagggaacagatcgccaaggccgcccgaaggcccaaagcaaacgcgtagcgctgacctgggataaggaccagaaccccgacgatgtgatacgaaaatggttcgccgccaagggcgaccaaggtggcttccaggtggaaactttccgcgtcttgcaaatcgggtggggcgcaggaaaccgatcggacccgaggccggcgggcgatcgcatgaaatttcgctcagccttattggaggggacgcttacggttaaagacgcggatagcttcagagaaaccatcgtgggcggcatcgggcacggcaaagccttcggcttcgggcttctttccgtagcccctcgcacaccactcccggcagaggcaacgtgagagttctgacgccaaagcgagccccgaagcagcgcgccgagatcgcccgccgcatgtttgtgcagcgctttcccggtgtggatgtgcaggcgtattccgtcaccgaattgcggggaatggagggcttgcgcgtgcccgccaaatacgcggaactcggcgagcagtacggagtcacctggaaagggcgcaactacgacaaatccaactggaatctggcggacaacatcaatcgcgccctctcgaccgcgaatgccagcctctac

SEQ ID NO: 717 - DNA, 7786 bp, Artificial Sequence
  Synthetic Oligonucleotide
cgtaagttacgctgaaggcgtaacacatattagcctggggcaacgccccaggaaatgaatacacaaccaaaaagcaccctgaaggggtgcaacaactccccccgcccctacagggccaagtgcgaagttcaccgtgcggcagcatatgacaactgatgaatgatgaatacgctgaaagcgcaagttacgccggagccgtaacacataatagcctgaggcaacgccccaggaaaggaatgcgtaaagatagtgcaccctgaaggggtgcaacaactcctgccgcttcactcttccaccccggaggggtgggtcaattgtcagcccagggttgcgaccggcccgtaccaatggccctgtacccgtcacctaccacgagcatccaacgaagaccccggcgaccactccacaccggtccagggccgggcgctaccctgggcacaagtcgcgccaacgaagtaccccggcaggggttcgacagcttgtccctccccacccgtatcatgcgttgttgcctttttctccaccgggtactaaactagcttcctcaagccactatgctaaacggggatgtttaggggccggcggccgatacccggcgccggaaaacggaacggagcggatttctgtggctacatattcaaccgccctaatcgtgaagcgggtcgccaaagccagaagaagcggctgggtaactctgagccttatggactgcggcgtgaaggacagcgacctccgcacgcttctcgacgcgccgggtgtcgaacagcttcaggggctgaacctcagcggaaatcagctttccacgcttcccccggagatcggccgcctcaccgcactcgataggctgtacctcgtcaacaatcagctttccgcgcagccgacttcgtcggccgccctgccagacagtcaacaatatcagcacataacgattctatacagcacgaccgaattttcccaccttcctgtaggtccggaataattccgggccctcgagtttctacattatcacgcggcagcggcggcagccagacccctttctgagcaacgtatgcctaagcgtaggtccggaataattccgggccctcgagtttctacattatcacgcggcagcggcggcagccagagccctttctgagcaatgtatgcctaagcgtaggtccggaataattccggacccacattcagcaaaaattatgtcgtcatatataaaggcagcgcggcccagctgtggtttgaggagaatctccgctcacgtatactcaccctggcccattcagcccttccggcttggcgagacaattcatcgagcctcccaataccgccgctgaccccaacttccacatcaaaatcgctcacttagataacccctcaatctacttgatttaaacagaacccccgcgtagactcactgcagggcgcgcaaaaaggggctgtctatgaactcgtacaacttgctttcccaaaactggattcccgttctctatcacaatggcgatttcaaacgcgtcggtatcctcaaagcattccaagacgcacacagaatccgccaagtcgccgcatccaatcccatggaccgcctcgccatactccgctttctcctcgccctgctctactggtgcaagggaaacccggcgaacggcccacaggccgcgccttacgaaccattccctccggattggttcttgaaactcgaacagaataaagaatgctttgacttgtttggagagacccggcgattttatcagtacaagaaacctgtgggcgaagataaacggctgaccgccaactaccttgtccatgaggtgccgaccggtacgaatgcgtggcattttaggcattcaacggacgaagtaaacggtttgtgtcgcgcatgttgtgcaatgggcttgctaaggcttccagcatttgcgacttccggtgggcgtggtaaaccgcctggaatcaactcaaagcctcccctttacgtcataccgctgcgcggttcacttgcggccactgtacggctttcctggcggccggtcggcccgttaggaacgcccgcatgggaaaaaccggacgtccaactgcctggcataggcgaggtgccactgctcacaggtttgacctggctgccgcggcgagtgtggttagactctcctgcggaacgggcagaaacctgcatctcatgcgggcgcagcgagaggctaatcctgcgtactgtatttgccccaattggcagcaccaagacggaagaaggagaaccggtcagggcgtggtgcgacccgcatgtcatctacgggatgtccgccaagggcgaaatcagcagcctgcatgcgcgggacgctcttggcgcaccagacgccgcggcggggcagtgggccaatatccttgccggcctgcttcgaaaggggcaaacaggaaacgcatctccttgctggatagtgggcttttctaccgtccagaacgacaagtatcttgaggctgtcgaatgccagatcccttgcgatatcgaccaggcgccacaagaacagcgggacgaatgcctcaacaacttggaacaatggcgcaagggaaaatggggtttcgccaaaaacctgggatcggacaacgaaaagggcgagcggcgtgagcatcgagagattacctctatgcttgcgtccattggaccgcacgttgaaaagcaggtgtcggagaaaagtggatcgttgatagcgggcggcgaaaccgcatggcaggaagcggccaaggcgttccgcccgatgatgcgcttagccgcacaatcgctgtccccagggtttacgatccaagcagccagaatacgcaagcgcattgccaatgccatgccaaacatgacacccaaggccgcgaagaaggggcggggaaaaggacgggataaatgaccgcgacggaagaattcattcgcgtattgagtggcctcaagtcaggggatcttggtctgctgcggacttattcccaacacggcttggatgaatccgtggatgggtttgacctcttttcggggctttggtggccgttacgggcgaagaaccagcgggcgccgcgccgggaagtggcgtggcttatagctaaactctacgctgcccacccaattccccaggcccgcgaggccacgcttgcgcgtcaactccgccggtgcctcccgaccgatgagaacggtagaaatcggtttgggcggaagctcgacaacatattgatgctgccgctcgacaagatcgaggcggaacttcgttgggcgatcgggcaggttgcctcgagaggactttcactcgattgggtaagactcacggatgaactctccgtgtgggaatacgaatccgtccacctgcgatgggcggaacaattccttcaaaccgaagattaaggatgaaaggggtccatcatgctgatcgagattcacgcaatacaaaaccatagtccgtcaaacctaaatcgggacgacctgggtgcgccgaagacgtgctattttggcggtgctctgcgctcgcgcatctcaagtcaatgcatcaaacgaagcatccggatgagcagggagttccaagcgctttgcgggggaattcgcacgcgccagttggccagactgatcgccgagaaggttcaagggaagccagacgtccagaagcgcgccgagaagatactcgaactatgcggtttcaagcccaagaaggcgaagaaggaagaaacggacgacgcagcagatagcgaaaaaagcaagatgctcgtttatacgagccgccaagccatcgaggaaatggccgcactactccaaaacggggacggaaggactgagaaacaactggccgcggacttctgcgcgttgatcagtaagcatgtggcagtccccgatatggcactatccggacggatgctggagccggacaaatcttcaaacgacctttggaaggagcttgacaagaccgtcgaggccgcccttcaggttgctcacgcgatttcaacgcacgaggcgctgcccgaggtggactattatgtggccgccgatgacattccaggcgaagatgcaggggcgggctacgtggatgaatccatgtttgcctcggcatgtttctacaagtacttctcgatcaattgggacaagcttgtggaaaacctcaatggccagaaagaacttgccgcacatacggtaggggcttttatccgtggagcagcgctggcaaatccttcgggcaaacagaatagttttgcggcgcacaatccgcccgatggcctgctgatccaattcgccgacaccccgacgagctatgcgaatgccttcgccgctcccgtgtcgggcaagggcaatcctgacgtcatttcacaaagtgtggcgcagttggcgcattatgttcgcgacttggacacggggtacggcaagccccagaagcgtttctggttctcgccgaatctgcgttatccgctttgcgtcatcgaagccaagaaaacgattccggtggccgaggtaaacctcaaatcgctcgatcaactgattccggccgtcatcggcggcttgggctttgattggaattcggttcagaagaaagtgacaagccaacaggtggcgccatgacggccaacacgctgtttcttcggtttgaaggaccgctgcaggcgtggggtaatcaggagtcgaagttcgttgtacggcgcacggctgaagggcccactaaatcgggcgtgatcggactgttgtgtgcggctttgggcgtgacgcgggcggaagcgcaggaatgccggttgcctcaactggccgaactgcgtatgggcgtccgggtggatgcgcccggataccggtggtgggactatcacacggtaggcgcggggatggacatgcgcatcgccgaagccgaggggaagacaaaacccggcgcaatgctcacgcggcgggagtatctttgcgacgccactttcctggtggtgcttcaggggaatccggccctgatcaaagaactccggcaggtgatcgaaaagccgcgctggacgctctatttgggcaggaaatgctgtccgccgtcgcggcgggtgctcgaggaggcgccggcggcgcatccggacctgatttcggcgcttgtgtcggttccgtggcagcggcgctttgaaagggataatcccccggaaacactcgagtatctgctggattggtttccgtcgcccgaccagccggaggcgccggatgacgccgaggtgtggtacgacgtgccgttgacgttcgagccgccgtcgcatggtgcgcgctttgttgtgcgcgggcagttccgcgtgggcgccggggggcaggtcccggtggcggaatcggcgttgcagcgccaggtgccctcgccacaacgcccgcgggcagattatggcaattccgagtaccggaagatgcgcgcgcagcggctcgagaaggactcgcatctttgcgtgttctgcagatcgcgtgcaacgaccgtgcagcacgtcacgtaccgccacgccggcggcgatgagcggatcggcgagctgcgttccctttgccgcttgtgccacgacgccgtcaccatgctcgagtatgggctgaacatggggctggaccgcatcgacccggaggatgctcgatggcgggagcggattatcgagaaacgcgacgagatcgtcaagttccggtcgctcgagacgcggcggcgtcggcttagccccgaggaggtcgagtgatgtatctatcgagtctgatgatcaacaccggcgacaatccggatcgggagcggccgggccggcggtggctgcgcgacatctaccacgtccaccagcggctgtcgatggcgtttccatcgaggtcgcacggaagcccgtccggttttctgttccgcatcgacaaccagatcgaggagaactcgccgcgcgcgatcgttcttgttcagtctcaattggccccggactgggatagcgcattttacaatgcgggcatgcttctggcggcgccgccggaggttcgcgaatatgccccgtctttcgcgcccggcgaccaccttcggtttcgcatcagaatgaatttaagcaagaagaccaagacggcgcgcgatggtacagatctgtgcacgccgcacgagggtgtcgacaccttcggccgccccaaatctcagtcgaaacgcgtggccgtgacctgggacggcgatcaaggcgaaaccccggaccgggcaatccgccaatggtttgccgcgaaggcccaacacgccgggtttgcactccagaacgaattcaacgtggttcacctcggctgggtggcgggacacaagccgggaacggccgagaaccggctgcggtttcgttccgcgctgctcgagggagacttgacggtggcggacgggccggctttcatgctatcggtcgagagcgggctgggctcggcgaaagggtttgggttcgggctgctgtctgtggttcgtgcaggcgggacgcccgcaccacaatcgaggcgtggcgaatgctgacgcgtgacttgcacgacctcgccaaggtgcgcgaccggctcagctacctttatgtcgagcacgcccggatcgatcaggaagacaaagccatcgccattcacgacgcccagggactcaccccggtgccgtgcgccacgctcgccctgttgatgctggggcccggcaccgccatcacacacgccgccgtcctcgccctcgccgacaacggctgcctcgtcgtgtggtgcggcgagcagggggtccggttctatgccgcggggcacggaaccacgcgaaactcccagaaccttctgctccaggcgcgcctctcgagccgccgctccacgcgcctcgccgtggttcgccgcctgtacgagatgcgctttccgggaaagctcgattcgagtctgacgctccaacagatccgcggcatggaaggcgtgcgcgtgcgcgaagcctactcgagcctgtcccgccaattcggcataccgtggacgggccgggcgtacgaccgccagaactggcgcgacgccgatcccgtcaaccgcgctctctccaccgccaattcctgcctctacggaatctgccacgccgccatagtcggcgcaggctattcgcccgcgctcgggttcatccacaccggcaaacagttgtcgtttgtctacgatatcgccgacctatacaaggccacgaccaccgcccccgccgcgttcgaaaccgccgcccgctcggcccgaaacatcgagcgagaggtccgaatcctgtgccgcgatgcttttgcggcgcagcgcctcctcgaacgcgttgtgaaggacctcgagtacgcgctggacgtgaagccggccgatgacgacgaagccgagaccgatttcgactcggatcccggcacgcccggaggcctgtgggaccctgacgccggcgaagtggccggcggcgtgtcctatgccgaacccgacgaacacacagaggatgaaccctaatggtcgtcatggtgctcgaacgcgtatcgccttcgctccgcggtgaactcactcgatggctgctcgaaccaaaatccggcgtgtttgtcggcaccgtctccgccatggtaagagaaaaactatgggaaaaggtttgccggaaaaccggcgaaggaggatctatcctcatttggaccgcaaataacgaacaggggttcaaaatcgacttctggggcgatccctcgagacacgtcctcagttgggatggacttcagctcattacaaagccaaaataaccaataaataccaagtgtaatccccacgcgcgtggggatgaaccgtcctggttgttatgcgctcgcccgcctccttcgtaatccccacgcgcgtggggatgaaccggcgatg

SEQ ID NO: 718 - DNA, 7721 bp, Artificial Sequence
  Synthetic Oligonucleotide
cacgcatgtggggaatacgacagcacaaccgactatctgtttaattgcaccggttcacccccacgcatgtggggaatacccttagtaaataaagggtttcaggctaaccacactgccttaggtatggttcacggatgtttggtcataagttttagtccttcccactcggtcacgatcctttccgccgcaccccagaactcaatgccgaagccttgttcgcaatgtttgctgaagatcatgaggcaggtaccgcccgcacagccggatctgaccttgtcccacagcttttctctcaccatggccgatacttggccgacaaagacacctgcttttacttcgagaagccaatgagtgatttctcccctcagggaagagggtactttttcaagcaccaggaccatcatcatggcctcctggatcgtccaggccccaggacaagccgcctgggctggcgctctcatccgggttccaaagcccgcccggtgcggctgggtcgacatccgcatggtctggttcatcttccggtgtttccaggataccgaacagggagtggatatcagccacgatcttcttcagcaggccaaattgatagaactggtcccggcaggccatgcgtgtccggcggtccaggttttcgatcccggcggcagtagccaggaaggccgcgggtacggaggtttccatcttgtagagatcggcaatgtcataaacaaaggatagctgtttgccagtatggacgaaacccagggcgggagaataaccggcggccactatcgcggcgtggcagatgccatagaggcaggaattagccacggaaagagcccggttgatggggtcggttttactccagttgttcctgtcgtaatttctggtttccatgggcacgttgaactctttggacaacctgaaataggtgtcccgcaccctcgccccctcctttcctcttatctgctcaagagtgagggatgggtccaatttatccttgaacctcagttcatacatccggcgcactatcctcagatgcgcttcccgatctgcccaggcggctgcctgacgcatcagattggcggaactgcgggtggtccccgtcccggctgcgtaaaagcggaccccctgttcccccacccaagcgaccaagcagccacaatcggccagcaccaggatggccgcgtgcgtaatggaaacgccaggccccagcatcagcaaggcaagaccagcgcaaggaaccggagtggagcccatggcatcgtgaaaggcgatggcctgctcctctttgtccaccttggcgtgttccacatagagatagctgacgcggtcccgcatcttgggaatggtatgcaggtctttattacgcatcgcttaacggaaccacggagagcaggccgaagcccatgcttttagcgctgccgatccctttggccaacgcagactggaacagcacgacatcatccactttcaaatatccttccagcaaggcggagcggtatctcaagggacggtatttgttctcacgccgaggcgcatctccctggggctctggcttggagccatacacccaacccaggttcaccagctccgtgttaaggggcgtgaagcccagcctgtcggccttggcggcgaaccattgggctacagcgtcgccagggttggaatcggtctcccaggtaagggcaacccgtttgtgcaggacctgtccggatttttctttcccctcggggctctccctgacctcgtcaattttgcgtttgacgctggcattgatgaggatgcggtagcggagccgctgtcctgtggagaatctcggatcgtattccttaacctggggcggagcggccagaaaacccgtggcgttttggaaggcccagtcccaatccggcctaaggtgtgactgcaccaatatcatcgccctttgctcctctccgtcggtgttgttgtccacccggaagaggaactggcgttgttccaaatctgcaggatcgaaaggctgcaggaatttaggatctccatctctgcgctgacgcatgggaaaggccatggagagcctgcggtggatgttgtacacgttgttgagccacaggcgtcccggcctcggacggtcgggatttccgcctgtatcgatgagtagttgggataggtagatcatccgttctcctccttgggatcgagcttgcgcctgcgctgttccagcgagcggaatttgatgatctcctcacgtttggccagaatgcgctcccgccagtcagggtcgcaggggtcgatgcggtccatggtcatgccgctgccgtattccagcatggtgcaggcatcatggcagaggcggcagagggctcgcaggtcctcaggctcctcgttacctcccgcccggcggtaattcacatgctggacggtggtggccggggccttgcagaccatgcagagtcccacatccatcaccaaacgttcggcgcgtacccttttgtattgggaattactgtaatcagcgcgactgcggggcggatgccaggtcttaccgatgagcacctgatgtacctccaactcattgctcaggaccagttccctgctgaccacgaagcggggcaggtgccgcggaggctggaaggacacgggaatgtcataatggatctctgcctcatccggggctggctctccgtcaaaggcgggtatccagtcgagaatgcactgaagcgttgagggatcgggttctccgtctttgcgcttctgtatcggcgcggccgccagggcttcttccagtgaagcatggtctccgggcggatgttcccccaccggccgggaaggcgggcaggatttacggcccagatatagcgcccagacaggttttcgcaacgcttcggccaactgctccactatccttggctcaccctgcaaggccaccagaaagctggcatcagccaagtattcgcgccgggtcagcataccccggtcgtcatatttgaggtttttttgtcgcagcctggcttccctggcctcacccacatcgctcaggtctgtcggcgcttccagattggagatgcgcatttttatccccgcacccaccgtatgataatcccaccagcgtataccggggcggtctacgcggacccccatgcgcagtttggccagttccggcagccagtatttagcggcttctgccctgcccacacccagggcagcgcaaagcagcccgaatactcctgatttggtgggagcttcggaggtgcggcgcacggagaatttggcctcatggctgccccaggcctgaagcggcccctccagccttaagaacaaggtattggcagccatgtcagccttctgttttcagttgtttgatggcttcccaatcataaccgcacttgcggatggtcttcctgaccagttcttccagctggccgacctgttcggcatgcagcccgcccttctgcggctgcagaggatagcgtccgttgggtgagaaccaaaaggagttgccttccatctggccgggaaaatatccctcgctgatgtcctgcacatagttggccagttgtcccacgctgagttcgaccaggtccgattccgccaccagcttgaccggccgcacgaaggcattggcatagctgaccggggaacttttgaactccaccaggatgccgtcgggcaggttatgggcagcgaagctgttctgtttgccgctggggttggtgcgcgcggcagccaggaccaatgccccgacggtatgggcagccaattctttgtttcctttcaggttctcgaccagctgctcccagtcgatggaaaaatacttgtagaaacaggccgaggcgaacatggcctcatccacgtagcccgcaccggcatccgctcccttcacgtcatcagccgcgacatagtagtcgatctctggccgggccgcatgtgtggaaattgcatgggccacctgcagagctgcctccaccgtggtgtccgaccacttcacactcttgtccttgccttctggctccagcatcctgccgcagagggcaatgtcgggggtataggtcgcatgggcgatcacatcggcaacttgctgggcggcttccgtgatctccagggaagtatcaaggacgatccgggcaaggtcctttaccttgtccctggacatgaaaacgagcattttgctgttgttgtcctcatgcttgaagccacatttggtgagtatctcctgggctttttgccggcaatctgtctcaccggcctcctgctggatcaggtcggccagtctgcgggtgcgaactccgcccagcaaagcctgaaaatcttcgctggtcctgatgctgcgtttgaggcactggctggagatgcgcgaacgcagcactccaccgaaataacaggtcttgggcgcgccaagatcgtcccggttcagattggccgggctgtgattctggatcatgtggatctcgatcaacattttagttctccttgttgtgttcatatgatgcttgattaaaggcctcagcccatttctggcgcaccagttcattgtgccaggccgaaaggtcgttggtaagttttatccagtcgagggaggcgcagttatacagcccgatggtctgcagcgcccagccgagcgggtattccaactggctggagcttgcccgcaggatcgcgtccgttcgggccataaatgtgcgtctctccttgttagtgtgcagggtgccgtagatgcggccgagcaaagagggcagagttttaccgtcttcctgggcgagcgggaactgtgcgtagagcttggccaccagccaggcgatctcgcgccgggggacccttgatgatgtcctgcgcagagtccaccagaggcccgtgaacaggtcgaacccgtccaagtcctcgtgcaggtcgcagcctttcagttgcctcaggcggccaaggtcgcctgcttttagctcagagatccttttgacgaattgagctgtgggcgtgtcagtcactttggtcctcctgtgtttctttgttttgaacatcaggttgttccagccgggggcgcaggtgtcgcaccagactggcggcacttgcgtcagcagccgtggcttccggggcataagcccccgagatcaccgtgagcagccgccggtacagggcttttacaggatccggtatctcgccttcccgggggatgaatccacccgtcagccttaccgcagcatggaccaggtggggggagatggcgctgaccaaagcttcgctgagcggaaccttaagcctgcccgcgacagctttatcggccctggacagtctgtgccgctcatatgccccgatcaggcgacggttggcctgggcccagttgggcacgctgtgggtgtctttcccgggctcttcgtggggaattctgatcgttgtttcccagacatcgtcgatcttggcctgattcacggccacgcctatgcagagcacgctcaggccttcattgcgagatgattttgtgtccgcatcccgtagcggacgctgccagttcttatcctgcagcagaggtttttcagcgatcaggttttccaccttgagcggcttgttctctttgccgccgtagcagacgtgaggatcctgccaatggggattggcaatatctccggccgtctgataatcacaggaatggaccaagagccccggccgttcgccgcaaccggcacaagccacatctccggccacgggttcatgcaggcggctgcgtctggccaatgcggtcaggcccaccagcagcggcacgggatcggtcctggggtccacggtgttgtcaacccaggccggggttcccatcaggtcgcgtggctcccagttcaggcatagcgtttccgccagtgtctttccccagggtagcgcgtagaacgggggcattccgttgatgctggatttgagtttcggcagtccggaggtggcatagacggtgaaacgcagcaaaccctgtatgcagcagggcaggcacaggccggaaacataatccaggctgtgcttgaagtgagagaaattattcccggtggggatttcgtgcagcaggtcagttacgggtcgaacatgccgggcggcagggtcctgataaaaccgggggccattgccatagagctcgaaatattccctgttttcctctagccaggatatccagggggccggaagcggcttgccgggctcaggcggtctgtcggtgttggcaaaacaccagtagcccaaggcgagtatgaacctgaagaccgcgaaccggtccatgggattgctgtaggcaagatgcagcctgtccgcatcccgcagcgcctgcagcagacttatacggccagtagtgccatcgcggcgaagcacccttacccaatcattgttggttaaatcatacattcaacactcctttgcttagtgtcagtcccttcatggacacctatcaaggctaccttgcctactttggatcaggacaaccagaagttcgggcattccctgatgcgagcctgcctttctcataatggctttagaagcgctaccggagagcatgaacctgttgcgacgaacaggtggattccctgtagaatgactcgccgagaaggtggataataggtattggcgagaactcaagatgcttctcgactccaaggcagcgtactgaacattctcgtcagttatgctgctgggcatttcttgcctgtgacggtacaagaattttttattccacatagctgatccaccataaatcccaataatggcctgaaggaaatattggcaagaacaattttctctacctggtctcggtcattattgaaggaagctccagaatgcagagcgttatgacgaaagtggttgcgcgattggccagttagcacaaaccgcccttgacaaaatcagcttgccccctatcatggccctaagcctacagaccctacatagaatgccctccaaagcgtgggaacaccgcccggtgattcccacgtttttctttttggctacgagcttcatgaccgccccaacaaatccttgcctgaatacggctgtccctctaatttttccgcttcaggcgacacctgatgcctggccgcaaccgaaaaccccgtaaacgcggtctcaggggccatgacggcaaatcggatggataccatgtaacgggtaagaacgatgggattccccgctttttttactgtgccataaaccgctatggactggatcccagcagagggaggtggacggcttctgtggcaatcggcgtaaggttgtccgagtggtgatggcgcaatgcgataactagcaacagggcgacagataatgccctgatcactatcctcgggctcgtgggcttgcaatgcttccattccatggggccagcctctgtcgcttccatcggcatcttggttgatgtagtttaaataatggccttctcggaaaaaattgtagttgcggatcttaaacttgggcgtataatcggcacacacctcagcataagcccgaaccgcctccattagttggtcctttgtgcatgctcgctcctggcctatctcggcgggacaggccaaagccgctatgatagctccgaggggcagatacacattggcgttgccgttgagcagctcggcgtagagatttgatatctcaagggcctcgctgaataccctttccaactcctccgtgaaagattgtgaatacattaagacctttgcgtaataccaaagtgtccagctttccaggatctactttgtagttatccacaatttttccagaatttcccaacatgaaccctgaaa

SEQ ID NO: 719 - DNA, 7679 bp, Artificial Sequence
  Synthetic Oligonucleotide
agagatttttccaagccgatcccagttccaggatcagagccattaccgaccttattcatgagataccaacagctcacaacctatgccatttcaatcatgtcaccgactatatcgatgggctctgcgaagcttgctgcatcaagggactgctgagattacctgtctttaccactgtcggtggcagagggataggcgcgggaatcaacaacactcctccattttacctgctctggcatgcaaatgacctcgctggcatgctggttcaaaattggcaaccctgggataatatggggattccggcatggttgggttcttttcaaaaagaaagcaggaaagtgggcttacttgccggaatgacctggctgccgcgcaaggtgcatctgcatgatcctgtctcaggtcaggcagcatgttgttcctgcggcttaccctccaaagctctcgtctattcctgcagcataaaacctgaaccagtgccggaaggccttaaatggaaagaccctcatggtgtttacaccgatcagggaaaaagtctccagtccaaaatcaaactgatgtccaatgatagatacactttcgcggaccgggattggtatagcccgttgttcagctatttgcacgcggaaggaaactccagacaaggaaaactatggttggttggatttgccagcgataaagcaaaaagcatagacatctgggacaagatcatcgagcttgagggaactgatacaaatgatgagctactggctcaattggcaaacagggctactgcccttaatgccatgcgcaagaagcctctcagaggtgatttcaaaaagtcagtgggcactccccagattgctgacattatcccccacgccgaaagcagaattgccatcaatgcgggtaaaatgactgagaacaggggctattcctggcaggatgccgatactgaatacggagaactgctcaccaaggttgcatgctctttggagccggctcaaacagtggacgccaggctcaagagaggtaaattcatttcccgcaagccctggccagttataccagaatccaaaacaaaacccgcagaggaggaccagaatgaatagaggaaccgttgacttcattgcaagcctggagaacctcaaagaaggcgatttgggcattcttagaaaactcaggggagcccggcttgatgaaaagcttcccggatttgacctgttttccgccctatggtggcctttgcggcaaaagaatcaacgcgctcccaagcgtgaagtggcttggttgatcgccaaactttttgctgaattccgctttgaacagcgcgagggagccacattgcccattcttatgggaggcatctgccggaagttggaacccaaaaaggaattaccccgggtattggcacgctttgatcaactcgcatcgcttgacattatgcagatggaagagccgctgtcggtcatcatgggtattttgcgcaagcaccagcaggtctgcctggactgggtagggcttactgatgttctgtcattttgggagcaggaacctgtcaaaagagaatggtcggattcatttattaaagcatacaagatcaacaaggaggattcagatgttgattgaaattcatatgattcagaatcacagcccggcaaatcttaaccgggacgacttgggcgcccccaagacctgttatttcggtggagtattacgttctcgcatctccagccagtgcatcaagcgcagcatccgttttgccccggaattcgcggaccttagaggaggtatccgaacaaggcgtctggcagagaaactcgaggaaatgctggaaaacaaagataagaagctggttgccaagtttcttgaagcctgcggaatcaaaaccaaatcttccaagaaagctgcaaaaaagtccgaaaagatacccgcggaagccgatgaagatcaggatgagcagcaggcggctgatacatctgacatgctggtttttaccacttatgatgccctgcgccaaatggcagagctgctttccgactccaaactaagtgaaagcgaaaaactgctgcagttcaaagatttgctcacaaactgcgtccattctccggatatagcactttgcggcaggatgttggagaccaaagagcttaaaaacactggcgttgaaggcgccctacaggttgcacatgcgatctccacccacattgccagacctgagatagactattttgtggcggccgatgatgttcccggtgaagacgccggagcgggtcatattggcgaatccatgtttgcctcagcctgtttctacaaatacttctccattgattgggaacagttggtcaagaacctgaaaggggacacgaatctggcagcccacaccgtgggtgcctttctcctcgccgcagccaaaaccaaccccagtggcaaacagaacagcttcgccgctcataactatcccgatggcatccttgttgagttcaagaattcccctattagctacgccaacgcattcgtcaggccagtttccgtggtcaaggaatcggacctggtggaacaaagcatcggccagctttccaactacgtgaacgacatcaggcttggctattatgatgagcaatccccagttatcagcttctggttttctccaaacaatcgctattcccttggcaatgagcattccaaactggcttccagaaacattggcaacctcaatgagcttgtaggcgctgtgttggattatattggcggcttcaagtgggaagaagttcagaaaagcaaggcttatgttggcggctgacatgagtgcgccacccaacaccttattcttgcgcttggagggggctttgcagtcttggggcagcaacgaggctaagtttgctttgcgcaggactaccgacgctcccacaaaatcaggtgtcctggggctgctttgcgcggccatgggaattgggcgcgcggaggctgctgattcatggctcccaaaactcgccaacctgcgcatgggcgtgcggatagaccgccccggcatacgctggtgggacttccatactgttggagcgggacaaagaatgcgcatggcagagctgaaggcacccaaaaaaccttccatggctggagctgccctggctgaaaccctgacaccaagcaaagtaaaaaccagggcagagaccttgctctcacgccgcgaatatcttgccgacgccagttttctggtcgccttgcagggtgagccggaacttgtggaaaagctctccgccgctctggccaagccggtctgggcaatttatctggggcgcaaatcctgtcccccttcacgtcccgtgggcgagcatgctccgggcttttataacactttggaggaggcgctgtccgcggttcccctgcaaaagcgctggcacaatgaacccctgccgcaaatactgccttgcgtcatggactggatccccagccaggacggagaacatgcgcctgatgacgcggagattcattacgatctgccggtttcttttcagccgccccgccatttgccgcgcttcgtgatcaggcgtgagctggttgtgggagaggatgtgcaagtgagcagggaaaccggaaccagcgtttggaggcccaaaggaacccgggcggattataacaattccgagtataagaaggtcagggcggagcggcttgtgatggaccatgccgcgtgcatggtatgcaaagctcccgccacgactgttcaacacgtgaattaccgcagggcgggaggcaaggaaataccggaagacctgcgggcgctgtgccgcctctgccacgacgcctgcaccatgctggaatacggttccggcatgaccaccgaccgcatcgacccctgcgaccccatctggcgggagcgaatactggcaaagcgcaaagatatagtcgagttccgttcgcgcgggcagcgtttccgcaaaatgaagccagaggaggaaaacggatgatctacttgtccaagctattgatcgatactggaggcaatccagaccgtccccgccccggcagaaagtggctggacaatatctataacgtccaccgccgcctttccatggcgttcccttcaggtttgcgccgggagcaggatccgcatttcctgaagcccttttcgccaaacgacttccaaaaaactcccttccttttccgggtcgataacaacatcgacggaaacgataaaagggcgattattatcgtccagtccgttcttgagccggattgggattattgcttccaaaacgcgcttgatttcctggcagcgccaccggaaacaaaggagtataatccagagtttcaagcgggacaactgctccggttcaggctgcgggtaaacgccagcgtacgccgtcatattcctgagaaggtgcaacaggacggtcaaaccatagaaactggcaacatcctgcacaaaagggtttctctcacctgggatccctcttccaccccggatcaggcccttgccgactggctggctgccaaaagcccaaagctgggcttcacccttcagcgctgtgagcttcttcaactgggttgggtttatggctccaagcctgaacctaaaaatgtcaaagcaaaggaacagggacagggctactggcgtgaacacacatacaatcctctgcgcttccgttcggctctactggagggaattctcaaagtggatgacccgaaactgtttctggaaacgcttagcagcggcattggaaaagcgaaaagcttcggctttggcctgctgtccgttctgccaatcaggaatgatgaataaagacctgcactctatcccccggatcagagatcggcttagctatctctatgtggagcatgccaaaattgatcagaacgggcaagccatcgccattcacgatgccctgggagaaaccccggttccttgtgccggcttggctatgctgatgctgggaccgggcataaccatcacccatgcggcaatactttcactggctgcctgtggctgtctggtagcctgggtgggggaacatggcgtcaggttctatgccgcaggcacaggtacaacccgtagcgccgtcaatcttatgaaacaggcaaagtactgggcagacccggttttgcatttacgggttgtgcgctccatgtatcagttgaggttccaggatgagctttctcctgatttaactttgaaccagatcaggggcaaggaaggtgcccgggtgcgcgatacatatttccaactctcccaaaagtatggtgtgcccatgcagggcagaaactatcaaagagacaactggaataaagcggatcccataaaccgggcattatctgtggcaaactcctgcctctacggcatatcgcacgctgccattgttgctgcaggattctctcccggattgggctttgtccacactggcaagcaactgtcatttgtctatgatatcgcggatctatacaaaatggaaatggctgctcccgccgcattccgggcgaccgctgaagggatcggcgaactcgaccgcagagtcaggcttgcctgccgtgatgaattccacaggcagaatctactcaaacgcattgtcgcggatattagttctctcttcggtgatattatgccagaggatagcctggatgactgttttgccgaagaaccagcattgcctggaggactctggtctccagatggagaagtttccccaggcggcatatcttacgggcaggatgatctgccaaaggaagattgatggtggttttagtattggaaaatgtgccaagctccctgaggggtaagatcacacgttggctgctggaagtaaaagccggggtgtttgtgggtaaagtctcagcaatggttagagataaactgtgggataaggttagaagcaattgcagcggtggaacttgcctgatgatctggagtagtcagaccgagcaagggtttgatatcgaattctggggtgccgcatcaagagtcgttacggaatgggagggtatcaaacttatgaccaagcatccttaaactaaggcttgaaggagttcaatgacctcttagacctctattgatcaagtgtattccccatgcatgtgggggtgaaccggatacacacgcatcggttgcataggctgtccggtattccccatgcatgtgggggtgaaccggatcacgtcaccaagatctggcttcggcacaggtattccccatgcatgtgggggtgaaccgcttatccgaatgctacaagctgcacgtgacctgtattccccatgcatgtgggggtgaaccgagacccttcaacctatcgcaaaagaattcaatgtattccccatgcatgtgggggtgaaccgactacaaaacgaggtgatcatatgagtgtcaagtattccccatgcatgtgggggtgaaccgcatctgttttgccttctgcattgccttgtatcgtattccccatgcatgtgggggtgaaccgaacgcccgccagccggcggcactgctggctatgtattccccatgcatgtgggggtgaaccgacgaatcccgtctatgccgcccaggccaacgcgtattccccatgcatgtgggggtgaaccgaaaccaggaattaacgtagtgccaggcaagacgtattccccatgcatgtgggggtgaaccgactttgacaaagccatccaggtaggtgatgccgtattccccatgcatgtgggggtgaaccgccgacgaaatagcgatgaagggactggtaacgtattccccatgcatgtgggggtgaaccggcggcggcggctttgtcggtatcctggtagaggtattccccatgcatgtgggggtgaaccgaggacgtagcgaggcggcttggtgacctgatggtattccccatgcatgtgggggtgaaccgcgcggagctttccttgttgtcaccggaaagaggtattccccatgcatgtgggggtgaaccgaattatcggaaataacaaagagtcttcaaggggtattccccatgcatgtgggggtgaaccgtcaacgaaaccagcaacctgctgatcgttggggtattccccatgcatgtgggggtgaaccgaggacgtagcgaggcggcttggtgacctgatggtattccccatgcatgtgggggtgaaccgcctgaatctatcaccctactgagacaggcaatgtattccccatgcatgtgggggtgaaccgatcgtccagattctcacgatcatcctggacatgtattccccatgcatgtgggggtgaaccgttataaagggcagtccagtgagcaatagcaaggtattccccatgcatgtgggggtgaaccgatggcaacaattagcaggaattaaacaagaaggtattccccatgcatgtgggggtgaaccgttccggatgcagtcatccgctgtcgatgtggagtattccccatgcatgtgggggtgaaccgttcatagcgccgcttttcagcctggctacggcgtattccccatgcatgtgggggtgaaccgacgcggcataaccgcatgggcagcgcgtattggtattccccacgcatgtgggggtgaaccgatcgacgccggcatcatcgaggatctgatcctgtattccccacgcatgtgggggtgttgcgatttcctcgcgcgcgggcgactctcatttgcatctggcgctcagaccttggtcttcctggggtcaaccttaacctttatatggatgacctaag

SEQ ID NO: 720 - DNA, 7667 bp, Artificial Sequence
  Synthetic Oligonucleotide
catatagtagatgcaagaatcgttccgaatctgccacaataactgcggattcctttcccaaagcctttttcgcccacggacaggccgtttgccccttcccactaacatcccgtaaacctccccttaaattcccgcccggccaatgggaactcagcgggaagtattttagatgtgtatgggatggggcaaatggggcttctattgatagtgggtatcaaaatgggaggaagtccacaaattgcgcgaattcatacgaattgcttttccagttacgctaccaactgtggtagataacctaaaataaaggacttacttcccaatcgggcaagtaatccatatgtttggagcccgaaggtcccagaacgattggccgacggggacatcgaccttcctgacgctggcgtcgagcgaggcacgagcatggacgccagcaacatctcctgtagtccatactcgcaagctcgctgcactccaggctcaccaacgttggaaggcaaattcacaaattcacaaccggtaaatatggcttgtgaatttgcaacctgctgatagacgggtaattatgaggctaattcacaaaaaaggggtctcttatacatccgcggaagccgattgtaaacaggatatgatgtatccacgctaccagtctataatacatatagaaatagtatatataatatataatagtattatatattattatatattgatattatatcatctctaccttcccttcatctcttgtttgcggcatgagccactgcaaaccggcattctcccctggtccggctggatataagagataagcgtattttgtgaatttgtcccccaactcactgtgccacaataacacacggattcacaagccatatttaccggttgtgaatttgtgaatctgaccttgccggccttaaggaagtttgaaattagagccctattttggacttgacaaattattccttggtaaatttggtgtataatagctatggggcataatgatgttagcctgtggaacggcctctgtaaaggatcaacaagctatcaaccctccccatgcgacaggagcttcaatgtattataatttgacagacaaaccctggatcagtgtgctacagcttgacgggcattctgccaggctcggcctggctgaggtcctgcgaaaagcacacacactgcgtttggcttacggcaatccgatggaccgcatgtccgttttccgtttcctcctcgccctgggctattggtgttttgccaatacaaaacaagcgccggtatcagataagccactgcctcaggcatggacggactggcttgaacaaaaccaagaatatttcgaattgttcggtgatggccccagattctaccaatccccaggaacatccagaatacgccccagcacggaccttatccacgagcttcccacggcaaacaatttctggcacttccgccatgtgaccgatttcatcgatggcatttgcccagcttgctgcgttaccggtctgctgcgcctgccactctttaccaccgtaggcggcagcggaatcggagccggcatcaacagaactcctcccttctatgccatctggcagggtgatagtctgtcggaatcgatattcctgaattgggaacccacttcccggttgggtgttcctgcctggctgaacccgtttggatcccaaaacgagaaggatgtagccttgctgactggcctcacctggctgccccgcaaggtattcctgcttggcccggtgtcagacggagcaaaatgcagcgcctgcggagaagagcatgagcctctggtctatgcctgcaacaatgaggcggtgaaagtgcctccgaaccttgtctggaacgaccctcacgcgatttaccgggatgacaataatggcctgactgcccaggtggctctgatgtccggggacaaatacactttcgctaacagggattggcataaacccctggtcggcttcttacgggcgaaaggcatgtctcggaccgccacgctgtttttagtgggcttcacaagcgttcaagccaaatgtgtggacgtttgggaaaagaccattgccctatccggaaaaacaagctccgaggaactgctggaccagatatccgaaagagcctactccctgcacaggatgaggaaacaagaccgccggggcgattacaaggaatccgtgggaatcaccgccgtggcggacatcatcccgcacgtagagcatcgggttgacgtccattcgggcgagatggtggaaaacagcggcaatgtctggcaggaagcggatgaagattacggattcttcatgaagcgttttgccgtttctctagtgccggaaattacggttgccgccaagcttgaacgagaacaactggctcggcgcaagccctggcccctaaaaccaaaatcaattaaaaaaccttcatccggaggcgataatgaatgagagcaccgtgaaatttgttcggagcctgggcgaactcaaagagggcgacctgggcttgctcagaaagctcaggggtcgccgtctggatgaatccctgccgggtttcgacctgttttccggcctgtggtggccactccgcagtataagccccaaaacccccaggcggaaggtggtctggctagtcaccaagcttttcgcggaattccgctttgagcaaaagaaaggcgccagcctgccttggctcatgggcagaatatgccgtggacttaaagaagaaaaagagttcccacgtgttttagccaggttcgaccgcttgctcacgctcgagttgaaccaactggaggaaccgctggcgcaagtgctcgcgattttaaaaagacatgacattgccagtctggactgggttgccctcatcgatgacctctccgcttgggaacgggaatcaaacagagcgatatggtcagacacatttatttcagcatttaataatcagcaaggaggaatcaaatgttgattgaaatacacatgatccaaaaccacagcccggccaacctgaaccgggacgacctgggcgcgcccaagacctgttatttcggtggggtgttgcggtcccgcatctccagccagtgcctaaagcggagcatcaggatgagcgatgaattcaaaaacttgctcgggggtatccgtacccgtcggttggccgagttgattacaaaagctacaggacaggactgcaggaatcaggcagaggaagttctgaacaaagccggtttgaaacacgaaaacggacatagtaagatgctggtgttcatgacccggaacaagatcgatgcccttgctcaaattgtcaccagcgaaggcctgagtgttgcagagaaagccaagaaagcggcagatgtaatatcgggggcaatacattcccctgacatcgctctgtgcggaagaatgctcgagcccgataccaaggacaagaacacagacaaggtcaagtgggaaaataccactgttgaagcagccctgcaggtgtcgcacgccatttcaacccacatcgcccgcccagaaatagattactatgtagcagctgatgacgagcctggcgacgacacaggtgctggattcatagacgaggcgatgtttgcttcggcctgtttctacaaatattactcaattgattggaataccttgataatcaacctccagggtaatgaaaagttggcagctcatactgtcggagcctttatccaggccgctgcactcactaatcccagcggaaagcagaacagctttgccgcacataaccttcccgatggaatattggtagaaataaaagagacacctgtcagctatgcaaatgcctttgtgcgaccggtgggaatcgttaaggattctgacttggtagaacaaagcattggccaactggccaactatgtgaaggatataagtgccggtttcttccctggacagatgaaaggcaacgctctgtggttctcgcccaatggacgttatcccctaaagcctcaacagggcacgctggacataaagccagtttgcaacctgctagaacttgttcgcgaagcagttgagatgttgggttttgaatgggatgatgtaaaaaacgagaaagtagagagttgaaatgtcttctccgcctaataccctgttcctgagattggaggctccccttcaggcctggggaagcaatgaggccaaattcgccgtgcgcaggacagccgacgcgcccaccaaatccggagtggcaggcctgctctgcgctgccctgggaatcagccgggccgaagccggacagtattggctgggtgaaattgccaaattgcgcatgggggtgcggatagaccgcccgggcatccgctggtgggattaccatactgtgggagcggagcagaagctgcgcatttctgacctgaaaatgcccaacggcctagttctggttggcactgccctggccaaaaacctgggcgcggacaagatcaaatccaaacccggggctttgctctcccgacgcgagtatttggctgatgccagcttcctggttgcgctccagggtgaaccggatatcgtggcacaactggctgaagcgctgaaaaaaccagtctggacgctttatctggggcgaaaatcctgtcccccctcccgtccggtggatgaacacccgccagggttttatgccagtctgaaagaggctttgcggtcgatcccggcgcaactgagggaaaaaggcgaaccgatacctgacagtgttccctgtgtgctcgactgggttccggcccatgatgacgtgcacgctccgccgaacgccgaagcgcattacgacgtgccggtgtcctttgagcctccccaccacttgccccggctggtgatccgctgtaacctgccattggaccgcaacttcgaggcagagaccgtgctttccggcaaagcctggcaaccgccccgcaaccgggcaaattacgacaatcctgaatacaaaagggtccgcgctgagcgtttggtgatggacaatgccgcctgcatgttctgcaaggcacccgccactactgtgcagcacgtgaattaccgacgcgccggaggcagcgagaagccggaggacttgcgcgccctctgccgcctctgccacgatgcctgcaccatgctggaatatggcagcggcatgaccatggaccgcatagatccctgtgaccccgcctggcgtgagcgcatcttggccaaacgcgaggaaataatcaaattccgctcgctggagcagcgcaggcgcaaactcgatccgaaggaggagaacggatgatgtatctatcccaactgctcatcgacacaggcggcaaccctgaccggccaaggcccgggcgcttgtggctgaacaatatctataatgtccaccggcggctcagcatggctttccccatgcgcaagcgcaaggaaggagacccgaggtttctgcagccctttgaccccgcagattttgaaaagcgccagttcctctttcgggtggacaacaacaccgatggagaaaatcaaagggcgatggttttggtgcagtcgtccctgccgccggattgggactgggctttccagaatgccacgggatttttggcagcccctccccaggttaaggaatacgatccccagttctcagcaggtcagcggctgcgcttccgcatcctcgtgaatgccagtgtcaaacgcaaaatcgacgagttgcgggaaggacccggaggaaaggaaaaaacgggaagggttctgcacaaacgggtcgcccttacctgggacacaaattccaacccaaaggatgcggtggcgcaatggtttgccgccaaggctggcagactgggcttcacgcccggggagaccgaactggtaagcctgggctgggtatacggttccaaaccggagccccggggaaattcgccccggcgtgagaacgaataccgtcccctgagataccgttccgccctgctggaaggttatctgacagtggatgatgcctttctgttccgggaagccttggaaaaaggtatcggcagcgccaaaggaatgggcttcggcctcctttccgtggttccggcaagtgatgcgtaacagagaccttcacctaatgccaaaaatgcgggaccgcttcacctatctctatgtggagcatgccaaaatagacaaagaacaacaggcaatcgcctttcacgatgccatgggctccactcctgttccctgcgctggactggccctgctgatgctggggccaggcgtatccatcacccatgcggccatccttgttttagcagaatgcggctgtttggtggcttgggtgggggaacagggagtccgcttttactcatccgggacagggaccacccgtagttccgccaaccttatgcgtcaggctgccgcctggtcaaatcgagatacgcatctgcggatagttcgcagaatgtatgaattgaggttcaaggaaaaactggacccaaccctctctcttgaacagataaggggaaaagagggagcgagagtacgggatacctatttcagactttcaaaagaattcgatgtgcccatgagtgcgaggaattacgacaggagcaactggaataaaaccgaccccatcaacagagccctgtccgttgccaattcctgtctctatggcatctgccacgccgcgatagtggccgctggctattcacctgccctgggtttcgttcatactggcaaacaactgtcatttgtttatgacattgccgatctttataaaatggaaacctccgtgcccgcggctttcatagccacagccgcaggggtcgataacctggacagaaggacacgcattgcctgccgtgaccagttctatcaatttggtctgctaaagaagatagtggccgacattcacgcccttttcggtattctggaaacttcggacgatgagccagaccttgctgatgtcgatccagccgtgccaggcgggctttggaacccagatgataaagtgagccccggcggcttgtcatggggtctggatgatcctggaggccatgatgatggttctggtgcttgaaaaagttccctctggcctgagaggagaaattacacgctggctcctcgaaatcaaggctggagtatttgtcggtcaggtatcggccatgataagggaaaagctgtgggacaaggccaggtctggttgtgccggtggaacttgtatcatgatttacagcaagcattgcgaacaaggctttggaattgagttttggggtgccgcggaaaggatagtgacagaatgggaaggattgaaattgatgaccaagcatccgtgatccatacttgaagcctgttcaatggcctcaaagcgtctactttcgaagtgtgttccccacctgcgtgggggtgaaccggtgcgccaactgctttacgagacagcaagggcgtgttccccacctgcgtgggggtgaaccggccctgtcctggtgatcgtaaacgcctgggtggtgttccccacctgcgtgggggtgaaccgcggaggcacaattcagagaactgttctcgctcgtgttccccacctgcgtgggggtgaaccgtgatagcctatcccgctccatccccttgcacggtgttccccacctgcgtgggggtgaaccggtattcttgcccatcatggaaatgccgtgtccgtgttccccacctgcgtgggggtgaaccggtagctcaactacaagcggcgagccg

SEQ ID NO: 721 - DNA, 7623 bp, Artificial Sequence
  Synthetic Oligonucleotide
atgtcgcgcattgtggaaggcgtaatcccagtccggctcgacggccgactggacgataatcatcaccctgccggcatgtttcgggtcgatgcggaaaagaaagccctgctgctcgctgcgctccaaatgaatttcgtcaagcacggccttgtcaatggcagcggccagctttgctgtagggttttgttcctctggcaagggcgtatctgaaacgttgttcttattctcaagctccttgtaccgcttcccattgcgctccagccggtcggcaagatggcgctgcaagggaaagtattgcggttgatatggggctaggaactgagggtcgttatgtttgtgttccgctacgggaaaggccatgcaaagccgctggtgaacgcggtagaggttgcgcagccagaggcgccccggtcgcggacggtcgggattggttcctacgtcgatcattaaacaagagagatacatggctattcgacctcctcgggactgagccggcggcggcgggtttctagtgaacgggagcggacgatttcatcgcgcttggcgataatgcggtcgcgccattgcgggtcttggggattgatgcgatccagccccatgcccaggccgtattcgatcatcgtcacggcgtcgtggcagaggcggcaaagggaacgtaggtcgttcggttcttccttgccgccggcccggcggtaggtaacatgctggacggtggttgccggcaacttgcagaagacgcacagcccccaatcggcctgtagccgctcggcgcggcgacgcttgtactccgcattgttgtagtttgcccggggacgcggcggcggcggagtccggttctgcgccggctggtctgccacatgaacctggccgccattgccgacatcgagttgcttctgaattacaaatcgcgggcggtgcgaaggcggctcgaacgtcaagggcacgtcgtaccagacctgcgcatcgagcggcgcttccggctgcgcggcggtcggcgtccagtcgatcaggcaatccaaacactttggtttgggatcgtccttgaaccgcggctgccaagggagcgacgtcaacgccgaagccacatcggaaaatgtcgccggcggatgttcccacagcggccggcagggcgggcaacatttgcggcccaggtagggcgtccagcgtggattcttcactgcctcggccagggtgtcgataagagccggctcaccttgcagagccaccaggaaaccggcgtcggcaaggtattcacggcgggtgataagcgtgccttgcggtcctgtcttcaatttgcccgcggccgtcatcaggccgatgccggcgccaacggtgtgatagtcccaccagcgcgtgccgggtcggtcaatgcggacgcccatttgcagctcggcaagccttggcaaccagatttcggcggcttcggcccgcggaatgcccatcgccgcgcagagcatgccgaatacgccggactttgtcggcgcgggcatggtgcgacgcataacaaacttcgacgtatcgccccaagcctgaaggggaccttccaggcgcaggaaaagggtgttggcgtccatcatttagactcctcattcacgacgacccgttgcacatcttgccagtcgaaaccaatggacttgataacggagacaaccagatcgtctagcgaattgtgcctctgggcgtcgatctcgacttcctctaccttgtcgccctccccaatgacttctttcttaacgtaagtaagtgagtgtcggttattgggcgagaaccaaaaacgtttttcgcgagcgggggcgccaaatcccacgtcaagatcgtgaatgtactgcccaagctgggcgatgctctgcgcgacgatgtcgcggtcgccattcgcggccggtttggcaaaggcattggcgtaactggtcgggctgttcttgatttccaccaggatgccgtcgggcggattgtgtgccgcaaagctgttctgcttgccggtgggagtcgccaaagccgcaccgcgtagaaaagcaccgacggtgtgggcggccaactctttgtggccatctccgaagcctttgaggttctgaaccagcttttcccagtgaatggaaaaatacttgtagaagcaggccgatgcatacatggcctcggctacatatccggccccggcatcctcgccaggaatgtcgtctgcggcaacatagtagtccacatccatgcgggcttcatgggtggaaatggcatgagcgacttgcaatgccgcctcgacggtggtatttaggttgttccagacatccttagcgtccttgtgtggctccaacatgcggcccgataaggccacatctggcgccacagtagaattggcaataatttccgcaactttttttgcgatattcttgttactctccttagagttcttctcactcccattagatttcttcagaatcgtggctatgctttcaatgccctcgcgcgccatatacacaagcatcttgctcctatcctccgattgctcggtggtttgatcatcatcagatttggcattcttggcttccttagacttgaaaccacaaagattaagaatctcctcgacccatttgcgcatggtgtcaccgccgtcaatcttctcggcaattagcctggccaattgcctggtgcgaatgccaccgagcagttttctgaactcctcgctcatgcggatactgcgtttgatgcactggctggagatgcgcgaacgcagcacgccgccaaaatagcaggtcttcggtgcgcccaggtcgtcgcggttcagattggccgggctgtggttctggatcatatggatttcgattaacatggcaaagctccttattgtgaaaggttggtgttgttcagatatacttccgcccagatgtcccgaatgtcacgtttcaggcgatgctcggacccgcggtcccagatggaaagatcatcggtcaacgttacccagtcgaatccggacaggcaaccggagttgacttcctcctgcacaacagatagcccccaacgcaagtgcggttcgattgccgaaagcggcgcacacaacagggcatcgaaccgccggcggtatcgcgggcgaccgtgctcgtcgcgcggctcgcggcggccaagaacggccggcaaccgagcgttttcctgatccacctgtggcaaggggaatttcgcgtagagcttggctacaagccatgccacttcgcgtcgcggggcctttggacttttttgccgcagcggccaccaaaggccggcaaacagatcgaagccgggcactgattcgtccaggccgcgcccggcaagcgtccgcagcctagcccgctcgccggggccgaatagccggtcgttttccagtcgctcgatgaaagagatggtgctcatgaatcggtctcctggcgtgactttctggtagtgcgtttctttttgcccgtggacgccggggcgtcggcggcattggcttgggcttgattttgtattgctcgctcgatggctcggtttagcgccgctttgcccttatgcagtgcctcgcgcctccgcagcggcgagccgacagtggtggtggccataatcgactcgaccatcggttcatagatgccgcgtaagaacagtttgtcatcagtgacgtcggtcgggttgttcagcgccgcgcgaatccgcgcctcggcattcggcgtcagaaagtcgaatgccgagtaaatctcaggatggttgcggtcgggattaaacgagtccattcggagaaaaccgagccgttcgagtttgtccttataggtttctttttttttgcggggggagttggtgccatacaggagcttcgaacattcattcgtaaactgcactcgcttcttcacggtggtatccggcagagtcacagcgaaatcgatggacacggcgtcttgaaacgtgaacttgttgaccacaggaccaatcgctaccaccttgccggcttgttcggaacgcaagcacaaagcttcccgccagaattgtgaagagtgcaatgcaatattcgttttcaagagcggaagtgatattggttcctcgtctttcaacagatgaggatcggaattccagaacttcttcttgctgtcttccggttttgacgttttccagccacctccgttgtacagactcgtaatcagaacacttttacaaccgcagtaggcgcagaggcttttttctattgggtcattgagccacatacttcgtggtcgccatgcaagtctggctatgacgcacggtgatttaggctctttatccgataaccacggaacatcttctgattcaatacctgcttccgttagataactcttgagtgtcagaaaaagattgccaacttgaacaaacgcataggccgcagacccagggttgaccgatgcgggataggacccgttggtcgacgcccagaccgacaaccgcagaattcccattgcacagcacgccgggcataatccataagagccatcatgtatgacatgccgcatgtggttcactgaatccgcgccgggaaactccaccagtaggtccgcgattggccggactttcttgttctccaacgatttgtcctgatagaaccgctttccttctcccagcaagttgaagcaatccttgtggtcgtctagtatctggaaccattccggcgggaaccggccttgaggcatgttgttgggcgggttgcctcggcaccaatagagaatcgccagcaggaatcgcagcaaggcgatgttgtccatcggattgctagccgcgatttggcggataagatgggcgtcttccaacgccttacgaatgcctacgcggcaccaattcccatcggcataaagaaccggaatccagttttctacaacaaggttgaactccgtgaccatgtgaatgccctcggaataaatctgtattacgaaccccccattaggcagtaagttattgtagttgaaaagtaatattgccagaagtatccccgtcccaaaaagttctttatgtacagcggtgagaaaatcttgggatgccacccacatttcgcttgagcttttcgtagacccgaggtaactgtctgtcggctggcatcgcgatggccgcgatgctgaacgaaaacccaagatgaaagggaacgacagatggctaccacgaagaccaccgcgaagaaggccgcaaagccgaacgccgcaaaggcggccaagaaggacgctccgaagcccaaggccaagaaggacgtcccgcaggccaaggatataaaggccaagtcggcaggcggcaagcaagcaaagcggctcagccagattgacaccgcggcgcgcgtgctggccgaggccaaggagccgatgaattgcatggcgatggtcaatgccatgcaggccaagggctattgggccagccccggcggcaagacgccacagcagacgttgtacgcttcgatcctccggcgacatccgtaagggcaaggacgcccgtttcgtgaaggccgctcgcagcacattcgccctgaagaagtaactacctcgcgacaaatcgcacgtcgtcgcacacgacgcccgtaacgcgggcgttttctcgttggcgtttcggccaatccttcccgaccgatgcgacacgggccaaaccacgcgcccatgttggccgcagtccggcttgattgcggggggacgttgtgctttggaatctattcctctgccttgattggccctagagcgtcgtagagggccaatctgggcggaggaaccacgcggccttgcaagtgcggacggctgtcgagacggaagtatttcaccggcgtttcccggccgtcctgcaataacagtcgaatggcctcgaccgtcaacacgccgatctccagggcgcgatccaccgcgcgggccagttccatcaatttgcacgattccaacagtcgcagcaccttgatgaactcgcggcggcccgtgctgcccaactcgccttccaagcgccgtcgcaatacgccaaaaccctccggcggactccattcgtcaaacggcttgccgaagtccaaggcccctggtttccgctccaaaagggccaagtagtgccgcggatcgtagtggacgttctcccggtcccagtcgcgcggatgctcggccaccacctgctcctgcaccacaaaccgcacccgctcgatgccgccgacggccatcaccgcgtgatgggcataggccgtcggcaccgagtagtcgttgcggtcgaaacggaccagcgacagcgaattggcctggcaaggttcgacacgccgcgcctcgaacggcttttcgggcagcggcagcatggcgcgtacgtcctcggccagcagctcggccttcgggcccggcttgccaagtacctggcgatcgagttcccggcggcagtcttccgccaaagctgcgttgaagacctcgaagtcgtcaagttgcggcaccgacaccaagaagttccgccgcccgtagtccacgaggctttccacatgcctcttctcgttggcgtgacggaccaggcagaagtgatgctcgaacagataatggcttcccagccgcaggaactcgcgcgtcaacacgccaccgcgtttccgaatcaccttggccacagcaatcttggtattgtcataggtgatgcgtttcggcacgccgccgaagaactcgaacgctcgacgatggccctcttgaaacgtctcggtgcattcgcgggggaaaatctggcagaatagagcatcgctgtagggcagtgacatcacgaacacggccaccttccgctccacgccgcaatagaccacggtggccgagccgaaatcgacctgggcctcgcccggcggatgccccaagggtatgaagacttccgccgaccgctgcttccaacgacgcacctcctcctgaacgatcgttcggccgccgcgattgccatgctcgctgcggagtcggtcaaggatgcgtctggccgtatgccgctgcttgggcggagctgttttgtcggcttcgagaatctcgtggatgatcgccacgaaagggccgagaatcggcttctctcgtggcttgcgccgacgatagctgggcggttcactgtgcccgagaatcttccgcagcgtgtcccaatgcaacttgtacttctgacacgcccgccgtttcgacaattcgccggtcaatacccggcgacgcacttcactccacagttccatatgcgtgtacactctcgactgcctcgcggaggggtgagacttgtaacggttataccgtcacaagtgttgctcacccatcagcgagtggtttcaagagcgccacgtttttcggccggcacgcccagcccgccccgcgccacacttttcaaccggcgtttacatcgtggggaacccagcgtccgttcagagttccccaatggatttttttgcgcggacgttctcctccatcagttcggcaatgacttcgttcttctgctggagcttggcctccagccgggcgatcttctcttcctgcgccgacgccttgctggcggctcgtttggccgccggatggaaaatggcctccaggttgtccaccacaatcttctgccaggcatagacctggttgggcttgatgccgtactcgtcgcagaggaccgagaggggcactttatcgaccagatacctcttgagaatcgccgccttctggtccgtcccgaaat

SEQ ID NO: 722 - DNA, 7574 bp, Artificial Sequence
  Synthetic Oligonucleotide
caacctttcacacgcgcagcgtgatccgcgcccctccgacccgctccccgctacagccactttcccaccttcccaccttcccacgttcccaccggacagtgaactgttcccgcccggagggcgcacgagcgttgccagggacgcagtccctggtacacgagcaacttctaacttctgttctccgcgccccgccgcggccaccttcccaccttcccacctggtgtgacgaatccgtctcgcatcccttcgcccgcaccgccggcgctccccagtcacccgccgccttgcattgcggactcaatgaggccaagataacacatatcacgtttgaccgggacataaaccggcggagaccccgccgcttggacaaggaacgaagcatgcccttcaatctcctgactgaagcgtggattccagtactgtggatcgacggacaaccggggcgagtcggcattcgcgacgccctcacccgggcgggaatgattcggcagatcgccgcctcgaatccaatggacaacgtggccctgctccgctttttgctggccgtgcttatgtggtgcaaggaggacgcgaagtcttctttggcggcgctggacgacaggggcgccggcataccggagaactggctcgcgaagctggaggaaaacaagcccgcgttcaatctgttgggtgacggtaagcggttctatcaggacgaattgctgaagggcaaggaatgtcggccgatcgccgatctgctcgtagagttccctggagccgattcggtgaatttcatgcgccacgttgtgcacggttcctacggattctgccccgcgtgttgcgccatgggaatcttgcgactctcggcctgggctccggcgaacaaattttatcccgcatcagttaacccgggctctgcggcatacgcgtttattgaagggaagaatctgttccacaccctttgcaggaatcttccagatgcaaattcacgaaccgatcaggctccctggttgggtagcgagcagccaagttcgcctgacgcagtagccaagcttgcctggcggccccgcaagttgtggttgaacatagcagagaacaccggtctttgtgcgtactgtgggcaaaccggaaggttgatcgacagtctatgtattgagaaagggtggcccactcctgtcacgagggggcagcaacttggcaaggatgtcttgtctgaatttcaaacacttcacgctgattacaaggcgaagacgaccgaaaggcgtaaggtggccgacaaggtcgtcaaggccgcgcctgtcatcgttaagtgcaggatggctgcgctcgcgcaagccgattcccatgcggagctagcgcccgaagacaagagcgttgcagcgaagattgcacgggtcatcgaccagttgttccgggcgggcaaccagaaggtcatcaaggaattgaccgggaagcccacgaaggaagagacgcccatgcttggtcagcaggatacgcagctgaagaagttctgggttgaagacccacaccttctcaaagaagccgagcccatcaggctgcctgacctgagccaggatgttggtctgcacgcctcgaagttctggcgagatgccttgcgtctgcgcggcaccaaggcacttgccatcggcatagtcggcgacgggaagtacgtcttccacgacacgccgtctgtccgtttacccggcaccgtcgcgactacgctggcgaagcttacaagcgattgcgctcaaatcctgcgcggcaaaggcacgaaaaaaaagccaaacgaaagcagcgaggccaaactccggcgacgcggtatacttaagacagttacatgcaaccctgaccggcagcaccccgaaattgattcagccgcaaaattgttgacgccgaatggcgaggctctgattcgtgaccggctgagccagctcaatgcgtcggcgggaaatgatccaaacgaagagaaagcattgctacatgaagtatatgcgcccgtggtggaacaggttatcgcttcggtaacacccggctcgccgcttcgccggcgggccgccaagaatggtgcccaagccctgctcaccaaaaagatcaaagaactggtcggaaagcacggtcaaccttcgaacacgagtgcccctgagggcgcactacctgcgagcacgaaacgagggggcacaaatggagaccagacatgagccagaccgcggaatacgtgcgacgactgtcaaacttgcaggagggccagcgctcccagctgcgccgcgtggccggacagccgctcgacgcaacgctgcagggtttcgacctcttcacgggtctctggtggccgttacgcgcaataagtccggccacgccgcgccgcgagccttcgtggcttgtagccaaactcttcagcgccttccacgtgccgcacatgcggccggaatcggccgcaggaccctctttgcctgcggtcttgggccgctgtgaaccgccgcgtcctgcttgcacggacgccgaaccgcttagttccgctgtgccggaccgcgagccgggcaagagccagttcattgcggcgcgcaagcatcgccgtcgcttcgacgcattgctttgctcggctctgtcgtcgctggagccacatttgtgctgggccctgggagaggtgtcccgcgcggtcgcggggcacgtgccgcatgcgaaggatgtcaaggggatcgactgggtgtatctgctcgatgacctctggctctgggacggacagtacaatccccaccacccaccgcagaagaatcggctggacgctcatgaacggctcgtgcattgtggtgaagctcaccgtacaccacaggacttatgggcttgcgagtatctgaatgcggcaaatcatctactcggaaggagaacatgaacatgctcatcgaaattcacatgatccaaaaccacaacccggccaacctcaaccgggacgatctaggcgcaccgaagacctgcatcttcgccggcgtgacccgggcgcgcatctccagccagtgcctcaaacgcagcatccgacgcagtccggagttttcagccgctttggaaaaggacggcggcgtacgtacacggcggctgattgaggcgattgcaaaagaggcggctggcgaaggcaatccaccgaaaaaagaacattgcgaggccattcggaaagtctttgtggatggcggggtcggcctcaaggatgacaacactttcgacatactcttctttcttccccaatccgccatcacgaaaatgggtgccgccgtgcgcgaggcaaacggcgacctgggcaagagatttgccgagatcatgcgcaactccgtgaagacccccgacatagcactttgcgggcgtatgaccgaattcaaggctaagggaccgtttgagggactcaaaggccagttcacggttgaggccgccctctcagccgcccatgccatctcgactcacgccgcgaccaacgaggtggactacttcaccgccgctgatgacgtggccgggcaggatgccggcgcgggccatgtcaaggaggccatgtttaactccgcctgcttctacaaacacttcgtcattgacttcgagcagttggtgaagaacctcgcgaatgatacggatctcgcccgcaagacggtacgatgtttccttgaagcagccgccagggccaacccctccggcaaacagcatgcattcgcggcgttcaatctaccggacggagttctggtcgaggtcaaaaccaattcggcgacgcccatcagttacgccaacgccttcgccgaccccgtgccggaaaaatcggaacgcggtctgatcggcgaaagcgtcgccagacttgggcagtatgcccacgatctcattgaaggctacgggatcgaggccgaccgcttctggttctcgccgaatctgcgccatcgcctgacctggatcgacaagactaagaaagaacacgagcaagaacaatcagtggtaggcccgaacgaattcggcgagttcgatcggttccttcgtacagtcatggacaaggtggaggcaggcgcgacgcctgcggggacggcgaaatgacggaaccgaacacactcttcctccgcctcgagggggctcttcaggcctggggcgatacgtcgaagatggtcatccgccggacgatggaagcacccacgaagtcaggtgtgcttgggttgctctgctgcgctctgggcatctcgcgcgaccgggcacgtcaagaactggcccgtttgcgcatgatccggatgggcgtgcggacggaccgcccgggcatccgttggtgggactaccacacggtgggggcgggaaccggcatgacgaccgcggggggcggactcaaaaccggccctcagggcaccctcatcacgcgccgggagtacctggccgacgccagcttcctcgtggcgctgcaagcggaagatcgtgcgctcgtcgatgagctggcgcacgcgctgcagcaacccaagtggccggtctttctggggcgcaggtgctgtccacccgcgcgcccggtgtatgccggcctggacgagtttcccgacctcgaagccgccctgctatctccgccttggtgcccgcgattcggcgaagatgctccacgcgatgagaataacgccccttgcagaacgattgccttggactgcctgctggaatactcgccacaagctgggcaagccgcaccgcccgacgccgaggtctggtacgacaccccggtctttttcaatccaccggtgcacgaaccacgactagttctgcgcaagcggatcactgttgccgtcggccaagccctgcagcgccgcctgcctgcgccgccgcgcccgcgcgccgactaccagaacaccgaatacaagaagcgccgcgaagcgcgcctcgtagcggatcagggcctctgcgtgttctgcaaaaaccctgccacaacggtgcaacacgttacctatcggcaggccggcgggaacgaaaccccggacgatcttcgctcgctctgccgcctctgccacgacgccgtcacgatgatcgaatatggcctgggcatggggctggaccgcatcgacccgtgcgaggcgcgctggcgtgacgcgatccttcgcacgcgcggcgagattatcgctttccgcagtgaagaaggccgccgccgcgctctacggtccgcgccgacgcaggtccgccgcgacttgctcgaagaggaggcgtcctgatgtacctttccacgctcctcataaacaccggcgacaatcccgaccgcccagactggagcatcacccgccgctggctgcgtaacctctaccgcgtccatcaacgcctgtctatggcatttccatcgcgggcagcatccaattgcgcccctcagcccaatcctgcccgaatgtcgcatgacagcgcggtgccaacaggatctgaggaaacggacgggcgtcaggcaagaaacgccgcgcactctttccttttccgcgtagacttgccggtagactcgaagcgcggcgtccgcaccccggttatactcgtgcagtcgcaccacaaacccgactgggattatgcgttcggcctcacgcccggcaagaccgatgcgcgcggccgtcccatcggcaacgctggctttctgctggcggagccgccgcaggtaaacgagtttcgccttgagcttgacgcggatgcccttctcatctgtcgcccgtcagactgcctgcgcgtgaaatctggcgacctgatacggttcctcctcagggccaaccccacgcgcaaggcccaagacggatcgcccaatggcaaacgccggcgcatcgctccgacgttcgacgaacatgcgcagtggctatcgcgcaaattcgggagcgcagccgatttgctcggcatagacaagtttgtgacctcctgggcgtacggctggcgcacgaaatacgagccgcaacccaatcagcgcatgcaatggtggtcagtgctgttcgaaggcacagccagggtgaagcacccccccgcgctaaaaggattgctcgaatccggaatcggctctgccaaggccttcggtttcggcctgctctctatcaagccgctgccacaggaggcagccgcgatcagccccccgggctaatcgcccgcgacgggctttccgatctctgacaagtagatagcgtcacgtttccgaacatcgaccggttgggcaggagttaacccgtggacgatctgcatcggctcgcgcgcttcgacgaccggctgagctatttgtacgtcgaacatgcacgcatcgaccaatgtgaaaaggccatcgccattcacgaccagagcggtacgacgcccgtgccggtggcaacgctagcgctgctgctgctcggccccggcaccaccctcactcatgccgccatgcgcagcctggcggacaacaattgcctggtagcctgggttggcgagcagggcgtacggatgtacgcacatagcacgggtggtacgcgcagcgcggcagcgctggtccgccaggccgcgctcgtgagcgatccggtgcagcgcctggctgttgtcaggcgcatgtaccgtcggcgctttcccggcacgatcgacccgcacctgacgttgcagcaactccgcgggatggaagggattcgcgttcgggaagcgtacgcggcagcgagtcgcaagactggcgtcgagtggcgcggacggcagtatgaccggcgtaagtgggccggcaccgacgacgtcaacaaagcgctttcgtgtgccaacagttgcctgtacgggatcgttcacgcggcgatcctatcggccggctactcggcagggctgggcttcatccacaccggcaagcagctttcgttcgtatacgacatcagcgacctctacaaaactgagctgacgattcccctggcctttgagatcgtcgcgggcggcggtgggccattggaacgccagacccgtttggcctgtcgcgatcggtttcgggcggcgcgccttctcgaacgcatcctgccggacatcgcatgggtgttgaatactgaggaagacccgcaggctgaggtgcttgacaccgacgccgcccatccgggccgcctgtgggatcccgatttgcccggcggggttgagggaggccagagctatggtcctgatgttgcttgaacgagtgccgacgtcgctgcgcggcgagttgacgcgctggctgctccagccgcacgcaggtgtgttcgtgggcaacgtgtcagccatggtgcgcgagaaactttgggagaagatcttaaacgagaagcgtaccggcgccgttaccatgatctatagcgccgctactgaacaggggtttgctatccgcacgtatgggcaaacgaccaaatggatagaagacttcgagggacttttgcttgtgaaaagccccgccaaaggctaaaaaaccagtgtcgtccccacgcacgtgggggtgaaccgatagcgtgctccccagtgaatttgaaatcgaggtcgtccccacgcacgtgggggtgaaccgatacccggtcgtacggcggacgagatacgggagtcgtccccacgcacgtgggggtgaaccgaatcgaagccgaaggatgctggcaccgatggcgtcgtccccacgcacgtgggggtgaaccgcccgg

SEQ ID NO: 723 - DNA, 7553 bp, Artificial Sequence
  Synthetic Oligonucleotide
gaagacgaagcgggcaagacgccttacctctttactatcggcgaacgcgccgaggctattatcgaggcgttcaaacaacgccaggtctccacacaggaagccctcaagcagttggaggagctaatcaaggaaatcaacgaagccgagcgggaacaggcggagcgcggcatttcgggagaagcctttgctaccctctggattcttaagcagggtgctgcctcaattgatatggcggaaaacgtggccaaacaaatggtgggaatattgaaagaatatcctcactggcataccagcgatgagcaggcccgccagataaggcgccgcctttatgccttacttgaaaaagccaacatcaaggatgttcccgaaacagttgagaaaataatgtcggttattaagcgtaggtaagtatgcaagcatcagatactttggaacagataattccgggacaggtcttcaagacggaagtcctgacctgggcaaagcgcatcggcgttgaaccgaaagaaatccgcgtccgcccgatgaaaagcaagtgggcaagctgctctagcaatggccggttgaccttcaactcagagattctccagcaaccggctagctttcgcagagaagccattattcacgagctgctgcacctgaaagtacccaatcacgggaaactgttcaagaatctgatgaaggcatttctggctcatggcgaattatcaagagttgctgataaagggttctagcatgacctctttaatgaggaagggcaggcagtcgttcatattctggtattggacagtggggtgacaatgagccaaggaggctaggactttgagctacaatctgcttgagaaacagtggattcccgtcctctggacggatggcaatgtcacgcgggtagggattaaagaggtactaacgcaagcggagcgtatccgacaaattgcggccagcaacccgatggaccgcatggcggttttccggtttctgcttgccttgctttactggtgccgaggtaatccaccggctatgacagacaccacctccgaagaatccttcccaattgattggttttccaaactcgatgcccatagagagtgtttcaatttgcttggcggtggtaagagattctatcaatacagggaacagggcgacaaactgctcacagtaaactacctcattcacgagataccatcaggcactaactttaaccactttcggcactcaatagacggaaccaaaggcttgtgtccggcatgctgtgctttgggactggtgcggctaccgatgttctccacacaaggtggacaaggcaagtcgcccggcatcaacgcaaagccgccaatctatgttatccctgtgggtaagacccttgcggagaccttgcggctttcgtggcggcaggtgtctaatttgggaacgccggcgtgggaaaagccggacgtgccacttcctaggacgggagaggtgccgttactaactgggctaacgtggctcccacgccgagtttggttaggcgaaccgcaggaatctttgactcactgcatttcatgcggtcgcccggacaatgtgatactgtccagcgtctttgctggcaaagggagtgccaagacagatgatggcactaagcgcgtctggcatgacccgcacgttatctacgaacaaagcaaaaacggagaaatttcactgcattcggtcgatgtggtgggaagcgctgatgctggtgccgggcagtgggctagaacaatggctgggttactccggaatccccgagctgagcggagcagagcgtgggtggtcggtttttcgtcagaccagaataaatacttcgaggcatcggaattgtttctcccttggccagtctcacccgcttctattgagaatctaagccaatggcaacagtcaaactataatctaagccgaatgctgaggcagcttgacgaaaaaccatctcgaaaccatgttgagataactacggagctcgccgccattcgcccccacgttgagagcagggtcgctgcaaaagctgaagagttactgtttgggggaaatgcaaaatgggaacacgcagccggtgcgtaccgacccatgatgcagatgattgccaggtcattggcgcccagcgttaccacggcagcagtcaaacggcgcagagaaatcggcaatgtgctccctcaaatgggactgacgccaacggcagcaaagaaaccagcaaggggaaagcgagggagaaagtgagtccaacagctactgagcaatacattgaaatcctgacgcggttgaagactggcgacctcggcttattgcgaacacatgcagggcaaggtctggatgaatccgtccatggctttgacctgtttgccggcctgtggtggccgttgcagaacaagagccagtttgcaccccggcgggaggtggcatggctggttgccaagctttatgccttttcgcccattccacattctgccggtgacacgctggcttgccagttgcgccgctgccaaccagacgaagagcgcagccgaaagcgatttcaacagaaattcgatgaaatgctgcttttgccactgggtaaaattgagccagcgctgcgatgggcactggaccaggtcgctaacaagggtaaatcacttgattgggtaagcctgacgaatgacctgtccatctgggaacgtgaagcaacccgcctgaagtgggcggaagaatttcttggtgacaaggagggtaatgtcaatgctaattgaaatccacatgattcagaaccatagcccggctaatctgaaccgggatgacctgggtgcgcccaagacctgctacttcggcggcgtactccgctctcgcatctccagccagtgcctcaagcgcagcatccgcatgagcgatgagttcaaagcattacgcggcggctgccgcacacggcagttagcgaaattgattgcaaggggtactaagggagacccatttgatgaaaaagtacaagctgaccccaaagtcgtggaacggtctgagaagattctttccgactgtggtttcaagccaaaaaaggacgcagacaagagcaagatgctggtctataccacgcgtgacgctatcaaggagatggccacacttctacagaatggcggcgcgaaaagcgatggcgaacttgcaagggctttctccaagctaatcgccgaacgcgtccttgcgccagatatggcgctatcagggagaatgttggaaccttcagaggcgaaggacctatggaaaaaccttgacactaccgtggaggcggctttgcaagtggcacatgctttctctacacacgaggctcgtccggaagtagattactacgttgccgcagacgacattcccggtattgatgcgggcgcaggctacgttgatgaagctatatttgcctccgcttgtttctataaatatttttccattcattgggaaactctgctcaaaaatctggccggagatattaatatggccgcacacacagtcggggcatttattcgcggggcggcgctagtcactcccaccggcaagcagaacagcttcgcagcgcacaattacccggatggcatactggtggagattcgtaatacacctataaattacgccaatgcctttgcccgaccggtcgctcagggcgaacgggacattatttcccagagcattgcccagttgggccaatacgtccacgacctggataccggttttggcaaaccacaacaacgcttctggttttctcccaacctccggtatcctttgactgctagaaccaaactaaaggaaggagaaagagaggtcgaaaaggacatcgaccttacggagaataaagttaaatccctggatgaactgataccggtagtggttaaggctatcggctgtgattgggaagaatctaagaaagctatcgtgaatctagcggtgaaagtatgatggctaataccctgtttttacgactcgaaggtccacttcaggcgtggggcgaccacgagtccaagtttgttgttcgtcgcactgcagaagctccaactaaatcaggagttatcgggatgctctgtgctgcactgggtgtatcacgaccagcggcccctgaaacgtggctgccgaagctatctgccctgaaaatgggcgtccgtattgacaatccaggcattcgctggtgggactatcacactgtcggtgcaggtatggagatgcgtattgccgaaagggaaggcaaaaccaagctgggtgcaatgttgactcggcgtgaatatttgtgtgacgccagttttctcgttgcgctgcagggcgacgccaccctagttagagaactagcggcggcgatagagaaccccaaatggacgctttacctgggccgcaaatgctgtcccccgtcgcgtccactgctggagcatcctgccagtaattttcctgatttgctttcggcgcttcggtcggtcccatggcgaaggcggctaagggatgacccagtacccgacaccgttgattgcctgctggactggcagccagcacctgaacagtccgtagcacccgctgatgcactagtgtggtatgatgtcccgcttaccttcgagccaccctcccatgctcctcgctttgttattcggcaaatactacgagttggcgccgaggttagcatcgcagaaaagctggcgcaatacgagactcccaggcctctccgtccgcgtgctgattatcagaacatcgaatatcaaaaggctcgcgccgctcgtttgaaagcggaccacggcctttgtgttttctgcaaagcgcctgccagcactgttcagcacatcacctaccgtcgtgctggcggaggcgagattaatgatgacctgcgctcgctgtgccgcctctgtcatgacgcagttactatgattgaatacggtctgggtatgggattggaccgcattaaccccgaagaccacaaatggcgaggggaaatcattcggaaacgggaggaaatcatccgtttccgctcgctggagactcgccgccgtcgcctcagcccggaggaggtggaatagtcatgtacctgtcataccttcttgtcaatacgggagacaaccctgaccgtccgcgccccggacggctgtggttacgcaacgtttaccgtgttcatcagcgcctttgcatgggcttcccctcggcagaatgtaaggaacatgacccgcttttcttacaaccgtataagcctggccgttttccggaagaccattacatggctgatagaaagaagctagaggtgtctgaagatatcctcaagcaagttcactcccaacgtgataaccagagtggctttctcttccgcatagacccactgcccgcgggccgcgccatgatagtcatacaatcagcgattgaaccagactgggactatgcttttcgaaatgccgaccatcttctagccgcatctccgcaaataaagcaatatgacccgcacttccagaatggagagcttctcacctttcggctgctggctaaccccacccgcaagagggataaggaaaacaggcctgcaggcaggaataactggggcagaagagtccccgtacctcgcaacgaaactgaagcgtggctcaccagtcgtgccgggcggtatgggtttagcgtggaaagcttcgataatgtgcaaacagggtatgtcgcagctttcaagagtaaggaaaaggatggcgatagtcaggttgctgatgaagaaacagaagggaggttgaagcgctttctctacgctcgctacgaaggcaaattgcgggtgaccgctcctgattctatccgtaatgcgattatacaaggcatcggcccggccaaggggttcggtttcggattgctttccttggctccggtaaaggggtgaatttttgcgtactctgtttgaactgccgcgctttcaggaccgctggagctatctttatctggaaatgggacgacttgatgtcggtgataatggattgggttttcatcagggcgattcagtaacgtcggtgccgattgaccaattgagcgtggtgatgcttggaccagggtcaaccattacgcacgccgccgtgaagtcgctgtcccagaataactgcttgttggcatggactggacaggatggcatccgcttctactcagccagcatcggtggtacatacagttccaagcggctcatccggcaggcacggttggccagtgatgaatcaaagcggctggaaatcgcctggcgtatgtataattttcgttttaaggaacccgtaccaaccgttgtcagtctggaaggaatccgcggtatggaaggaatccgggttagacgagcctatgctgatgcttcagccaagtacggcgtggagtggagaggtcggcgttatgaccagaatgattgggccaaaggagacccaataaaccgggcgctctccgcggccaatgcctgcctttatgccgtatgccatgctgcgatattgtctgcaggctactcgccagggctaggctttattcataccggcaagatgctaagcttcgtatatgacatcggcgacctgtacaagacagagacaacaattccggtcgctttcaggattgccgcacaagccccaccggacattgaaagggcggtgcgtatggaatgccgccaggcattccacgactttaaactgatggagcgaatcttacctgatattgcggaggtgctcggtgttagtaatgatattggagaaagtaccgacgagcttgaggggcgcattgtcacgctggcttttggaaccgaggacgggggttttcctggggaatccgagcgcgagggtgagggatgaactctggaagcgggcgctcaaaaagactaaggaaagcgggacggtactgcaggtctggacggacaagaatccgcaaggattttcataccgtcaggcgggcaactactggcgaaaattcgttgactttgaagggttagccctggtaaccgtgggaccgcggcaacctaagttgcaagaggcgctgcgttccgatgaattgtcttagcgagcgtgagtctacgaacgcaggcacaggggcgttgacactagaacggtccggtcacgctcaagcatttttggtgtagctttgattttctagagtcttccccacgcatgtgggggtgaaccggcagctggcaatagctgacgataatagttctcgtcttccccacgcatgtgggggtgaaccgtatagtcaggacaaggcataccagataaaaaagtcttccccacgcatgtgggggtgaaccgcctttaacctcgcccaagtgctttaaaaaggcgtcttccccacgcatgtgggggtgaaccgtattatcggtagtagcttcatctctactcaccgtcttccccacgcatgtgggggtgaaccgcgtggtgctcaatcaaagcggcgcgcaatttagtcttccccacgcatgtgggggtgaaccgccagctttgaccgccttctcgaaatgacaaaaggtcttccccacgcatgtgggggtgaaccgtaacgagacccaagcccgccgtgaaagtaatgcgtcttccccacgcatgtgggggtgaaccgaaatattcttctga

SEQ ID NO: 724 - DNA, 7504 bp, Artificial Sequence
  Synthetic Oligonucleotide
ccccgaaacaaagcacaacagactaaaaaccgtgtcatcccgggctgtcggggtccccgccaaagcgcgaagcggtttggtggggtggcttgacccgggatccagtcttttagaaacaaacgcgtaaggttttaaaaaagcaggcacctttccacctcaaaacacctttccacaaattctccccccatatatataggtgctacgaccccttcatgccaggcgggaagcggatcccagggcaagtatatatatacttgcccgtaattgcgcggccatgggctggctgccctccctttcccctcgcgcgcgggtggctctcatttgcatccagcgttttggcgtgagtcttccttaggtcatccttataatttataaggttgacctaaggatgatggcatcaaatccagtagcagcaaaggagggcggtatgaaggattatgcggaaggttgtggtatttttgtggaaaggtggaaaggtgcccccgaaacaagtccaccaagttatattttgtgtcatcacgggaagtcggggccccctctggggtggcttacccgtgatccagtctttttaaaagaaacatccacaaattacacaaattaacacgaattaaaagaacattaaagagtcaacacacccgactccggaacaaaaccctccagactaaaaaccgtgtcatcacagcctgcgagccgtgatccagtgcccaggtgtggcaaagtccgtttgccacagagaccggaggtctcttccaaacaggcaactccgttgcctctgccgaacggacttcggcaacccttatattacaccaatccgtgtcaatctgcgccctttatccgcgtttatctgcgtgaaccgtggaacccgggatccagtcttttggaatgtttgaacttcgctgaaaacatttttcgctaccaggaatgaaaactggacaacaaacgcagcttgggatatctgacactaagagtgtaattcacacgatcaataagaacatagcgtgctgtgcatacaaaacatattaccgacggacttctgttctgaaatatggacgttttgaacttggtaaacagtccgtatatggactaccagctgggacttgccattaggcatatgcccgaatgtaaagctatattcttatataacgcattgtagacagcacaggttgttctctgctctttccatattacactagtggtcatcatttcaccagtaggggtttttttacgcttttttcccgggagttttcatgtaaagcaccctactggacaaagagatgggagccggaaaacacagcctgaactgggacggcaccgactccaacggcgcccaactggcaagcggagtctatatctaccgcctcagcaccggaaagacgagcgccagccgcaaaatgatattgctgaagtgacggacagccgcccttccaagtccgataattaacttgaaccgccgcgcattacacacggcggttctttccaacaagccaagtatcagcagcgggaaaactgcgctgaaaaagccgctggtggggctccgtaaaatgggagtggaagccgccgcatggaacaccttgaaagtaacaagataccgccccaaattgatctttcctaacccaaaatccgcaaagcaaatttcttgacaatgatctttggcttaaatataaggttcctatcgaacaaaaggagcatgttatgtacaatcttctttgtgataattgggtaaacgtggtctatctttcgggcaaaccagatagaatatctttagttcaaactcttgaagacgcacactgtctgcaactggcatacagcaatcctatggaccggttcgctgttttcagattcctgcttgctcttggctactggtgtttcgccaacaccaacggggagcctgaacctgataagccgcttccgacctcctggatatcctggctggaagaaaacaaggggtatttcgagctttttggggatggacagagatttttccaagccgatcccagttccaggatcagagccattaccgaccttattcatgagataccaacagctcacaacctatgccatttcaatcatgtcaccgactatatcgatgggctctgcgaagcttgctgcatcaagggactgctgagattacctgtctttaccactgtcggtggcagagggataggcgcgggaatcaacaacactcctccattttacctgctctggcatgcaaatgacctcgctggcatgctggttcaaaattggcaaccctgggataatatggggattccggcatggttgggttcttttcaaaaagaaagcaggaaagtgggcttacttgccggaatgacctggctgccgcgcaaggtgcatctgcatgatcctgtctcaggtcaggcagcatgttgttcctgcggcttaccctccaaagctctcgtctattcctgcagcataaaacctgaaccagtgccggaaggccttaaatggaaagaccctcatggtgtttacaccgatcagggaaaaagtctccagtccaaaatcaaactgatgtccaatgatagatacactttcgcggaccgggattggtatagcccgttgttcagctatttgcacgcggaaggaaactccagacaaggaaaactatggttggttggatttgccagcgataaagcaaaaagcatagacatctgggacaagatcatcgagcttgagggaactgatacaaatgatgagctactggctcaattggcaaacagggctactgcccttaatgccatgcgcaagaagcctctcagaggtgatttcaaaaagtcagtgggcactccccagattgctgacattatcccccatgccgaaagcagaattgccctcaatgcgggtaaaatgactgagaacaggggctattcctggcaggatgccgatactgaatacggagaactgctcaccaaggttgcatgctctttggagccggctcaaacagtggacgccaggctcaagagaggtaaattcatttcccgcaagccctggccagttataccagaatccaaaacaaaacccgcagaggaggaccagaatgaatagaggaaccgttgacttcattgcaagcctggagaacctcaaagaaggcgatttgggcattcttagaaaactcaggggagcccggcttgatgaaaagcttcccggatttgacctgttttccgccctatggtggcctttgcggcaaaagaatcaacgcgctcccaagcgtgaagtggcttggttgatcgccaaactttttgctgaattccgctttgaacagcgcgagggagccacattgcccattcttatgggaggcatctgccggaagttggaacccaaaaaggaattaccccgtgtattggcacgctttgatcaactcgcatcgcttgacattatgcagatggaagagccgctgtcggtcattatgggtatcttgcgcaagcaccagcaggtctgcctggactgggtagggcttactgatgttctgtcattttgggagcaggaacctgtcaaaagagaatggtcggattcatttattaaagcatacaagatcaacaaggaggattcagatgttgattgaaattcatatgattcagaatcacagcccggcaaatcttaaccgggacgacttgggcgcccccaagacctgttatttcggtggagtattacgttctcgcatctccagccaatgcatcaagcgcagcatccgttttgccccggaattcgcggaccttagaggaggtatccgaacaaggcgtctggcagagaaacttgaagaaatgctggaaaacaaagataagaagctggttgccaagtttcttgaagcctgcggaatcaaaaccaaatcttccaagaaagctgcaaaaaagtccgaaaagatacccgcggaagccgatgaagatcaggatgagcagcaggcggctgatacatctgacatgctggtttttaccacttatgatgccctgcgccaaatggcagagctgctttccgactccaaactaagtgaaagcgaaaaactgctgcagttcaaagatttgctcacaaactgcgtccattctccggatatagcactttgcggcaggatgttggagaccaaagagcttaaaaacactggcgttgaaggcgccctacaggttgcacatgcgatctccacccacattgccagacctgagatagactattttgtggcggccgatgatgttcccggtgaagacgccggggcgggtcatattggcgaatccatgtttgcctcagcctgtttctacaaatacttctccattgattgggaacagttggtcaagaacctgaaaggggacacgaatctggcagcccacaccgtgggtgcctttctcctcgccgctgccaaaaccaaccccagtggcaaacagaacagcttcgccgctcataactatcccgatggcatccttgttgagttcaagaattcccctattagctacgccaacgcattcgtcaggccagtttccgtggtcaaggaatcggacctggtggaacaaagcatcggccagctttccaactacgtgaacgacatcaggcttggctattatgatgagcaatccccagttatcagcttctggttttctccaaacaatcgctattcccttggcaatgagcattccaaactggcttccagaaacattggcaacctcaatgagcttgtaggcgctgtgttggattatattggcggcttcaagtgggaagaagttcagaaaagcaaggcttatgttggcggctgacatgagtgcgccacccaacaccttattcttgcgcttggagggggctttgcagtcttggggcagcaacgaggctaagtttgctttgcgcaggactaccgacgctcccacaaaatcaggtgtcctggggctgctttgcgcggccatgggaattgggcgcgcggaggctgctgattcatggctcccaaaactcgccaacctgcgcatgggcgtgcggatagaccgccccggcatacgctggtgggacttccatactgttggagcgggacaaagaatgcgcatggcagagctgaaggcacccaaaaaaccttccatggttggagctgccctggctgataccctgacaccaagcaaagtaaaaaccagggcagagaccttgctctcacgccgcgaatatcttgccgacgccagttttctggtcgccttgcagggtgagccggaacttgtggaaaagctctccgccgctctggccaagccggtctgggcaatttatctggggcgcaaatcctgtcccccttcacgtcccgtgggcgagcatgctccgggcttttataacactttggaggaggcgctgtccgcggttcccctgcaaaagcgctggcacaatgaacccctgccgcaaatactgccttgcgtcatggactggattcccggctatgacggagaacatgcgcctgatgacgcggagattcattacgatctgccggtttcttttcagccgccccgccatttgccgcgcttcgtgatcaggcgtgagctggttgtgggagaggatgtgcaagtgagcagggaaaccggaaccagcgtttggaggcccaaaggaacccgggcggattataacaattccgagtataagaaggtcagggcggagcggcttgtgatggaccatgccgcgtgcatggtatgcaaagctcccgccacgactgttcaacacgtgaattaccgcagggcgggaggcaaggaaataccggaagacctgcgggcgctgtgccgcctctgccacgacgcctgcaccatgctggaatacggttccggcatgaccaccgaccgcatcgacccctgcgaccccatctggcgggagcgaatactggcaaagcgcaaagatatagtcgagttccgttcgcgcgggcagcgtttccgcaaaatgaagccagaggaggaaaacggatgatctacttgtccaagctattgatcgatactggaggcaatccagaccgtccccgccccggcagaaagtggctggacaatatctataacgtccaccgccgcctttccatggcgttcccttcaggtttgcgccgggagcaggatccgcatttcctgaagcccttttcgccaaacgacttccaaaaaactcccttccttttccgggtcgataacaacatcgacggaaacgataaaagggcgattattatcgtccagtccgttcttgagccggattgggattattgcttccaaaacgcgcttgatttcctggcagcgccaccggaaacaaaggagtataatccagagtttcaagcgggacaactgctccggttcaggctgcgggtaaacgccagcgtacgccgtcatattcctgagaaggtgcaacaggacggtcaaaccatagaaactggcaacatcctgcacaaaagggtttctctcacctgggatccctcttccaccccggatcaggcccttgccgactggctggctgccaaaagcccaaagctgggcttcacccttcagcgctgtgagcttcttcaactgggttgggtttatggctccaagcctgaacctaaaaatgtcaaagcaaaggaacagggacagggctactggcgtgaacacacatacaatcctctgcgcttccgttcggctctactggagggaattctcaaagtggatgacccgaaactgttcctggaaacgcttagaagcggcattggaaaagcgaaaagcttcggctttggcctgctgtccgttctgccaatcaggaatgatgaataaagacctgcactctattccccggatcagagaccggcttagctatctctatgtggagcatgccaaaattgaccagaacgggcaagccatcgccattcacgacgctctgggtgaaaccccggttccttgtgccggcttggctatgctgatgctgggaccgggcataaccatcacacatgcggcaatactttcactggctgcctgtggctgtctcgtagcctgggtgggagaacatggcgtcaggttctatgccgcaggcacaggtacaacccgcagcgctgtcaatcttatgaagcaggcaaaatactgggcagacccagttttgcatctacgggttgtacgcgccatgtaccagttaaggtttcaggatgagctttctccagatttaactttgaaccagatcaggggcaaggaaggtgcccgggtgcgcgatacatatttccaactctcccaaaagtatggtgtgcccatgcagggcagaaactatcaaagagacaactggaacaaagcagaccccataaaccgggctttatctgtggcaaactcatgcctctacggcatatcacacgctgccatcgtagcggcaggattctctcccggattgggctttgtccacactggcaagcaactgtcgtttgtctatgatatcgcggatctatacaaaatggagatggctgctcccgccgcattccgggcgaccgctgaagggatcggcgaactcgaccgcagagtcaggcttgcctgccgtgatgaattccacaggcagaatctac

SEQ ID NO: 725 - DNA, 7494 bp, Artificial Sequence
  Synthetic Oligonucleotide
acactgcttgtcctgtgcggagctaaggcccagaggcggttcacccccacgcaggtggggaacacaagcgggccgttatacgcccaaaaccgctcttcggttcacccccacgcaggtggggaacacgcatcacggtagggacaagcttggcgaatccgcggttcacccccacgcaggtggggaacacacttcgaaagtagacgctttgaggccattgaacaggcttcaagtatggatcacggatgcttggtcatcaatttcaatccttcccattctgtcactatcctttccgcggcaccccaaaactcaattccaaagccttgttcgcaatgcttgctgtaaatcatgatacaagttccaccggcacaaccagacctggccttgtcccacagcttttcccttatcatggccgatacctgaccgacaaatactccagccttgatttcgaggagccagcgtgtaatttctcctctcaggccagagggaactttttcaagcaccagaaccatcatcatggcctccaggatcatccagaccccatgacaagccgccggggctcactttatcatctgggttccaaagcccgcctggcacggctggatcgacatcagcaaggtctggctcatcgtccgaagtttccagaataccgaaaagggcgtgaatgtcggccactatcttctttagcagaccaaattgatagaactggtcacggcaggcaatgcgtgtccttctgtccaggttatcgacccctgcggctgtggctatgaaagccgcgggcacggaggtttccattttataaagatcggcaatgtcataaacaaatgacagttgtttgccagtatgaacgaaacccagggcaggtgaatagccagcggccactatcgcggcgtggcagatgccatagagacaggaattggcaacggacagggctctgttgatggggtcggttttattccagttgctcctgtcgtaattcctcgcactcatgggcacatcgaattcttttgaaagtctgaaataggtatcccgtactctcgctccctcttttccccttatctgttcaagagagagggttgggtccagtttttccttgaacctcaattcatacattctgcgaactatccgcagatgcgtatctcgatttgaccaggcggcagcctgacgcataaggttggcggaactacgggtggtccctgtcccggatgagtaaaagcggactccctgttcccccacccaagccaccaaacagccgcattctgctaaaacaaggatggccgcatgggtgatggatacgcctggccccagcatcagcagggccagtccagcgcagggaacaggagtggagcccatggcatcgtgaaaggcgattgcctgttgttctttgtctattttggcatgctccacatagagataggtgaagcggtcccgcatttttggcattaggtgaaggtctctgttacgcatcacttgccggaaccacggaaaggaggccgaagcccattcctttggcgctgccgatacctttttccaaggcttcccggaacagaaaggcatcatccactgtcagataaccttccagcagggcggaacggtatctcaggggacggtattcgttctcacgccggggcgaatttccccggggctccggtttggaaccgtatacccagcccaggcttaccagttcggtctccccgggcgtgaagcccagtctgccagccttggcggcaaaccattgcgccaccgcatcctttgggttggaatttgtgtcccaggtaagggcgacccgtttgtgcagaacccttcccgttttttcctttcctccgggtccttcccgcaactcgtcgattttgcgtttgacactggcattcacgaggatgcggaagcgcagccgctgacctgctgagaactggggatcgtattccttaacctggggaggggctgccaaaaatcccgtggcattctggaaagcccagtcccaatccggcggcagggacgactgcaccaaaaccatcgccctttgattttctccatcggtgttgttgtccacccgaaagaggaactggcgcttttcaaaatctgcggggtcaaagggctgcagaaacctcgggtctccttccttgcgcttgcgcatggggaaagccatgctgagccgccggtggacattatagatattgttcagccacaagcgcccgggccttggccggtcagggttgccgcctgtgtcgatgagcagttgggatagatacatcatccgttctcctccttcggatcgagtttgcgcctgcgctgctccagcgagcggaatttgattatttcctcgcgtttggccaagatgcgctcacgccaggcggggtcacagggatctatgcggtccatggtcatgccgctgccatattccagcatggtgcaggcatcgtggcagaggcggcagagggcgcgcaagtcctccggcttctcgctgcctccggcgcgtcggtaattcacgtgctgcacagtagtggcgggtgccttgcagaacatgcaggcggcattgtccatcaccaaacgctcagcgcggacccttttgtattcaggattgtcgtaatttgcccggttgcggggcggttgccaggctttgccggaaagcacggtctctgcctcgaagttgcggtccaatggcaggttacagcggatcaccagccggggcaagtggtggggaggctcaaaggacaccggcacgtcgtaatgcgcttcggcgttcggcggagcgtgcacgtcatcatgggccggaacccagtcgagcacacagggaacactgtcaggtatcggttcgcctttttccctcagttgcgccgggatcgaccgcaaagcctctttcagactggcataaaaccctggcgggtgttcatccaccggacgggaggggggacaggattttcgccccagataaagcgtccagactggttttttcagcgcttcagccagttgtgccacgatatccggttcaccctggagcgcaaccaggaagctggcatcagccaaatactcgcgtcgggagagcaaagccccgggtttggatttgatcttgtccgcgcccaggtttttggccagggcagtgccaaccagaactaggccgttgggcattttcaggtcagaaatgcgcagcttctgctccgctcccacagtatggtaatcccaccagcggatgcccgggcggtctatccgcacccccatgcgcaatttggcaatttcacccagccaatactgtccggcttcggcccggctgattcccagggcagcgcagagcaggcctgccactccggatttggtgggcgcgtcggctgtcctgcgcacggcgaatttggcctcattgcttccccaggcctgaaggggagcctccaatctcaggaacagggtattaggcggagaagacatttcaactctctactttctcgttttttacatcatcccattcaaaacccaacatctcaactgcttcgcgaacaagttctagcaggttgcaaactggctttatgtccagcgtgccctgttgaggctttaggggataacgtccattgggcgagaaccacagagcgttgcctttcatctgtccagggaagaaaccggcacttatatccttcacatagttggccagttggccaatgctttgttctaccaagtcagaatccttaacgattcccaccggtcgcacaaaggcatttgcatagctgacaggtgtctcttttatttctaccaatattccatcgggaaggttatgtgcggcaaagctgttctgctttccgctgggattagtgagtgcagcggcctggataaaggctccgacagtatgagctgccaacttttcattaccctggaggttgattatcaaggtattccaatcaattgagtaatatttgtagaaacaggccgaagcaaacatcgcctcgtctatgaatccagcacctgtgtcgtcgccaggctcgtcatcagctgctacatagtaatctatttctgggcgggcgatgtgggttgaaatggcgtgcgacacctgcagggctgcttcaacagtggtattttcccacttgaccttgtctgtgttcttgtccttggtatcgggctcgagcattcttccgcacagagcgatgtcaggggaatgtattgcccccgatattacatctgccgctttcttggctttctctgcaacactcaggccttcgctggtgacaatttgagcaagggcatcgatcttgttccgggtcatgaacaccagcatcttactatgtccgttttcgtgtttcaaaccggctttgttcagaacttcctctgcctgattcctgcagtcctgtcctgtagcttttgtaatcaactcggccaaccgacgggtacggatacccccgagcaagtttttgaattcatcgctcatcctgatgctccgctttaggcactggctggagatgcgggaccgcaacaccccaccgaaataacaggtcttgggcgcgcccaggtcgtcccggttcaggttggccgggctgtggttttggatcatgtgtatttcaatcaacatttgattcctccttgctgattattaaatgctgaaataaatgtgtctgaccatatcgctctgtttgattcccgttcccaagcggagaggtcatcgatgagggcaacccagtccagactggcaatgtcatgtctttttaaaatcgcgagcacttgcgccagcggttcctccagttggttcaactcgagcgtgagcaagcggtcgaacctggctaaaacacgtgggaactctttttcttctttaagtccacggcatattctgcccatgagccaaggcaggctggcgcctttcttttgctcaaagcggaattccgcgaaaagcttggtgactagccagaccaccttccgcctgggggttttggggcttatactgcggagtggccaccacaggccggaaaacaggtcgaaacccggcagggattcatccagacggcgacccctgagctttctgagcaagcccaggtcgccctctttgagttcgcccaggctccgaacaaatttcacggtgctctcattcattatcgcctccggatgaaggttttttaattgattttggttttaggggccagggcttgcgccgagccagttgttctcgttcaagcttggcggcaaccgtaatttccggcactagagaaacggcaaaacgcttcatgaagaatccgtaatcttcatccgcttcctgccagacattgccgctgttttccaccatctcgcccgaatggacgtcaacccgatgctctacgtgcgggatgatgtccgccacggcggtgattcccacggattccttgtaatcgccccggcggtcttgtttcctcatcctgtgcagggagtaggctctttcggatatctggtccagcagttcctcggagcttgtttttccggatagggcaatggtcttttcccaaacgtccacacatttggcttgaacgcttgtgaagcccactaaaaacagcgtggcggtccgagacatgcctttcgcccgtaagaagccgaccaggggtttatgccaatccctgttagcgaaagtgtatttgtccccggacatcagagccacctgggcagtcaggccattattgtcatcccggtaaatcgcgtgagggtcgttccagacaaggttcggaggcactttcaccgcctcattgttgcaggcatagaccagaggctcatgctcttctccgcaggcgctgcattttgctccgtctgacaccgggccaagcaggaataccttgcggggcagccaggtgaggccagtcagcaaggctacatccttctcgttttgggatccaaacgggttcagccaggcaggaacacccaaccgggaagtgggttcccaattcaggaatatcgattccgacagactatcaccctgccagatggcatagaagggaggagttctgttgatgccggctccgattccgctgccgcctacggtggtaaagagtggcaggcgcagcagaccggtaacgcagcaagctgggcaaatgccatcgatgaaatcggtcacatggcggaagtgccagaaattgtttgccgtgggaagctcgtggataaggtccgtgctggggcgtattctggatgttcctggggattggtagaatctggggccatcaccgaacaattcgaaatattcttggttttgttcaagccagtccgtccatgcctgaggcagtggcttatctgataccggcgcttgttttgtattggcaaaacaccaatagcccagggcgaggaggaaacggaaaacggacatgcggtccatcggattgccgtaagccaaacgcagtgtgtgtgcttttcgcaggacctcagccaggccgagcctggcagaatgcccgtcaagctgtagcacactgatccagggtttgtctgtcaaattataatacattgaagctcctgtcgcatggggagggttgatagcttgttgatcctttacagaggccgttccacaggctaacatcattatgccccatagctattatacaccaaatttaccaaggaataatttgtcaagtccaaaatagggctctaatttcaaacttccttaaggccggcaaggtcagattcacaaattcacaaccggtaaatatggcttgtgaatccgtgtgttattgtggcacagtgagttgggggacaaattcacaaaatacgcttatctcttatatccagccggaccaggggagaatgccggtttgcagtggctcatgccgcaaacaagagatgaagggaaggtagagatgatataatatcaatatataataatatataatactattatatattatatatactatttctatatgtattatagactggtagcgtggatacatcatatcctgtttacaatcggcttccgcggatgtataagagaccccttttttgtgaattagcctcataattacccgtctatcagcaggttgcaaattcacaagccatatttaccggttgtgaatttgtgaatttgccttccaacgttggtgagcctggagtgcagcgagcttgcgagtatggactacaggagatgttgctggcgtccatgctcgtgcctcgctcgacgccagcgtcaggaaggtcgatgtccccgtcggccaatcgttctgggaccttcgggctccaaacatatggattacttgcccgattgggaagtaagtcctttattttaggttatctaccacagttggtagcgtaactggaaaagcaattcgtatgaattcgcgcaatttgtggacttcctcccattttgatacccactatcaatagaagccccatttgccccatcccatacacatctaaaatacttcccgctgagttcccattggccgggcgggaatttaaggggaggtttacgggatgttagtgggaaggggcaaacggcctgtccgtgggcgaaaaaggctttgggaaaggaatccgcagttattgtggcagattcggaacgattcttgcatctactatatg

SEQ ID NO: 726 - DNA, 7470 bp, Artificial Sequence
  Synthetic Oligonucleotide
catatagtagatgcaagaatcgttccgaatctgccacaataactgcggattcctttcccaaagcctttttcgcccacggacaggccgtttgccccttcccactaacatcccgtaaacctccccttaaattcccgcccggccaatgggaactcagcgggaagtattttagatgtgtatgggatggggcaaatggggcttctattgatagtgggtatcaaaatgggaggaagtccacaaattgcgcgaattcatacgaattgcttttccagttacgctaccaactgtggtagataacctaaaataaaggacttacttcccaatcgggcaagtaatccatatgtttggagcccgaaggtcccagaacgattggccgacggggacatcgaccttcctgacgctggcgtcgagcgaggcacgagcatggacgccagcaacatctcctgtagtccatactcgcaagctcgctgcactccaggctcaccaacgttggaaggcaaattcacaaattcacaaccggtaaatatggcttgtgaatttgcaacctgctgatagacgggtaattatgaggctaattcacaaaaaaggggtctcttatacatccgcggaagccgattgtaaacaggatatgatgtatccacgctaccagtctataatacatatagaaatagtatatataatatataatagtattatatattattatatattgatattatatcatctctaccttcccttcatctcttgtttgcggcatgagccactgcaaaccggcattctcccctggtccggctggatataagagataagcgtattttgtgaatttgtcccccaactcactgtgccacaataacacacggattcacaagccatatttaccggttgtgaatttgtgaatctgaccttgccggccttaaggaagtttgaaattagagccctattttggacttgacaaattattccttggtaaatttggtgtataatagctatggggcataatgatgttagcctgtggaacggcctctgtaaaggatcaacaagctatcaaccctccccatgcgacaggagcttcaatgtattataatttgacagacaaaccctggatcagtgtgctacagcttgacgggcattctgccaggctcggcctggctgaggtcctgcgaaaagcacacacactgcgtttggcttacggcaatccgatggaccgcatgtccgttttccgtttcctcctcgccctgggctattggtgttttgccaatacaaaacaagcgccggtatcagataagccactgcctcaggcatggacggactggcttgaacaaaaccaagaatatttcgaattgttcggtgatggccccagattctaccaatccccaggaacatccagaatacgccccagcacggaccttatccacgagcttcccacggcaaacaatttctggcacttccgccatgtgaccgatttcatcgatggcatttgcccagcttgctgcgttaccggtctgctgcgcctgccactctttaccaccgtaggcggcagcggaatcggagccggcatcaacagaactcctcccttctatgccatctggcagggtgatagtctgtcggaatcgatattcctgaattgggaacccacttcccggttgggtgttcctgcctggctgaacccgtttggatcccaaaacgagaaggatgtagccttgctgactggcctcacctggctgccccgcaaggtattcctgcttggcccggtgtcagacggagcaaaatgcagcgcctgcggagaagagcatgagcctctggtctatgcctgcaacaatgaggcggtgaaagtgcctccgaaccttgtctggaacgaccctcacgcgatttaccgggatgacaataatggcctgactgcccaggtggctctgatgtccggggacaaatacactttcgctaacagggattggcataaacccctggtcggcttcttacgggcgaaaggcatgtctcggaccgccacgctgtttttagtgggcttcacaagcgttcaagccaaatgtgtggacgtttgggaaaagaccattgccctatccggaaaaacaagctccgaggaactgctggaccagatatccgaaagagcctactccctgcacaggatgaggaaacaagaccgccggggcgattacaaggaatccgtgggaatcaccgccgtggcggacatcatcccgcacgtagagcatcgggttgacgtccattcgggcgagatggtggaaaacagcggcaatgtctggcaggaagcggatgaagattacggattcttcatgaagcgttttgccgtttctctagtgccggaaattacggttgccgccaagcttgaacgagaacaactggctcggcgcaagccctggcccctaaaaccaaaatcaattaaaaaaccttcatccggaggcgataatgaatgagagcaccgtgaaatttgttcggagcctgggcgaactcaaagagggcgacctgggcttgctcagaaagctcaggggtcgccgtctggatgaatccctgccgggtttcgacctgttttccggcctgtggtggccactccgcagtataagccccaaaacccccaggcggaaggtggtctggctagtcaccaagcttttcgcggaattccgctttgagcaaaagaaaggcgccagcctgccttggctcatgggcagaatatgccgtggacttaaagaagaaaaagagttcccacgtgttttagccaggttcgaccgcttgctcacgctcgagttgaaccaactggaggaaccgctggcgcaagtgctcgcgattttaaaaagacatgacattgccagtctggactgggttgccctcatcgatgacctctccgcttgggaacgggaatcaaacagagcgatatggtcagacacatttatttcagcatttaataatcagcaaggaggaatcaaatgttgattgaaatacacatgatccaaaaccacagcccggccaacctgaaccgggacgacctgggcgcgcccaagacctgttatttcggtggggtgttgcggtcccgcatctccagccagtgcctaaagcggagcatcaggatgagcgatgaattcaaaaacttgctcgggggtatccgtacccgtcggttggccgagttgattacaaaagctacaggacaggactgcaggaatcaggcagaggaagttctgaacaaagccggtttgaaacacgaaaacggacatagtaagatgctggtgttcatgacccggaacaagatcgatgcccttgctcaaattgtcaccagcgaaggcctgagtgttgcagagaaagccaagaaagcggcagatgtaatatcgggggcaatacattcccctgacatcgctctgtgcggaagaatgctcgagcccgataccaaggacaagaacacagacaaggtcaagtgggaaaataccactgttgaagcagccctgcaggtgtcgcacgccatttcaacccacatcgcccgcccagaaatagattactatgtagcagctgatgacgagcctggcgacgacacaggtgctggattcatagacgaggcgatgtttgcttcggcctgtttctacaaatattactcaattgattggaataccttgataatcaacctccagggtaatgaaaagttggcagctcatactgtcggagcctttatccaggccgctgcactcactaatcccagcggaaagcagaacagctttgccgcacataaccttcccgatggaatattggtagaaataaaagagacacctgtcagctatgcaaatgcctttgtgcgaccggtgggaatcgttaaggattctgacttggtagaacaaagcattggccaactggccaactatgtgaaggatataagtgccggtttcttccctggacagatgaaaggcaacgctctgtggttctcgcccaatggacgttatcccctaaagcctcaacagggcacgctggacataaagccagtttgcaacctgctagaacttgttcgcgaagcagttgagatgttgggttttgaatgggatgatgtaaaaaacgagaaagtagagagttgaaatgtcttctccgcctaataccctgttcctgagattggaggctccccttcaggcctggggaagcaatgaggccaaattcgccgtgcgcaggacagccgacgcgcccaccaaatccggagtggcaggcctgctctgcgctgccctgggaatcagccgggccgaagccggacagtattggctgggtgaaattgccaaattgcgcatgggggtgcggatagaccgcccgggcatccgctggtgggattaccatactgtgggagcggagcagaagctgcgcatttctgacctgaaaatgcccaacggcctagttctggttggcactgccctggccaaaaacctgggcgcggacaagatcaaatccaaacccggggctttgctctcccgacgcgagtatttggctgatgccagcttcctggttgcgctccagggtgaaccggatatcgtggcacaactggctgaagcgctgaaaaaaccagtctggacgctttatctggggcgaaaatcctgtcccccctcccgtccggtggatgaacacccgccagggttttatgccagtctgaaagaggctttgcggtcgatcccggcgcaactgagggaaaaaggcgaaccgatacctgacagtgttccctgtgtgctcgactgggttccggcccatgatgacgtgcacgctccgccgaacgccgaagcgcattacgacgtgccggtgtcctttgagcctccccaccacttgccccggctggtgatccgctgtaacctgccattggaccgcaacttcgaggcagagaccgtgctttccggcaaagcctggcaaccgccccgcaaccgggcaaattacgacaatcctgaatacaaaagggtccgcgctgagcgtttggtgatggacaatgccgcctgcatgttctgcaaggcacccgccactactgtgcagcacgtgaattaccgacgcgccggaggcagcgagaagccggaggacttgcgcgccctctgccgcctctgccacgatgcctgcaccatgctggaatatggcagcggcatgaccatggaccgcatagatccctgtgaccccgcctggcgtgagcgcatcttggccaaacgcgaggaaataatcaaattccgctcgctggagcagcgcaggcgcaaactcgatccgaaggaggagaacggatgatgtatctatcccaactgctcatcgacacaggcggcaaccctgaccggccaaggcccgggcgcttgtggctgaacaatatctataatgtccaccggcggctcagcatggctttccccatgcgcaagcgcaaggaaggagacccgaggtttctgcagccctttgaccccgcagattttgaaaagcgccagttcctctttcgggtggacaacaacaccgatggagaaaatcaaagggcgatggttttggtgcagtcgtccctgccgccggattgggactgggctttccagaatgccacgggatttttggcagcccctccccaggttaaggaatacgatccccagttctcagcaggtcagcggctgcgcttccgcatcctcgtgaatgccagtgtcaaacgcaaaatcgacgagttgcgggaaggacccggaggaaaggaaaaaacgggaagggttctgcacaaacgggtcgcccttacctgggacacaaattccaacccaaaggatgcggtggcgcaatggtttgccgccaaggctggcagactgggcttcacgcccggggagaccgaactggtaagcctgggctgggtatacggttccaaaccggagccccggggaaattcgccccggcgtgagaacgaataccgtcccctgagataccgttccgccctgctggaaggttatctgacagtggatgatgcctttctgttccgggaagccttggaaaaaggtatcggcagcgccaaaggaatgggcttcggcctcctttccgtggttccggcaagtgatgcgtaacagagaccttcacctaatgccaaaaatgcgggaccgcttcacctatctctatgtggagcatgccaaaatagacaaagaacaacaggcaatcgcctttcacgatgccatgggctccactcctgttccctgcgctggactggccctgctgatgctggggccaggcgtatccatcacccatgcggccatccttgttttagcagaatgcggctgtttggtggcttgggtgggggaacagggagtccgcttttactcatccgggacagggaccacccgtagttccgccaaccttatgcgtcaggctgccgcctggtcaaatcgagatacgcatctgcggatagttcgcagaatgtatgaattgaggttcaaggaaaaactggacccaaccctctctcttgaacagataaggggaaaagagggagcgagagtacgggatacctatttcagactttcaaaagaattcgatgtgcccatgagtgcgaggaattacgacaggagcaactggaataaaaccgaccccatcaacagagccctgtccgttgccaattcctgtctctatggcatctgccacgccgcgatagtggccgctggctattcacctgccctgggtttcgttcatactggcaaacaactgtcatttgtttatgacattgccgatctttataaaatggaaacctccgtgcccgcggctttcatagccacagccgcaggggtcgataacctggacagaaggacacgcattgcctgccgtgaccagttctatcaatttggtctgctaaagaagatagtggccgacattcacgcccttttcggtattctggaaacttcggacgatgagccagaccttgctgatgtcgatccagccgtgccaggcgggctttggaacccagatgataaagtgagccccggcggcttgtcatggggtctggatgatcctggaggccatgatgatggttctggtgcttgaaaaagttccctctggcctgagaggagaaattacacgctggctcctcgaaatcaaggctggagtatttgtcggtcaggtatcggccatgataagggaaaagctgtgggacaaggccaggtctggttgtgccggtggaacttgtatcatgatttacagcaagcattgcgaacaaggctttggaattgagttttggggtgccgcggaaaggatagtgacagaatgggaaggattgaaattgatgaccaagcatccgtgatccatacttgaagcctgttcaatggcctcaaagcgtctactttcgaagtgtgttccccacctgcgtgggggtgaaccgatcgcagaggtgagcggctatactgtgataatgtgttccccacctgcgtgggggtgaaccgggcgcggtcaacgtggacgaagcgcgtccagcgtgttccccacctgcgtgggggtgaaccgacaaccgaatgg

SEQ ID NO: 727 - DNA, 7456 bp, Artificial Sequence
  Synthetic Oligonucleotide
ctcggttcacccccacgcaggtggggaacacaccgatgccaccagaataagtggtgccgagaacggttcacccccacgcaggtggggaacacaccttcgcagggctaaccttcgcagggctgaccggttcacccccacgcaggtggggaacacacttcgaaagtagacgctttgaggccattgaacaggcttcaagtatggatcacggatgcttggtcatcaatttcaatccttcccattctgtcactatcctttccgcggcaccccaaaactcaattccaaagccttgttcgcaatgcttgctgtaaatcatgatacaagttccaccggcacaaccagacctggccttgtcccacagcttttcccttatcatggccgatacctgaccgacaaatactccagccttgatttcgaggagccagcgtgtaatttctcctctcaggccagagggaactttttcaagcaccagaaccatcatcatggcctccaggatcatccagaccccatgacaagccgccggggctcactttatcatctgggttccaaagcccgcctggcacggctggatcgacatcagcaaggtctggctcatcgtccgaagtttccagaataccgaaaagggcgtgaatgtcggccactatcttctttagcagaccaaattgatagaactggtcacggcaggcaatgcgtgtccttctgtccaggttatcgacccctgcggctgtggctatgaaagccgcgggcacggaggtttccattttataaagatcggcaatgtcataaacaaatgacagttgtttgccagtatgaacgaaacccagggcaggtgaatagccagcggccactatcgcggcgtggcagatgccatagagacaggaattggcaacggacagggctctgttgatggggtcggttttattccagttgctcctgtcgtaattcctcgcactcatgggcacatcgaattcttttgaaagtctgaaataggtatcccgtactctcgctccctcttttccccttatctgttcaagagagagggttgggtccagtttttccttgaacctcaattcatacattctgcgaactatccgcagatgcgtatctcgatttgaccaggcggcagcctgacgcataaggttggcggaactacgggtggtccctgtcccggatgagtaaaagcggactccctgttcccccacccaagccaccaaacagccgcattctgctaaaacaaggatggccgcatgggtgatggatacgcctggccccagcatcagcagggccagtccagcgcagggaacaggagtggagcccatggcatcgtgaaaggcgattgcctgttgttctttgtctattttggcatgctccacatagagataggtgaagcggtcccgcatttttggcattaggtgaaggtctctgttacgcatcacttgccggaaccacggaaaggaggccgaagcccattcctttggcgctgccgatacctttttccaaggcttcccggaacagaaaggcatcatccactgtcagataaccttccagcagggcggaacggtatctcaggggacggtattcgttctcacgccggggcgaatttccccggggctccggtttggaaccgtatacccagcccaggcttaccagttcggtctccccgggcgtgaagcccagtctgccagccttggcggcaaaccattgcgccaccgcatcctttgggttggaatttgtgtcccaggtaagggcgacccgtttgtgcagaacccttcccgttttttcctttcctccgggtccttcccgcaactcgtcgattttgcgtttgacactggcattcacgaggatgcggaagcgcagccgctgacctgctgagaactggggatcgtattccttaacctggggaggggctgccaaaaatcccgtggcattctggaaagcccagtcccaatccggcggcagggacgactgcaccaaaaccatcgccctttgattttctccatcggtgttgttgtccacccgaaagaggaactggcgcttttcaaaatctgcggggtcaaagggctgcagaaacctcgggtctccttccttgcgcttgcgcatggggaaagccatgctgagccgccggtggacattatagatattgttcagccacaagcgcccgggccttggccggtcagggttgccgcctgtgtcgatgagcagttgggatagatacatcatccgttctcctccttcggatcgagtttgcgcctgcgctgctccagcgagcggaatttgattatttcctcgcgtttggccaagatgcgctcacgccaggcggggtcacagggatctatgcggtccatggtcatgccgctgccatattccagcatggtgcaggcatcgtggcagaggcggcagagggcgcgcaagtcctccggcttctcgctgcctccggcgcgtcggtaattcacgtgctgcacagtagtggcgggtgccttgcagaacatgcaggcggcattgtccatcaccaaacgctcagcgcggacccttttgtattcaggattgtcgtaatttgcccggttgcggggcggttgccaggctttgccggaaagcacggtctctgcctcgaagttgcggtccaatggcaggttacagcggatcaccagccggggcaagtggtggggaggctcaaaggacaccggcacgtcgtaatgcgcttcggcgttcggcggagcgtgcacgtcatcatgggccggaacccagtcgagcacacagggaacactgtcaggtatcggttcgcctttttccctcagttgcgccgggatcgaccgcaaagcctctttcagactggcataaaaccctggcgggtgttcatccaccggacgggaggggggacaggattttcgccccagataaagcgtccagactggttttttcagcgcttcagccagttgtgccacgatatccggttcaccctggagcgcaaccaggaagctggcatcagccaaatactcgcgtcgggagagcaaagccccgggtttggatttgatcttgtccgcgcccaggtttttggccagggcagtgccaaccagaactaggccgttgggcattttcaggtcagaaatgcgcagcttctgctccgctcccacagtatggtaatcccaccagcggatgcccgggcggtctatccgcacccccatgcgcaatttggcaatttcacccagccaatactgtccggcttcggcccggctgattcccagggcagcgcagagcaggcctgccactccggatttggtgggcgcgtcggctgtcctgcgcacggcgaatttggcctcattgcttccccaggcctgaaggggagcctccaatctcaggaacagggtattaggcggagaagacatttcaactctctactttctcgttttttacatcatcccattcaaaacccaacatctcaactgcttcgcgaacaagttctagcaggttgcaaactggctttatgtccagcgtgccctgttgaggctttaggggataacgtccattgggcgagaaccacagagcgttgcctttcatctgtccagggaagaaaccggcacttatatccttcacatagttggccagttggccaatgctttgttctaccaagtcagaatccttaacgattcccaccggtcgcacaaaggcatttgcatagctgacaggtgtctcttttatttctaccaatattccatcgggaaggttatgtgcggcaaagctgttctgctttccgctgggattagtgagtgcagcggcctggataaaggctccgacagtatgagctgccaacttttcattaccctggaggttgattatcaaggtattccaatcaattgagtaatatttgtagaaacaggccgaagcaaacatcgcctcgtctatgaatccagcacctgtgtcgtcgccaggctcgtcatcagctgctacatagtaatctatttctgggcgggcgatgtgggttgaaatggcgtgcgacacctgcagggctgcttcaacagtggtattttcccacttgaccttgtctgtgttcttgtccttggtatcgggctcgagcattcttccgcacagagcgatgtcaggggaatgtattgcccccgatattacatctgccgctttcttggctttctctgcaacactcaggccttcgctggtgacaatttgagcaagggcatcgatcttgttccgggtcatgaacaccagcatcttactatgtccgttttcgtgtttcaaaccggctttgttcagaacttcctctgcctgattcctgcagtcctgtcctgtagcttttgtaatcaactcggccaaccgacgggtacggatacccccgagcaagtttttgaattcatcgctcatcctgatgctccgctttaggcactggctggagatgcgggaccgcaacaccccaccgaaataacaggtcttgggcgcgcccaggtcgtcccggttcaggttggccgggctgtggttttggatcatgtgtatttcaatcaacatttgattcctccttgctgattattaaatgctgaaataaatgtgtctgaccatatcgctctgtttgattcccgttcccaagcggagaggtcatcgatgagggcaacccagtccagactggcaatgtcatgtctttttaaaatcgcgagcacttgcgccagcggttcctccagttggttcaactcgagcgtgagcaagcggtcgaacctggctaaaacacgtgggaactctttttcttctttaagtccacggcatattctgcccatgagccaaggcaggctggcgcctttcttttgctcaaagcggaattccgcgaaaagcttggtgactagccagaccaccttccgcctgggggttttggggcttatactgcggagtggccaccacaggccggaaaacaggtcgaaacccggcagggattcatccagacggcgacccctgagctttctgagcaagcccaggtcgccctctttgagttcgcccaggctccgaacaaatttcacggtgctctcattcattatcgcctccggatgaaggttttttaattgattttggttttaggggccagggcttgcgccgagccagttgttctcgttcaagcttggcggcaaccgtaatttccggcactagagaaacggcaaaacgcttcatgaagaatccgtaatcttcatccgcttcctgccagacattgccgctgttttccaccatctcgcccgaatggacgtcaacccgatgctctacgtgcgggatgatgtccgccacggcggtgattcccacggattccttgtaatcgccccggcggtcttgtttcctcatcctgtgcagggagtaggctctttcggatatctggtccagcagttcctcggagcttgtttttccggatagggcaatggtcttttcccaaacgtccacacatttggcttgaacgcttgtgaagcccactaaaaacagcgtggcggtccgagacatgcctttcgcccgtaagaagccgaccaggggtttatgccaatccctgttagcgaaagtgtatttgtccccggacatcagagccacctgggcagtcaggccattattgtcatcccggtaaatcgcgtgagggtcgttccagacaaggttcggaggcactttcaccgcctcattgttgcaggcatagaccagaggctcatgctcttctccgcaggcgctgcattttgctccgtctgacaccgggccaagcaggaataccttgcggggcagccaggtgaggccagtcagcaaggctacatccttctcgttttgggatccaaacgggttcagccaggcaggaacacccaaccgggaagtgggttcccaattcaggaatatcgattccgacagactatcaccctgccagatggcatagaagggaggagttctgttgatgccggctccgattccgctgccgcctacggtggtaaagagtggcaggcgcagcagaccggtaacgcagcaagctgggcaaatgccatcgatgaaatcggtcacatggcggaagtgccagaaattgtttgccgtgggaagctcgtggataaggtccgtgctggggcgtattctggatgttcctggggattggtagaatctggggccatcaccgaacaattcgaaatattcttggttttgttcaagccagtccgtccatgcctgaggcagtggcttatctgataccggcgcttgttttgtattggcaaaacaccaatagcccagggcgaggaggaaacggaaaacggacatgcggtccatcggattgccgtaagccaaacgcagtgtgtgtgcttttcgcaggacctcagccaggccgagcctggcagaatgcccgtcaagctgtagcacactgatccagggtttgtctgtcaaattataatacattgaagctcctgtcgcatggggagggttgatagcttgttgatcctttacagaggccgttccacaggctaacatcattatgccccatagctattatacaccaaatttaccaaggaataatttgtcaagtccaaaatagggctctaatttcaaacttccttaaggccggcaaggtcagattcacaaattcacaaccggtaaatatggcttgtgaatccgtgtgttattgtggcacagtgagttgggggacaaattcacaaaatacgcttatctcttatatccagccggaccaggggagaatgccggtttgcagtggctcatgccgcaaacaagagatgaagggaaggtagagatgatataatatcaatatataataatatataatactattatatattatatatactatttctatatgtattatagactggtagcgtggatacatcatatcctgtttacaatcggcttccgcggatgtataagagaccccttttttgtgaattagcctcataattacccgtctatcagcaggttgcaaattcacaagccatatttaccggttgtgaatttgtgaatttgccttccaacgttggtgagcctggagtgcagcgagcttgcgagtatggactacaggagatgttgctggcgtccatgctcgtgcctcgctcgacgccagcgtcaggaaggtcgatgtccccgtcggccaatcgttctgggaccttcgggctccaaacatatggattacttgcccgattgggaagtaagtcctttattttaggttatctaccacagttggtagcgtaactggaaaagcaattcgtatgaattcgcgcaatttgtggacttcctcccattttgatacccactatcaatagaagccccatttgccccatcccatacacatctaaaatacttcccgctgagttcccattggccgggcgggaatttaaggggaggtttacgggatgttagtgggaaggggcaaacggcctgtccgtgggcgaaaaaggctttgggaaaggaatccgcagttattgtggcagattcggaacgattcttgcatctacta

SEQ ID NO: 728 - DNA, 7395 bp, Artificial Sequence
  Synthetic Oligonucleotide
cccacggacaggccgtttgccccttcccactaacatcccgtaaacctccccttaagttcccgcccggccaatgggaactcagcgggaagtaatttagatgtgtatgggatggagaaaatagggcttctattgatagtgggtatcagaacgggtggaagtccacaaattgcgcgaattcatacgaattgcttttccagttacgctaccaactgcggtagatggcctaaaataagggacttacttcccaatcgggcaagtaatccatatgttttaagcccgaaggtcccagaacgattggccgacggggacatcgaccttcctgacgctggcgtcgagcgaggcacgagcatggacgccagcaacatctcctgtagtccatactcgcaagctcgctgcactccaggctcaccaacgttggaaggcaaattcacaaattcacaaccggtaaatatggcttgtgaatttgcaacctgctgatagacgggtaattatgaggctaattcacaaaaaaggggtctcttatacatccgcggaagccgattgtaaacaggatatgatgtatccacgctaccagtctataatacatatagaaatagtatatataatatataatagtattatatattattatatattgatattatatcatctctaccttcccttcatctcttgtttgcggcatgagccactgcaaaccggcattctcccctggtccggctggatataagagataagcgtattttgtgaatttgtcccccaactcactgtgccacaataacacacggattcacaagccatatttaccggttgtgaatttgtgaatctgaccttgccggccttaaggaagtttgaaattagagccctattttggacttgacaaattattccttggtaaatttggtgtataatagctatggggcataatgatgttagcctgtggaacggcctctgtaaaggatcaacaagctatcaaccctccccatgcgacaggagcttcaatgtattataatttgacagacaaaccctggatcagtgtgctacagcttgacgggcattctgccaggctcggcctggctgaggtcctgcgaaaagcacacacactgcgtttggcttacggcaatccgatggaccgcatgtccgttttccgtttcctcctcgccctgggctattggtgttttgccaatacaaaacaagcgccggtatcagataagccactgcctcaggcatggacggactggcttgaacaaaaccaagaatatttcgaattgttcggtgatggccccagattctaccaatccccaggaacatccagaatacgccccagcacggaccttatccacgagcttcccacggcaaacaatttctggcacttccgccatgtgaccgatttcatcgatggcatttgcccagcttgctgcgttaccggtctgctgcgcctgccactctttaccaccgtaggcggcagcggaatcggagccggcatcaacagaactcctcccttctatgccatctggcagggtgatagtctgtcggaatcgatattcctgaattgggaacccacttcccggttgggtgttcctgcctggctgaacccgtttggatcccaaaacgagaaggatgtagccttgctgactggcctcacctggctgccccgcaaggtattcctgcttggcccggtgtcagacggagcaaaatgcagcgcctgcggagaagagcatgagcctctggtctatgcctgcaacaatgaggcggtgaaagtgcctccgaaccttgtctggaacgaccctcacgcgatttaccgggatgacaataatggcctgactgcccaggtggctctgatgtccggggacaaatacactttcgctaacagggattggcataaacccctggtcggcttcttacgggcgaaaggcatgtctcggaccgccacgctgtttttagtgggcttcacaagcgttcaagccaaatgtgtggacgtttgggaaaagaccattgccctatccggaaaaacaagctccgaggaactgctggaccagatatccgaaagagcctactccctgcacaggatgaggaaacaagaccgccggggcgattacaaggaatccgtgggaatcaccgccgtggcggacatcatcccgcacgtagagcatcgggttgacgtccattcgggcgagatggtggaaaacagcggcaatgtctggcaggaagcggatgaagattacggattcttcatgaagcgttttgccgtttctctagtgccggaaattacggttgccgccaagcttgagcgagaacaactggctcggcgcaagccctggcccctaaaaccaaaatcaattaaaaaaccttcatccggaggcgataatgaatgagagcaccgtgaaatttgttcggagcctgggcgaactcaaagagggcgacctgggcttgctcagaaagctcaggggtcgccgtctggatgaatccctgccgggtttcgacctgttttccggcctgtggtggccactccgcagtataagccccaaaacccccaggcggaaggtggtctggctagtcaccaagcttttcgcggaattccgctttgagcaaaagaaaggcgccagcctgccttggctcatgggcagaatatgccgtggacttaaagaagaaaaagagttcccacgtgttttagccaggttcgaccgcttgctcacgctcgagttgaaccaactggaggaaccgctggcgcaagtgctcgcgattttaaaaagacatgacattgccagtctggactgggttgccctcatcgatgacctctccgcttgggaacgggaatcaaacagagcgatatggtcagacacatttatttcagcatttaataatcagcaaggaggaatcaaatgttgattgaaatacacatgatccaaaaccacagcccggccaacctgaaccgggacgacctgggcgcgcccaagacctgttatttcggtggggtgttgcggtcccgcatctccagccagtgcctaaagcggagcatcaggatgagcgatgaattcaaaaacttgctcgggggtatccgtacccgtcggttggctgagttgattacaaaagctgcaggacaggactgcaggaatcaggcagaggaagttctgaacaaagccggtttgaaacacgaaaacggacatagcaagatgctggtgttcatgacccggaacaagatcgatgcccttgctcaaattgtcaccagcgaaggcctgagtgttgcagagaaagccaagaaagcggcagatgtaatatcgggggcaatacattcccctgacatcgctctgtgcggaagaatgctcgagcccgataccaaggacaagaacacagacaaggtcaagtgggaaaataccactgttgaagcagccctgcaggtgtcgcacgccatttcaacccacatcgcccgcccagaaatagattactatgtagcagctgatgacgagcctggcgacgacacaggtgctggattcatagacgaggcgatgtttgcttcggcctgtttctacaaatattactcaattgattggaataccttgataatcaacctccagggtaatgaaaagttggcagctcatactgtcggagcctttatccaggccgctgcactcactaatcccagcggaaagcagaacagctttgccgcacataaccttcccgatggaatattggtagaaataaaagagacacctgtcagctatgcaaatgcctttgtgcgaccggtgggaatcgttaaggattctgacttggtagaacaaagcattggccaactggccaactatgtgaaggatataagtgccggtttcttccctggacagatgaaaggcaacgctctgtggttctcgcccaatggacgttatcccctaaagcctcaacagggcacgctggacataaagccagtttgcaacctgctagaacttgttcgcgaagcagttgagatgttgggttttgaatgggatgatgtaaaaaacgagaaagtagagagttgaaatgtcttctccgcctaataccctgttcctgagattggaggctccccttcaggcctggggaagcaatgaggccaaattcgccgtgcgcaggacagccgacgcgcccaccaaatccggagtggcaggcctgctctgcgctgccctgggaatcagccgggccgaagccggacagtattggctgggtgaaattgccaaattgcgcatgggggtgcggatagaccgccccggcatccgctggtgggattaccatactgtgggagcggagcagaagctgcgcatttctgacctgaaaatgcccaacggcctagttctggttggcactgccctggccaaaaacctgggcgcggacaagatcaaatccaaacccggggctttgctctcccgacgcgagtatttggctgatgccagcttcctggttgcgctccagggtgaaccggatatcgtggcacaactggctgaagcgctgaaaaaaccagtctggacgctttatctggggcgaaaatcctgtcccccctcccgtccggtggatgaacacccgccagggttttatgccagtctgaaagaggctttgcggtcgatcccggcgcaactgagggaaaaaggcgaaccgatacctgacagtgttccctgtgtgctcgactgggttccggcccatgatgacgtgcacgctccgccgaacgccgaagcgcattacgacgtgccggtgtcctttgagcctccccaccacttgccccggctggtgatccgctgtaacctgccattggaccgcaacttcgaggcagagaccgtgctttccggcaaagcctggcaaccgccccgcaaccgggcaaattacgacaatcctgaatacaaaagggtccgcgctgagcgtttggtgatggacaatgccgcctgcatgttctgcaaggcacccgccactactgtgcagcacgtgaattaccgacgcgccggaggcagcgagaagccggaggacttgcgcgccctctgccgcctctgccacgatgcctgcaccatgctggaatatggcagcggcatgaccatggaccgcatagatccctgtgaccccgcctggcgtgagcgcatcttggccaaacgcgaggaaataatcaaattccgctcgctggagcagcgcaggcgcaaactcgatccgaaggaggagaacggatgatgtatctatcccaactgctcatcgacacaggcggcaaccctgaccggccaaggcccgggcgcttgtggctgaacaatatctataatgtccaccggcggctcagcatggctttccccatgcgcaagcgcaaggaaggagacccgaggtttctgcagccctttgaccccgcagattttgaaaagcgccagttcctctttcgggtggacaacaacaccgatggagaaaatcaaagggcgatggttttggtgcagtcgtccctgccgccggattgggactgggctttccagaatgccacgggatttttggcagcccctccccaggttaaggaatacgatccccagttctcagcaggtcagcggctgcgcttccgcatcctcgtgaatgccagtgtcaaacgcaaaatcgacgagttgcgggaaggacccggaggaaaggaaaaaacgggaagggttctgcacaaacggatcgcccttacctgggacacaaattccaacccaaaggatgcggtggcgcaatggtttgccgccaaggctggcagactgggcttcacgcccggggagaccgaactggtaagcctgggctgggtatacggttccaaaccggagccccggggaaattcgccccggcgtgagaacgaataccgtcccctgagataccgttccgccctgctggaaggttatctgacagtggatgatgcctttctgttccgggaagccttggaaaaaggtatcggcagcgccaaaggaatgggcttcggcctcctttccgtggttccggcaagtgatgcgtaacagagaccttcacctaatgccaaaaatgcgggaccgcttcacctatctctatgtggagcatgccaaaatagacaaagaacaacaggcaatcgcctttcacgatgccatgggctccactcctgttccctgcgctggactggccctgctgatgctggggccaggcgtatccatcacccatgcggccatccttgttttagcagaatgcggctgtttggtggcttgggtgggggaacagggagtccgcttttactcatccgggacagggaccacccgtagttccgccaaccttatacgtcaggctgccgcctggtcaaatcgagatacgcatctgcggatagttcgcagaatgtatgaattgaggttcaaggaaaaactggacccaaccctctctcttgaacagataaggggaaaagagggagcgagagtacgggatacctatttcagactttcaaaagaattcgatgtgcccatgagtgcgaggaattacgacaggagcaactggaataaaaccgaccccatcaacagagccctgtccgttgccaattcctgtctctatggcatctgccacgccgcgatagtggccgctggctattcacctgccctgggtttcgttcatactggcaaacaactgtcatttgtttatgacattgccgatctttataaaatggaaacctccgtgcccgcggctttcatagccacagccgcaggggtcgataacctggacagaaggacacgcattgcctgccgtgaccagttctatcaatttggtctgctaaagaagatagtggccgacattcacgcccttttcggtattctggaaacttcggacgatgagccagaccttgctgatgtcgatccagccgtgccaggcgggctttggaacccagatgataaagtgagccccggcggcttgtcatggggtctggatgatcctggaggccatgatgatggttctggtgcttgaaaaagttccctctggcctgagaggagaaattacacgctggctcctcgaaatcaaggctggagtatttgtcggtcaggtatcggccatgataagggaaaagctgtgggacaaggccaggtctggttgtgccggtggaacttgtatcatgatttacagcaagcattgcgaacaaggctttggaattgagttttggggtgccgcggaaaggatagtgacagaatgggaaggattgaaattgatgaccaagcatccgtgatccatacttgaagcctgttcaatggcctcaaagcgtctactttcgaagtgtgttccccacctgcgtgggggtgaaccggaagctggacgccacacccattgtcgcatagagtgttccccacctgcgtgggggtgaaccgatgccgcagaatactatacctacaagggtaatgtgttccccacctgcgtgggggtgaaccgttcaataaa

SEQ ID NO: 729 - DNA, 7382 bp, Artificial Sequence
  Synthetic Oligonucleotide
atctgccacaataactgcggattcctttcccaaagcctttttcgcccacggacaggccgtttgccccttcccactaacatcccgtaaacctccccttaaattcccgcccggccaatgggaactcagcgggaagtattttagatgtgtatgggatggggcaaatggggcttctattgatagtgggtatcaaaatgggaggaagtccacaaattgcgcgaattcatacgaattgcttttccagttacgctaccaactgtggtagataacctaaaataaaggacttacttcccaatcgggcaagtaatccatatgtttggagcccgaaggtcccagaacgattggccgacggggacatcgaccttcctgacgctggcgtcgagcgaggcacgagcatggacgccagcaacatctcctgtagtccatactcgcaagctcgctgcactccaggctcaccaacgttggaaggcaaattcacaaattcacaaccggtaaatatggcttgtgaatttgcaacctgctgatagacgggtaattatgaggctaattcacaaaaaaggggtctcttatacatccgcggaagccgattgtaaacaggatatgatgtatccacgctaccagtctataatacatatagaaatagtatatataatatataatagtattatatattattatatattgatattatatcatctctaccttcccttcatctcttgtttgcggcatgagccactgcaaaccggcattctcccctggtccggctggatataagagataagcgtattttgtgaatttgtcccccaactcactgtgccacaataacacacggattcacaagccatatttaccggttgtgaatttgtgaatctgaccttgccggccttaaggaagtttgaaattagagccctattttggacttgacaaattattccttggtaaatttggtgtataatagctatggggcataatgatgttagcctgtggaacggcctctgtaaaggatcaacaagctatcaaccctccccatgcgacaggagcttcaatgtattataatttgacagacaaaccctggatcagtgtgctacagcttgacgggcattctgccaggctcggcctggctgaggtcctgcgaaaagcacacacactgcgtttggcttacggcaatccgatggaccgcatgtccgttttccgtttcctcctcgccctgggctattggtgttttgccaatacaaaacaagcgccggtatcagataagccactgcctcaggcatggacggactggcttgaacaaaaccaagaatatttcgaattgttcggtgatggccccagattctaccaatccccaggaacatccagaatacgccccagcacggaccttatccacgagcttcccacggcaaacaatttctggcacttccgccatgtgaccgatttcatcgatggcatttgcccagcttgctgcgttaccggtctgctgcgcctgccactctttaccaccgtaggcggcagcggaatcggagccggcatcaacagaactcctcccttctatgccatctggcagggtgatagtctgtcggaatcgatattcctgaattgggaacccacttcccggttgggtgttcctgcctggctgaacccgtttggatcccaaaacgagaaggatgtagccttgctgactggcctcacctggctgccccgcaaggtattcctgcttggcccggtgtcagacggagcaaaatgcagcgcctgcggagaagagcatgagcctctggtctatgcctgcaacaatgaggcggtgaaagtgcctccgaaccttgtctggaacgaccctcacgcgatttaccgggatgacaataatggcctgactgcccaggtggctctgatgtccggggacaaatacactttcgctaacagggattggcataaacccctggtcggcttcttacgggcgaaaggcatgtctcggaccgccacgctgtttttagtgggcttcacaagcgttcaagccaaatgtgtggacgtttgggaaaagaccattgccctatccggaaaaacaagctccgaggaactgctggaccagatatccgaaagagcctactccctgcacaggatgaggaaacaagaccgccggggcgattacaaggaatccgtgggaatcaccgccgtggcggacatcatcccgcacgtagagcatcgggttgacgtccattcgggcgagatggtggaaaacagcggcaatgtctggcaggaagcggatgaagattacggattcttcatgaagcgttttgccgtttctctagtgccggaaattacggttgccgccaagcttgaacgagaacaactggctcggcgcaagccctggcccctaaaaccaaaatcaattaaaaaaccttcatccggaggcgataatgaatgagagcaccgtgaaatttgttcggagcctgggcgaactcaaagagggcgacctgggcttgctcagaaagctcaggggtcgccgtctggatgaatccctgccgggtttcgacctgttttccggcctgtggtggccactccgcagtataagccccaaaacccccaggcggaaggtggtctggctagtcaccaagcttttcgcggaattccgctttgagcaaaagaaaggcgccagcctgccttggctcatgggcagaatatgccgtggacttaaagaagaaaaagagttcccacgtgttttagccaggttcgaccgcttgctcacgctcgagttgaaccaactggaggaaccgctggcgcaagtgctcgcgattttaaaaagacatgacattgccagtctggactgggttgccctcatcgatgacctctccgcttgggaacgggaatcaaacagagcgatatggtcagacacatttatttcagcatttaataatcagcaaggaggaatcaaatgttgattgaaatacacatgatccaaaaccacagcccggccaacctgaaccgggacgacctgggcgcgcccaagacctgttatttcggtggggtgttgcggtcccgcatctccagccagtgcctaaagcggagcatcaggatgagcgatgaattcaaaaacttgctcgggggtatccgtacccgtcggttggccgagttgattacaaaagctacaggacaggactgcaggaatcaggcagaggaagttctgaacaaagccggtttgaaacacgaaaacggacatagtaagatgctggtgttcatgacccggaacaagatcgatgcccttgctcaaattgtcaccagcgaaggcctgagtgttgcagagaaagccaagaaagcggcagatgtaatatcgggggcaatacattcccctgacatcgctctgtgcggaagaatgctcgagcccgataccaaggacaagaacacagacaaggtcaagtgggaaaataccactgttgaagcagccctgcaggtgtcgcacgccatttcaacccacatcgcccgcccagaaatagattactatgtagcagctgatgacgagcctggcgacgacacaggtgctggattcatagacgaggcgatgtttgcttcggcctgtttctacaaatattactcaattgattggaataccttgataatcaacctccagggtaatgaaaagttggcagctcatactgtcggagcctttatccaggccgctgcactcactaatcccagcggaaagcagaacagctttgccgcacataaccttcccgatggaatattggtagaaataaaagagacacctgtcagctatgcaaatgcctttgtgcgaccggtgggaatcgttaaggattctgacttggtagaacaaagcattggccaactggccaactatgtgaaggatataagtgccggtttcttccctggacagatgaaaggcaacgctctgtggttctcgcccaatggacgttatcccctaaagcctcaacagggcacgctggacataaagccagtttgcaacctgctagaacttgttcgcgaagcagttgagatgttgggttttgaatgggatgatgtaaaaaacgagaaagtagagagttgaaatgtcttctccgcctaataccctgttcctgagattggaggctccccttcaggcctggggaagcaatgaggccaaattcgccgtgcgcaggacagccgacgcgcccaccaaatccggagtggcaggcctgctctgcgctgccctgggaatcagccgggccgaagccggacagtattggctgggtgaaattgccaaattgcgcatgggggtgcggatagaccgcccgggcatccgctggtgggattaccatactgtgggagcggagcagaagctgcgcatttctgacctgaaaatgcccaacggcctagttctggttggcactgccctggccaaaaacctgggcgcggacaagatcaaatccaaacccggggctttgctctcccgacgcgagtatttggctgatgccagcttcctggttgcgctccagggtgaaccggatatcgtggcacaactggctgaagcgctgaaaaaaccagtctggacgctttatctggggcgaaaatcctgtcccccctcccgtccggtggatgaacacccgccagggttttatgccagtctgaaagaggctttgcggtcgatcccggcgcaactgagggaaaaaggcgaaccgatacctgacagtgttccctgtgtgctcgactgggttccggcccatgatgacgtgcacgctccgccgaacgccgaagcgcattacgacgtgccggtgtcctttgagcctccccaccacttgccccggctggtgatccgctgtaacctgccattggaccgcaacttcgaggcagagaccgtgctttccggcaaagcctggcaaccgccccgcaaccgggcaaattacgacaatcctgaatacaaaagggtccgcgctgagcgtttggtgatggacaatgccgcctgcatgttctgcaaggcacccgccactactgtgcagcacgtgaattaccgacgcgccggaggcagcgagaagccggaggacttgcgcgccctctgccgcctctgccacgatgcctgcaccatgctggaatatggcagcggcatgaccatggaccgcatagatccctgtgaccccgcctggcgtgagcgcatcttggccaaacgcgaggaaataatcaaattccgctcgctggagcagcgcaggcgcaaactcgatccgaaggaggagaacggatgatgtatctatcccaactgctcatcgacacaggcggcaaccctgaccggccaaggcccgggcgcttgtggctgaacaatatctataatgtccaccggcggctcagcatggctttccccatgcgcaagcgcaaggaaggagacccgaggtttctgcagccctttgaccccgcagattttgaaaagcgccagttcctctttcgggtggacaacaacaccgatggagaaaatcaaagggcgatggttttggtgcagtcgtccctgccgccggattgggactgggctttccagaatgccacgggatttttggcagcccctccccaggttaaggaatacgatccccagttctcagcaggtcagcggctgcgcttccgcatcctcgtgaatgccagtgtcaaacgcaaaatcgacgagttgcgggaaggacccggaggaaaggaaaaaacgggaagggttctgcacaaacgggtcgcccttacctgggacacaaattccaacccaaaggatgcggtggcgcaatggtttgccgccaaggctggcagactgggcttcacgcccggggagaccgaactggtaagcctgggctgggtatacggttccaaaccggagccccggggaaattcgccccggcgtgagaacgaataccgtcccctgagataccgttccgccctgctggaaggttatctgacagtggatgatgcctttctgttccgggaagccttggaaaaaggtatcggcagcgccaaaggaatgggcttcggcctcctttccgtggttccggcaagtgatgcgtaacagagaccttcacctaatgccaaaaatgcgggaccgcttcacctatctctatgtggagcatgccaaaatagacaaagaacaacaggcaatcgcctttcacgatgccatgggctccactcctgttccctgcgctggactggccctgctgatgctggggccaggcgtatccatcacccatgcggccatccttgttttagcagaatgcggctgtttggtggcttgggtgggggaacagggagtccgcttttactcatccgggacagggaccacccgtagttccgccaaccttatgcgtcaggctgccgcctggtcaaatcgagatacgcatctgcggatagttcgcagaatgtatgaattgaggttcaaggaaaaactggacccaaccctctctcttgaacagataaggggaaaagagggagcgagagtacgggatacctatttcagactttcaaaagaattcgatgtgcccatgagtgcgaggaattacgacaggagcaactggaataaaaccgaccccatcaacagagccctgtccgttgccaattcctgtctctatggcatctgccacgccgcgatagtggccgctggctattcacctgccctgggtttcgttcatactggcaaacaactgtcatttgtttatgacattgccgatctttataaaatggaaacctccgtgcccgcggctttcatagccacagccgcaggggtcgataacctggacagaaggacacgcattgcctgccgtgaccagttctatcaatttggtctgctaaagaagatagtggccgacattcacgcccttttcggtattctggaaacttcggacgatgagccagaccttgctgatgtcgatccagccgtgccaggcgggctttggaacccagatgataaagtgagccccggcggcttgtcatggggtctggatgatcctggaggccatgatgatggttctggtgcttgaaaaagttccctctggcctgagaggagaaattacacgctggctcctcgaaatcaaggctggagtatttgtcggtcaggtatcggccatgataagggaaaagctgtgggacaaggccaggtctggttgtgccggtggaacttgtatcatgatttacagcaagcattgcgaacaaggctttggaattgagttttggggtgccgcggaaaggatagtgacagaatgggaaggattgaaattgatgaccaagcatccgtgatccatacttgaagcctgttcaatggcctcaaagcgtctactttcgaagtgtgttccccacctgcgtgggggtgaaccggtcagccctgcgaaggttagccctgcgaaggtgtgttccccacctgcgtgggggtgaaccgttctcggcaccac

SEQ ID NO: 730 - DNA, 7356 bp, Artificial Sequence
  Synthetic Oligonucleotide
caagaatcgttccgaatctgccacaataactgcggattcctttcccaaagcctttttcgcccacggacaggccgtttgccccttcccactaacatcccgtaaacctccccttaaattcccgcccggccaatgggaactcagcgggaagtattttagatgtgtatgggatggggcaaatggggcttctattgatagtgggtatcaaaatgggaggaagtccacaaattgcgcgaattcatacgaattgcttttccagttacgctaccaactgtggtagataacctaaaataaaggacttacttcccaatcgggcaagtaatccatatgtttggagcccgaaggtcccagaacgattggccgacggggacatcgaccttcctgacgctggcgtcgagcgaggcacgagcatggacgccagcaacatctcctgtagtccatactcgcaagctcgctgcactccaggctcaccaacgttggaaggcaaattcacaaattcacaaccggtaaatatggcttgtgaatttgcaacctgctgatagacgggtaattatgaggctaattcacaaaaaaggggtctcttatacatccgcggaagccgattgtaaacaggatatgatgtatccacgctaccagtctataatacatatagaaatagtatatataatatataatagtattatatattattatatattgatattatatcatctctaccttcccttcatctcttgtttgcggcatgagccactgcaaaccggcattctcccctggtccggctggatataagagataagcgtattttgtgaatttgtcccccaactcactgtgccacaataacacacggattcacaagccatatttaccggttgtgaatttgtgaatctgaccttgccggccttaaggaagtttgaaattagagccctattttggacttgacaaattattccttggtaaatttggtgtataatagctatggggcataatgatgttagcctgtggaacggcctctgtaaaggatcaacaagctatcaaccctccccatgcgacaggagcttcaatgtattataatttgacagacaaaccctggatcagtgtgctacagcttgacgggcattctgccaggctcggcctggctgaggtcctgcgaaaagcacacacactgcgtttggcttacggcaatccgatggaccgcatgtccgttttccgtttcctcctcgccctgggctattggtgttttgccaatacaaaacaagcgccggtatcagataagccactgcctcaggcatggacggactggcttgaacaaaaccaagaatatttcgaattgttcggtgatggccccagattctaccaatccccaggaacatccagaatacgccccagcacggaccttatccacgagcttcccacggcaaacaatttctggcacttccgccatgtgaccgatttcatcgatggcatttgcccagcttgctgcgttaccggtctgctgcgcctgccactctttaccaccgtaggcggcagcggaatcggagccggcatcaacagaactcctcccttctatgccatctggcagggtgatagtctgtcggaatcgatattcctgaattgggaacccacttcccggttgggtgttcctgcctggctgaacccgtttggatcccaaaacgagaaggatgtagccttgctgactggcctcacctggctgccccgcaaggtattcctgcttggcccggtgtcagacggagcaaaatgcagcgcctgcggagaagagcatgagcctctggtctatgcctgcaacaatgaggcggtgaaagtgcctccgaaccttgtctggaacgaccctcacgcgatttaccgggatgacaataatggcctgactgcccaggtggctctgatgtccggggacaaatacactttcgctaacagggattggcataaacccctggtcggcttcttacgggcgaaaggcatgtctcggaccgccacgctgtttttagtgggcttcacaagcgttcaagccaaatgtgtggacgtttgggaaaagaccattgccctatccggaaaaacaagctccgaggaactgctggaccagatatccgaaagagcctactccctgcacaggatgaggaaacaagaccgccggggcgattacaaggaatccgtgggaatcaccgccgtggcggacatcatcccgcacgtagagcatcgggttgacgtccattcgggcgagatggtggaaaacagcggcaatgtctggcaggaagcggatgaagattacggattcttcatgaagcgttttgccgtttctctagtgccggaaattacggttgccgccaagcttgaacgagaacaactggctcggcgcaagccctggcccctaaaaccaaaatcaattaaaaaaccttcatccggaggcgataatgaatgagagcaccgtgaaatttgttcggagcctgggcgaactcaaagagggcgacctgggcttgctcagaaagctcaggggtcgccgtctggatgaatccctgccgggtttcgacctgttttccggcctgtggtggccactccgcagtataagccccaaaacccccaggcggaaggtggtctggctagtcaccaagcttttcgcggaattccgctttgagcaaaagaaaggcgccagcctgccttggctcatgggcagaatatgccgtggacttaaagaagaaaaagagttcccacgtgttttagccaggttcgaccgcttgctcacgctcgagttgaaccaactggaggaaccgctggcgcaagtgctcgcgattttaaaaagacatgacattgccagtctggactgggttgccctcatcgatgacctctccgcttgggaacgggaatcaaacagagcgatatggtcagacacatttatttcagcatttaataatcagcaaggaggaatcaaatgttgattgaaatacacatgatccaaaaccacagcccggccaacctgaaccgggacgacctgggcgcgcccaagacctgttatttcggtggggtgttgcggtcccgcatctccagccagtgcctaaagcggagcatcaggatgagcgatgaattcaaaaacttgctcgggggtatccgtacccgtcggttggccgagttgattacaaaagctacaggacaggactgcaggaatcaggcagaggaagttctgaacaaagccggtttgaaacacgaaaacggacatagtaagatgctggtgttcatgacccggaacaagatcgatgcccttgctcaaattgtcaccagcgaaggcctgagtgttgcagagaaagccaagaaagcggcagatgtaatatcgggggcaatacattcccctgacatcgctctgtgcggaagaatgctcgagcccgataccaaggacaagaacacagacaaggtcaagtgggaaaataccactgttgaagcagccctgcaggtgtcgcacgccatttcaacccacatcgcccgcccagaaatagattactatgtagcagctgatgacgagcctggcgacgacacaggtgctggattcatagacgaggcgatgtttgcttcggcctgtttctacaaatattactcaattgattggaataccttgataatcaacctccagggtaatgaaaagttggcagctcatactgtcggagcctttatccaggccgctgcactcactaatcccagcggaaagcagaacagctttgccgcacataaccttcccgatggaatattggtagaaataaaagagacacctgtcagctatgcaaatgcctttgtgcgaccggtgggaatcgttaaggattctgacttggtagaacaaagcattggccaactggccaactatgtgaaggatataagtgccggtttcttccctggacagatgaaaggcaacgctctgtggttctcgcccaatggacgttatcccctaaagcctcaacagggcacgctggacataaagccagtttgcaacctgctagaacttgttcgcgaagcagttgagatgttgggttttgaatgggatgatgtaaaaaacgagaaagtagagagttgaaatgtcttctccgcctaataccctgttcctgagattggaggctccccttcaggcctggggaagcaatgaggccaaattcgccgtgcgcaggacagccgacgcgcccaccaaatccggagtggcaggcctgctctgcgctgccctgggaatcagccgggccgaagccggacagtattggctgggtgaaattgccaaattgcgcatgggggtgcggatagaccgcccgggcatccgctggtgggattaccatactgtgggagcggagcagaagctgcgcatttctgacctgaaaatgcccaacggcctagttctggttggcactgccctggccaaaaacctgggcgcggacaagatcaaatccaaacccggggctttgctctcccgacgcgagtatttggctgatgccagcttcctggttgcgctccagggtgaaccggatatcgtggcacaactggctgaagcgctgaaaaaaccagtctggacgctttatctggggcgaaaatcctgtcccccctcccgtccggtggatgaacacccgccagggttttatgccagtctgaaagaggctttgcggtcgatcccggcgcaactgagggaaaaaggcgaaccgatacctgacagtgttccctgtgtgctcgactgggttccggcccatgatgacgtgcacgctccgccgaacgccgaagcgcattacgacgtgccggtgtcctttgagcctccccaccacttgccccggctggtgatccgctgtaacctgccattggaccgcaacttcgaggcagagaccgtgctttccggcaaagcctggcaaccgccccgcaaccgggcaaattacgacaatcctgaatacaaaagggtccgcgctgagcgtttggtgatggacaatgccgcctgcatgttctgcaaggcacccgccactactgtgcagcacgtgaattaccgacgcgccggaggcagcgagaagccggaggacttgcgcgccctctgccgcctctgccacgatgcctgcaccatgctggaatatggcagcggcatgaccatggaccgcatagatccctgtgaccccgcctggcgtgagcgcatcttggccaaacgcgaggaaataatcaaattccgctcgctggagcagcgcaggcgcaaactcgatccgaaggaggagaacggatgatgtatctatcccaactgctcatcgacacaggcggcaaccctgaccggccaaggcccgggcgcttgtggctgaacaatatctataatgtccaccggcggctcagcatggctttccccatgcgcaagcgcaaggaaggagacccgaggtttctgcagccctttgaccccgcagattttgaaaagcgccagttcctctttcgggtggacaacaacaccgatggagaaaatcaaagggcgatggttttggtgcagtcgtccctgccgccggattgggactgggctttccagaatgccacgggatttttggcagcccctccccaggttaaggaatacgatccccagttctcagcaggtcagcggctgcgcttccgcatcctcgtgaatgccagtgtcaaacgcaaaatcgacgagttgcgggaaggacccggaggaaaggaaaaaacgggaagggttctgcacaaacgggtcgcccttacctgggacacaaattccaacccaaaggatgcggtggcgcaatggtttgccgccaaggctggcagactgggcttcacgcccggggagaccgaactggtaagcctgggctgggtatacggttccaaaccggagccccggggaaattcgccccggcgtgagaacgaataccgtcccctgagataccgttccgccctgctggaaggttatctgacagtggatgatgcctttctgttccgggaagccttggaaaaaggtatcggcagcgccaaaggaatgggcttcggcctcctttccgtggttccggcaagtgatgcgtaacagagaccttcacctaatgccaaaaatgcgggaccgcttcacctatctctatgtggagcatgccaaaatagacaaagaacaacaggcaatcgcctttcacgatgccatgggctccactcctgttccctgcgctggactggccctgctgatgctggggccaggcgtatccatcacccatgcggccatccttgttttagcagaatgcggctgtttggtggcttgggtgggggaacagggagtccgcttttactcatccgggacagggaccacccgtagttccgccaaccttatgcgtcaggctgccgcctggtcaaatcgagatacgcatctgcggatagttcgcagaatgtatgaattgaggttcaaggaaaaactggacccaaccctctctcttgaacagataaggggaaaagagggagcgagagtacgggatacctatttcagactttcaaaagaattcgatgtgcccatgagtgcgaggaattacgacaggagcaactggaataaaaccgaccccatcaacagagccctgtccgttgccaattcctgtctctatggcatctgccacgccgcgatagtggccgctggctattcacctgccctgggtttcgttcatactggcaaacaactgtcatttgtttatgacattgccgatctttataaaatggaaacctccgtgcccgcggctttcatagccacagccgcaggggtcgataacctggacagaaggacacgcattgcctgccgtgaccagttctatcaatttggtctgctaaagaagatagtggccgacattcacgcccttttcggtattctggaaacttcggacgatgagccagaccttgctgatgtcgatccagccgtgccaggcgggctttggaacccagatgataaagtgagccccggcggcttgtcatggggtctggatgatcctggaggccatgatgatggttctggtgcttgaaaaagttccctctggcctgagaggagaaattacacgctggctcctcgaaatcaaggctggagtatttgtcggtcaggtatcggccatgataagggaaaagctgtgggacaaggccaggtctggttgtgccggtggaacttgtatcatgatttacagcaagcattgcgaacaaggctttggaattgagttttggggtgccgcggaaaggatagtgacagaatgggaaggattgaaattgatgaccaagcatccgtgatccatacttgaagcctgttcaatggcctcaaagcgtctactttcgaagtgtgttccccacctgcgtgggggtgaaccgagcgatcctgcgcttcgggatcaatacagcggg

SEQ ID NO: 731 - DNA, 7344 bp, Artificial Sequence
  Synthetic Oligonucleotide
agcaacatccaagcggttcacccccacgcaggtggggaacacacttcgaaagtagacgctttgaggccattgaacaggcttcaagtatggatcacggatgcttggtcatcaatttcaatccttcccattctgtcactatcctttccgcggcaccccaaaactcaattccaaagccttgttcgcaatgcttgctgtaaatcatgatacaagttccaccggcacaaccagacctggccttgtcccacagcttttcccttatcatggccgatacctgaccgacaaatactccagccttgatttcgaggagccagcgtgtaatttctcctctcaggccagagggaactttttcaagcaccagaaccatcatcatggcctccaggatcatccagaccccatgacaagccgccggggctcactttatcatctgggttccaaagcccgcctggcacggctggatcgacatcagcaaggtctggctcatcgtccgaagtttccagaataccgaaaagggcgtgaatgtcggccactatcttctttagcagaccaaattgatagaactggtcacggcaggcaatgcgtgtccttctgtccaggttatcgacccctgcggctgtggctatgaaagccgcgggcacggaggtttccattttataaagatcggcaatgtcataaacaaatgacagttgtttgccagtatgaacgaaacccagggcaggtgaatagccagcggccactatcgcggcgtggcagatgccatagagacaggaattggcaacggacagggctctgttgatggggtcggttttattccagttgctcctgtcgtaattcctcgcactcatgggcacatcgaattcttttgaaagtctgaaataggtatcccgtactctcgctccctcttttccccttatctgttcaagagagagggttgggtccagtttttccttgaacctcaattcatacattctgcgaactatccgcagatgcgtatctcgatttgaccaggcggcagcctgacgcataaggttggcggaactacgggtggtccctgtcccggatgagtaaaagcggactccctgttcccccacccaagccaccaaacagccgcattctgctaaaacaaggatggccgcatgggtgatggatacgcctggccccagcatcagcagggccagtccagcgcagggaacaggagtggagcccatggcatcgtgaaaggcgattgcctgttgttctttgtctattttggcatgctccacatagagataggtgaagcggtcccgcatttttggcattaggtgaaggtctctgttacgcatcacttgccggaaccacggaaaggaggccgaagcccattcctttggcgctgccgatacctttttccaaggcttcccggaacagaaaggcatcatccactgtcagataaccttccagcagggcggaacggtatctcaggggacggtattcgttctcacgccggggcgaatttccccggggctccggtttggaaccgtatacccagcccaggcttaccagttcggtctccccgggcgtgaagcccagtctgccagccttggcggcaaaccattgcgccaccgcatcctttgggttggaatttgtgtcccaggtaagggcgacccgtttgtgcagaacccttcccgttttttcctttcctccgggtccttcccgcaactcgtcgattttgcgtttgacactggcattcacgaggatgcggaagcgcagccgctgacctgctgagaactggggatcgtattccttaacctggggaggggctgccaaaaatcccgtggcattctggaaagcccagtcccaatccggcggcagggacgactgcaccaaaaccatcgccctttgattttctccatcggtgttgttgtccacccgaaagaggaactggcgcttttcaaaatctgcggggtcaaagggctgcagaaacctcgggtctccttccttgcgcttgcgcatggggaaagccatgctgagccgccggtggacattatagatattgttcagccacaagcgcccgggccttggccggtcagggttgccgcctgtgtcgatgagcagttgggatagatacatcatccgttctcctccttcggatcgagtttgcgcctgcgctgctccagcgagcggaatttgattatttcctcgcgtttggccaagatgcgctcacgccaggcggggtcacagggatctatgcggtccatggtcatgccgctgccatattccagcatggtgcaggcatcgtggcagaggcggcagagggcgcgcaagtcctccggcttctcgctgcctccggcgcgtcggtaattcacgtgctgcacagtagtggcgggtgccttgcagaacatgcaggcggcattgtccatcaccaaacgctcagcgcggacccttttgtattcaggattgtcgtaatttgcccggttgcggggcggttgccaggctttgccggaaagcacggtctctgcctcgaagttgcggtccaatggcaggttacagcggatcaccagccggggcaagtggtggggaggctcaaaggacaccggcacgtcgtaatgcgcttcggcgttcggcggagcgtgcacgtcatcatgggccggaacccagtcgagcacacagggaacactgtcaggtatcggttcgcctttttccctcagttgcgccgggatcgaccgcaaagcctctttcagactggcataaaaccctggcgggtgttcatccaccggacgggaggggggacaggattttcgccccagataaagcgtccagactggttttttcagcgcttcagccagttgtgccacgatatccggttcaccctggagcgcaaccaggaagctggcatcagccaaatactcgcgtcgggagagcaaagccccgggtttggatttgatcttgtccgcgcccaggtttttggccagggcagtgccaaccagaactaggccgttgggcattttcaggtcagaaatgcgcagcttctgctccgctcccacagtatggtaatcccaccagcggatgcccgggcggtctatccgcacccccatgcgcaatttggcaatttcacccagccaatactgtccggcttcggcccggctgattcccagggcagcgcagagcaggcctgccactccggatttggtgggcgcgtcggctgtcctgcgcacggcgaatttggcctcattgcttccccaggcctgaaggggagcctccaatctcaggaacagggtattaggcggagaagacatttcaactctctactttctcgttttttacatcatcccattcaaaacccaacatctcaactgcttcgcgaacaagttctagcaggttgcaaactggctttatgtccagcgtgccctgttgaggctttaggggataacgtccattgggcgagaaccacagagcgttgcctttcatctgtccagggaagaaaccggcacttatatccttcacatagttggccagttggccaatgctttgttctaccaagtcagaatccttaacgattcccaccggtcgcacaaaggcatttgcatagctgacaggtgtctcttttatttctaccaatattccatcgggaaggttatgtgcggcaaagctgttctgctttccgctgggattagtgagtgcagcggcctggataaaggctccgacagtatgagctgccaacttttcattaccctggaggttgattatcaaggtattccaatcaattgagtaatatttgtagaaacaggccgaagcaaacatcgcctcgtctatgaatccagcacctgtgtcgtcgccaggctcgtcatcagctgctacatagtaatctatttctgggcgggcgatgtgggttgaaatggcgtgcgacacctgcagggctgcttcaacagtggtattttcccacttgaccttgtctgtgttcttgtccttggtatcgggctcgagcattcttccgcacagagcgatgtcaggggaatgtattgcccccgatattacatctgccgctttcttggctttctctgcaacactcaggccttcgctggtgacaatttgagcaagggcatcgatcttgttccgggtcatgaacaccagcatcttactatgtccgttttcgtgtttcaaaccggctttgttcagaacttcctctgcctgattcctgcagtcctgtcctgtagcttttgtaatcaactcggccaaccgacgggtacggatacccccgagcaagtttttgaattcatcgctcatcctgatgctccgctttaggcactggctggagatgcgggaccgcaacaccccaccgaaataacaggtcttgggcgcgcccaggtcgtcccggttcaggttggccgggctgtggttttggatcatgtgtatttcaatcaacatttgattcctccttgctgattattaaatgctgaaataaatgtgtctgaccatatcgctctgtttgattcccgttcccaagcggagaggtcatcgatgagggcaacccagtccagactggcaatgtcatgtctttttaaaatcgcgagcacttgcgccagcggttcctccagttggttcaactcgagcgtgagcaagcggtcgaacctggctaaaacacgtgggaactctttttcttctttaagtccacggcatattctgcccatgagccaaggcaggctggcgcctttcttttgctcaaagcggaattccgcgaaaagcttggtgactagccagaccaccttccgcctgggggttttggggcttatactgcggagtggccaccacaggccggaaaacaggtcgaaacccggcagggattcatccagacggcgacccctgagctttctgagcaagcccaggtcgccctctttgagttcgcccaggctccgaacaaatttcacggtgctctcattcattatcgcctccggatgaaggttttttaattgattttggttttaggggccagggcttgcgccgagccagttgttctcgttcaagcttggcggcaaccgtaatttccggcactagagaaacggcaaaacgcttcatgaagaatccgtaatcttcatccgcttcctgccagacattgccgctgttttccaccatctcgcccgaatggacgtcaacccgatgctctacgtgcgggatgatgtccgccacggcggtgattcccacggattccttgtaatcgccccggcggtcttgtttcctcatcctgtgcagggagtaggctctttcggatatctggtccagcagttcctcggagcttgtttttccggatagggcaatggtcttttcccaaacgtccacacatttggcttgaacgcttgtgaagcccactaaaaacagcgtggcggtccgagacatgcctttcgcccgtaagaagccgaccaggggtttatgccaatccctgttagcgaaagtgtatttgtccccggacatcagagccacctgggcagtcaggccattattgtcatcccggtaaatcgcgtgagggtcgttccagacaaggttcggaggcactttcaccgcctcattgttgcaggcatagaccagaggctcatgctcttctccgcaggcgctgcattttgctccgtctgacaccgggccaagcaggaataccttgcggggcagccaggtgaggccagtcagcaaggctacatccttctcgttttgggatccaaacgggttcagccaggcaggaacacccaaccgggaagtgggttcccaattcaggaatatcgattccgacagactatcaccctgccagatggcatagaagggaggagttctgttgatgccggctccgattccgctgccgcctacggtggtaaagagtggcaggcgcagcagaccggtaacgcagcaagctgggcaaatgccatcgatgaaatcggtcacatggcggaagtgccagaaattgtttgccgtgggaagctcgtggataaggtccgtgctggggcgtattctggatgttcctggggattggtagaatctggggccatcaccgaacaattcgaaatattcttggttttgttcaagccagtccgtccatgcctgaggcagtggcttatctgataccggcgcttgttttgtattggcaaaacaccaatagcccagggcgaggaggaaacggaaaacggacatgcggtccatcggattgccgtaagccaaacgcagtgtgtgtgcttttcgcaggacctcagccaggccgagcctggcagaatgcccgtcaagctgtagcacactgatccagggtttgtctgtcaaattataatacattgaagctcctgtcgcatggggagggttgatagcttgttgatcctttacagaggccgttccacaggctaacatcattatgccccatagctattatacaccaaatttaccaaggaataatttgtcaagtccaaaatagggctctaatttcaaacttccttaaggccggcaaggtcagattcacaaattcacaaccggtaaatatggcttgtgaatccgtgtgttattgtggcacagtgagttgggggacaaattcacaaaatacgcttatctcttatatccagccggaccaggggagaatgccggtttgcagtggctcatgccgcaaacaagagatgaagggaaggtagagatgatataatatcaatatataataatatataatactattatatattatatatactatttctatatgtattatagactggtagcgtggatacatcatatcctgtttacaatcggcttccgcggatgtataagagaccccttttttgtgaattagcctcataattacccgtctatcagcaggttgcaaattcacaagccatatttaccggttgtgaatttgtgaatttgccttccaacgttggtgagcctggagtgcagcgagcttgcgagtatggactacaggagatgttgctggcgtccatgctcgtgcctcgctcgacgccagcgtcaggaaggtcgatgtccccgtcggccaatcgttctgggaccttcgggctccaaacatatggattacttgcccgattgggaagtaagtcctttattttaggttatctaccacagttggtagcgtaactggaaaagcaattcgtatgaattcgcgcaatttgtggacttcctcccattttgatacccactatcaatagaagccccatttgccccatcccatacacatctaaaatacttcccgctgagttcccattggccgggcgggaatttaaggggaggtttacgggatgttagtgggaaggggcaaacggcctgtccgtgggcgaaaaaggctttgggaaaggaatccgcagttattgtggcagattcggaacgattcttgcatctact

SEQ ID NO: 732 - DNA, 7343 bp, Artificial Sequence
  Synthetic Oligonucleotide
catatagtagatgcaagaatcgttccgaatctgccacaataactgcggattcctttcccaaagcctttttcgcccacggacaggccgtttgccccttcccactaacatcccgtaaacctccccttaaattcccgcccggccaatgggaactcagcgggaagtattttagatgtgtatgggatggggcaaatggggcttctattgatagtgggtatcaaaatgggaggaagtccacaaattgcgcgaattcatacgaattgcttttccagttacgctaccaactgtggtagataacctaaaataaaggacttacttcccaatcgggcaagtaatccatatgtttggagcccgaaggtcccagaacgattggccgacggggacatcgaccttcctgacgctggcgtcgagcgaggcacgagcatggacgccagcaacatctcctgtagtccatactcgcaagctcgctgcactccaggctcaccaacgttggaaggcaaattcacaaattcacaaccggtaaatatggcttgtgaatttgcaacctgctgatagacgggtaattatgaggctaattcacaaaaaaggggtctcttatacatccgcggaagccgattgtaaacaggatatgatgtatccacgctaccagtctataatacatatagaaatagtatatataatatataatagtattatatattattatatattgatattatatcatctctaccttcccttcatctcttgtttgcggcatgagccactgcaaaccggcattctcccctggtccggctggatataagagataagcgtattttgtgaatttgtcccccaactcactgtgccacaataacacacggattcacaagccatatttaccggttgtgaatttgtgaatctgaccttgccggccttaaggaagtttgaaattagagccctattttggacttgacaaattattccttggtaaatttggtgtataatagctatggggcataatgatgttagcctgtggaacggcctctgtaaaggatcaacaagctatcaaccctccccatgcgacaggagcttcaatgtattataatttgacagacaaaccctggatcagtgtgctacagcttgacgggcattctgccaggctcggcctggctgaggtcctgcgaaaagcacacacactgcgtttggcttacggcaatccgatggaccgcatgtccgttttccgtttcctcctcgccctgggctattggtgttttgccaatacaaaacaagcgccggtatcagataagccactgcctcaggcatggacggactggcttgaacaaaaccaagaatatttcgaattgttcggtgatggccccagattctaccaatccccaggaacatccagaatacgccccagcacggaccttatccacgagcttcccacggcaaacaatttctggcacttccgccatgtgaccgatttcatcgatggcatttgcccagcttgctgcgttaccggtctgctgcgcctgccactctttaccaccgtaggcggcagcggaatcggagccggcatcaacagaactcctcccttctatgccatctggcagggtgatagtctgtcggaatcgatattcctgaattgggaacccacttcccggttgggtgttcctgcctggctgaacccgtttggatcccaaaacgagaaggatgtagccttgctgactggcctcacctggctgccccgcaaggtattcctgcttggcccggtgtcagacggagcaaaatgcagcgcctgcggagaagagcatgagcctctggtctatgcctgcaacaatgaggcggtgaaagtgcctccgaaccttgtctggaacgaccctcacgcgatttaccgggatgacaataatggcctgactgcccaggtggctctgatgtccggggacaaatacactttcgctaacagggattggcataaacccctggtcggcttcttacgggcgaaaggcatgtctcggaccgccacgctgtttttagtgggcttcacaagcgttcaagccaaatgtgtggacgtttgggaaaagaccattgccctatccggaaaaacaagctccgaggaactgctggaccagatatccgaaagagcctactccctgcacaggatgaggaaacaagaccgccggggcgattacaaggaatccgtgggaatcaccgccgtggcggacatcatcccgcacgtagagcatcgggttgacgtccattcgggcgagatggtggaaaacagcggcaatgtctggcaggaagcggatgaagattacggattcttcatgaagcgttttgccgtttctctagtgccggaaattacggttgccgccaagcttgaacgagaacaactggctcggcgcaagccctggcccctaaaaccaaaatcaattaaaaaaccttcatccggaggcgataatgaatgagagcaccgtgaaatttgttcggagcctgggcgaactcaaagagggcgacctgggcttgctcagaaagctcaggggtcgccgtctggatgaatccctgccgggtttcgacctgttttccggcctgtggtggccactccgcagtataagccccaaaacccccaggcggaaggtggtctggctagtcaccaagcttttcgcggaattccgctttgagcaaaagaaaggcgccagcctgccttggctcatgggcagaatatgccgtggacttaaagaagaaaaagagttcccacgtgttttagccaggttcgaccgcttgctcacgctcgagttgaaccaactggaggaaccgctggcgcaagtgctcgcgattttaaaaagacatgacattgccagtctggactgggttgccctcatcgatgacctctccgcttgggaacgggaatcaaacagagcgatatggtcagacacatttatttcagcatttaataatcagcaaggaggaatcaaatgttgattgaaatacacatgatccaaaaccacagcccggccaacctgaaccgggacgacctgggcgcgcccaagacctgttatttcggtggggtgttgcggtcccgcatctccagccagtgcctaaagcggagcatcaggatgagcgatgaattcaaaaacttgctcgggggtatccgtacccgtcggttggccgagttgattacaaaagctacaggacaggactgcaggaatcaggcagaggaagttctgaacaaagccggtttgaaacacgaaaacggacatagtaagatgctggtgttcatgacccggaacaagatcgatgcccttgctcaaattgtcaccagcgaaggcctgagtgttgcagagaaagccaagaaagcggcagatgtaatatcgggggcaatacattcccctgacatcgctctgtgcggaagaatgctcgagcccgataccaaggacaagaacacagacaaggtcaagtgggaaaataccactgttgaagcagccctgcaggtgtcgcacgccatttcaacccacatcgcccgcccagaaatagattactatgtagcagctgatgacgagcctggcgacgacacaggtgctggattcatagacgaggcgatgtttgcttcggcctgtttctacaaatattactcaattgattggaataccttgataatcaacctccagggtaatgaaaagttggcagctcatactgtcggagcctttatccaggccgctgcactcactaatcccagcggaaagcagaacagctttgccgcacataaccttcccgatggaatattggtagaaataaaagagacacctgtcagctatgcaaatgcctttgtgcgaccggtgggaatcgttaaggattctgacttggtagaacaaagcattggccaactggccaactatgtgaaggatataagtgccggtttcttccctggacagatgaaaggcaacgctctgtggttctcgcccaatggacgttatcccctaaagcctcaacagggcacgctggacataaagccagtttgcaacctgctagaacttgttcgcgaagcagttgagatgttgggttttgaatgggatgatgtaaaaaacgagaaagtagagagttgaaatgtcttctccgcctaataccctgttcctgagattggaggctccccttcaggcctggggaagcaatgaggccaaattcgccgtgcgcaggacagccgacgcgcccaccaaatccggagtggcaggcctgctctgcgctgccctgggaatcagccgggccgaagccggacagtattggctgggtgaaattgccaaattgcgcatgggggtgcggatagaccgcccgggcatccgctggtgggattaccatactgtgggagcggagcagaagctgcgcatttctgacctgaaaatgcccaacggcctagttctggttggcactgccctggccaaaaacctgggcgcggacaagatcaaatccaaacccggggctttgctctcccgacgcgagtatttggctgatgccagcttcctggttgcgctccagggtgaaccggatatcgtggcacaactggctgaagcgctgaaaaaaccagtctggacgctttatctggggcgaaaatcctgtcccccctcccgtccggtggatgaacacccgccagggttttatgccagtctgaaagaggctttgcggtcgatcccggcgcaactgagggaaaaaggcgaaccgatacctgacagtgttccctgtgtgctcgactgggttccggcccatgatgacgtgcacgctccgccgaacgccgaagcgcattacgacgtgccggtgtcctttgagcctccccaccacttgccccggctggtgatccgctgtaacctgccattggaccgcaacttcgaggcagagaccgtgctttccggcaaagcctggcaaccgccccgcaaccgggcaaattacgacaatcctgaatacaaaagggtccgcgctgagcgtttggtgatggacaatgccgcctgcatgttctgcaaggcacccgccactactgtgcagcacgtgaattaccgacgcgccggaggcagcgagaagccggaggacttgcgcgccctctgccgcctctgccacgatgcctgcaccatgctggaatatggcagcggcatgaccatggaccgcatagatccctgtgaccccgcctggcgtgagcgcatcttggccaaacgcgaggaaataatcaaattccgctcgctggagcagcgcaggcgcaaactcgatccgaaggaggagaacggatgatgtatctatcccaactgctcatcgacacaggcggcaaccctgaccggccaaggcccgggcgcttgtggctgaacaatatctataatgtccaccggcggctcagcatggctttccccatgcgcaagcgcaaggaaggagacccgaggtttctgcagccctttgaccccgcagattttgaaaagcgccagttcctctttcgggtggacaacaacaccgatggagaaaatcaaagggcgatggttttggtgcagtcgtccctgccgccggattgggactgggctttccagaatgccacgggatttttggcagcccctccccaggttaaggaatacgatccccagttctcagcaggtcagcggctgcgcttccgcatcctcgtgaatgccagtgtcaaacgcaaaatcgacgagttgcgggaaggacccggaggaaaggaaaaaacgggaagggttctgcacaaacgggtcgcccttacctgggacacaaattccaacccaaaggatgcggtggcgcaatggtttgccgccaaggctggcagactgggcttcacgcccggggagaccgaactggtaagcctgggctgggtatacggttccaaaccggagccccggggaaattcgccccggcgtgagaacgaataccgtcccctgagataccgttccgccctgctggaaggttatctgacagtggatgatgcctttctgttccgggaagccttggaaaaaggtatcggcagcgccaaaggaatgggcttcggcctcctttccgtggttccggcaagtgatgcgtaacagagaccttcacctaatgccaaaaatgcgggaccgcttcacctatctctatgtggagcatgccaaaatagacaaagaacaacaggcaatcgcctttcacgatgccatgggctccactcctgttccctgcgctggactggccctgctgatgctggggccaggcgtatccatcacccatgcggccatccttgttttagcagaatgcggctgtttggtggcttgggtgggggaacagggagtccgcttttactcatccgggacagggaccacccgtagttccgccaaccttatgcgtcaggctgccgcctggtcaaatcgagatacgcatctgcggatagttcgcagaatgtatgaattgaggttcaaggaaaaactggacccaaccctctctcttgaacagataaggggaaaagagggagcgagagtacgggatacctatttcagactttcaaaagaattcgatgtgcccatgagtgcgaggaattacgacaggagcaactggaataaaaccgaccccatcaacagagccctgtccgttgccaattcctgtctctatggcatctgccacgccgcgatagtggccgctggctattcacctgccctgggtttcgttcatactggcaaacaactgtcatttgtttatgacattgccgatctttataaaatggaaacctccgtgcccgcggctttcatagccacagccgcaggggtcgataacctggacagaaggacacgcattgcctgccgtgaccagttctatcaatttggtctgctaaagaagatagtggccgacattcacgcccttttcggtattctggaaacttcggacgatgagccagaccttgctgatgtcgatccagccgtgccaggcgggctttggaacccagatgataaagtgagccccggcggcttgtcatggggtctggatgatcctggaggccatgatgatggttctggtgcttgaaaaagttccctctggcctgagaggagaaattacacgctggctcctcgaaatcaaggctggagtatttgtcggtcaggtatcggccatgataagggaaaagctgtgggacaaggccaggtctggttgtgccggtggaacttgtatcatgatttacagcaagcattgcgaacaaggctttggaattgagttttggggtgccgcggaaaggatagtgacagaatgggaaggattgaaattgatgaccaagcatccgtgatccatacttgaagcctgttcaatggcctcaaagcgtctactttcgaagtgtgttccccacctgcgtgggggtgaaccgtcgccca

SEQ ID NO: 733 - DNA, 7342 bp, Artificial Sequence
  Synthetic Oligonucleotide
catatagtagatgcaagaatcgttccgaatctgccacaataactgcggattcctttcccaaagcctttttcgcccacggacaggccgtttgccccttcccactaacatcccgtaaacctccccttaaattcccgcccggccaatgggaactcagcgggaagtattttagatgtgtatgggatggggcaaatggggcttctattgatagtgggtatcaaaatgggaggaagtccacaaattgcgcgaattcatacgaattgcttttccagttacgctaccaactgtggtagataacctaaaataaaggacttacttcccaatcgggcaagtaatccatatgtttggagcccgaaggtcccagaacgattggccgacggggacatcgaccttcctgacgctggcgtcgagcgaggcacgagcatggacgccagcaacatctcctgtagtccatactcgcaagctcgctgcactccaggctcaccaacgttggaaggcaaattcacaaattcacaaccggtaaatatggcttgtgaatttgcaacctgctgatagacgggtaattatgaggctaattcacaaaaaaggggtctcttatacatccgcggaagccgattgtaaacaggatatgatgtatccacgctaccagtctataatacatatagaaatagtatatataatatataatagtattatatattattatatattgatattatatcatctctaccttcccttcatctcttgtttgcggcatgagccactgcaaaccggcattctcccctggtccggctggatataagagataagcgtattttgtgaatttgtcccccaactcactgtgccacaataacacacggattcacaagccatatttaccggttgtgaatttgtgaatctgaccttgccggccttaaggaagtttgaaattagagccctattttggacttgacaaattattccttggtaaatttggtgtataatagctatggggcataatgatgttagcctgtggaacggcctctgtaaaggatcaacaagctatcaaccctccccatgcgacaggagcttcaatgtattataatttgacagacaaaccctggatcagtgtgctacagcttgacgggcattctgccaggctcggcctggctgaggtcctgcgaaaagcacacacactgcgtttggcttacggcaatccgatggaccgcatgtccgttttccgtttcctcctcgccctgggctattggtgttttgccaatacaaaacaagcgccggtatcagataagccactgcctcaggcatggacggactggcttgaacaaaaccaagaatatttcgaattgttcggtgatggccccagattctaccaatccccaggaacatccagaatacgccccagcacggaccttatccacgagcttcccacggcaaacaatttctggcacttccgccatgtgaccgatttcatcgatggcatttgcccagcttgctgcgttaccggtctgctgcgcctgccactctttaccaccgtaggcggcagcggaatcggagccggcatcaacagaactcctcccttctatgccatctggcagggtgatagtctgtcggaatcgatattcctgaattgggaacccacttcccggttgggtgttcctgcctggctgaacccgtttggatcccaaaacgagaaggatgtagccttgctgactggcctcacctggctgccccgcaaggtattcctgcttggcccggtgtcagacggagcaaaatgcagcgcctgcggagaagagcatgagcctctggtctatgcctgcaacaatgaggcggtgaaagtgcctccgaaccttgtctggaacgaccctcacgcgatttaccgggatgacaataatggcctgactgcccaggtggctctgatgtccggggacaaatacactttcgctaacagggattggcataaacccctggtcggcttcttacgggcgaaaggcatgtctcggaccgccacgctgtttttagtgggcttcacaagcgttcaagccaaatgtgtggacgtttgggaaaagaccattgccctatccggaaaaacaagctccgaggaactgctggaccagatatccgaaagagcctactccctgcacaggatgaggaaacaagaccgccggggcgattacaaggaatccgtgggaatcaccgccgtggcggacatcatcccgcacgtagagcatcgggttgacgtccattcgggcgagatggtggaaaacagcggcaatgtctggcaggaagcggatgaagattacggattcttcatgaagcgttttgccgtttctctagtgccggaaattacggttgccgccaagcttgaacgagaacaactggctcggcgcaagccctggcccctaaaaccaaaatcaattaaaaaaccttcatccggaggcgataatgaatgagagcaccgtgaaatttgttcggagcctgggcgaactcaaagagggcgacctgggcttgctcagaaagctcaggggtcgccgtctggatgaatccctgccgggtttcgacctgttttccggcctgtggtggccactccgcagtataagccccaaaacccccaggcggaaggtggtctggctagtcaccaagcttttcgcggaattccgctttgagcaaaagaaaggcgccagcctgccttggctcatgggcagaatatgccgtggacttaaagaagaaaaagagttcccacgtgttttagccaggttcgaccgcttgctcacgctcgagttgaaccaactggaggaaccgctggcgcaagtgctcgcgattttaaaaagacatgacattgccagtctggactgggttgccctcatcgatgacctctccgcttgggaacgggaatcaaacagagcgatatggtcagacacatttatttcagcatttaataatcagcaaggaggaatcaaatgttgattgaaatacacatgatccaaaaccacagcccggccaacctgaaccgggacgacctgggcgcgcccaagacctgttatttcggtggggtgttgcggtcccgcatctccagccagtgcctaaagcggagcatcaggatgagcgatgaattcaaaaacttgctcgggggtatccgtacccgtcggttggccgagttgattacaaaagctacaggacaggactgcaggaatcaggcagaggaagttctgaacaaagccggtttgaaacacgaaaacggacatagtaagatgctggtgttcatgacccggaacaagatcgatgcccttgctcaaattgtcaccagcgaaggcctgagtgttgcagagaaagccaagaaagcggcagatgtaatatcgggggcaatacattcccctgacatcgctctgtgcggaagaatgctcgagcccgataccaaggacaagaacacagacaaggtcaagtgggaaaataccactgttgaagcagccctgcaggtgtcgcacgccatttcaacccacatcgcccgcccagaaatagattactatgtagcagctgatgacgagcctggcgacgacacaggtgctggattcatagacgaggcgatgtttgcttcggcctgtttctacaaatattactcaattgattggaataccttgataatcaacctccagggtaatgaaaagttggcagctcatactgtcggagcctttatccaggccgctgcactcactaatcccagcggaaagcagaacagctttgccgcacataaccttcccgatggaatattggtagaaataaaagagacacctgtcagctatgcaaatgcctttgtgcgaccggtgggaatcgttaaggattctgacttggtagaacaaagcattggccaactggccaactatgtgaaggatataagtgccggtttcttccctggacagatgaaaggcaacgctctgtggttctcgcccaatggacgttatcccctaaagcctcaacagggcacgctggacataaagccagtttgcaacctgctagaacttgttcgcgaagcagttgagatgttgggttttgaatgggatgatgtaaaaaacgagaaagtagagagttgaaatgtcttctccgcctaataccctgttcctgagattggaggctccccttcaggcctggggaagcaatgaggccaaattcgccgtgcgcaggacagccgacgcgcccaccaaatccggagtggcaggcctgctctgcgctgccctgggaatcagccgggccgaagccggacagtattggctgggtgaaattgccaaattgcgcatgggggtgcggatagaccgcccgggcatccgctggtgggattaccatactgtgggagcggagcagaagctgcgcatttctgacctgaaaatgcccaacggcctagttctggttggcactgccctggccaaaaacctgggcgcggacaagatcaaatccaaacccggggctttgctctcccgacgcgagtatttggctgatgccagcttcctggttgcgctccagggtgaaccggatatcgtggcacaactggctgaagcgctgaaaaaaccagtctggacgctttatctggggcgaaaatcctgtcccccctcccgtccggtggatgaacacccgccagggttttatgccagtctgaaagaggctttgcggtcgatcccggcgcaactgagggaaaaaggcgaaccgatacctgacagtgttccctgtgtgctcgactgggttccggcccatgatgacgtgcacgctccgccgaacgccgaagcgcattacgacgtgccggtgtcctttgagcctccccaccacttgccccggctggtgatccgctgtaacctgccattggaccgcaacttcgaggcagagaccgtgctttccggcaaagcctggcaaccgccccgcaaccgggcaaattacgacaatcctgaatacaaaagggtccgcgctgagcgtttggtgatggacaatgccgcctgcatgttctgcaaggcacccgccactactgtgcagcacgtgaattaccgacgcgccggaggcagcgagaagccggaggacttgcgcgccctctgccgcctctgccacgatgcctgcaccatgctggaatatggcagcggcatgaccatggaccgcatagatccctgtgaccccgcctggcgtgagcgcatcttggccaaacgcgaggaaataatcaaattccgctcgctggagcagcgcaggcgcaaactcgatccgaaggaggagaacggatgatgtatctatcccaactgctcatcgacacaggcggcaaccctgaccggccaaggcccgggcgcttgtggctgaacaatatctataatgtccaccggcggctcagcatggctttccccatgcgcaagcgcaaggaaggagacccgaggtttctgcagccctttgaccccgcagattttgaaaagcgccagttcctctttcgggtggacaacaacaccgatggagaaaatcaaagggcgatggttttggtgcagtcgtccctgccgccggattgggactgggctttccagaatgccacgggatttttggcagcccctccccaggttaaggaatacgatccccagttctcagcaggtcagcggctgcgcttccgcatcctcgtgaatgccagtgtcaaacgcaaaatcgacgagttgcgggaaggacccggaggaaaggaaaaaacgggaagggttctgcacaaacgggtcgcccttacctgggacacaaattccaacccaaaggatgcggtggcgcaatggtttgccgccaaggctggcagactgggcttcacgcccggggagaccgaactggtaagcctgggctgggtatacggttccaaaccggagccccggggaaattcgccccggcgtgagaacgaataccgtcccctgagataccgttccgccctgctggaaggttatctgacagtggatgatgcctttctgttccgggaagccttggaaaaaggtatcggcagcgccaaaggaatgggcttcggcctcctttccgtggttccggcaagtgatgcgtaacagagaccttcacctaatgccaaaaatgcgggaccgcttcacctatctctatgtggagcatgccaaaatagacaaagaacaacaggcaatcgcctttcacgatgccatgggctccactcctgttccctgcgctggactggccctgctgatgctggggccaggcgtatccatcacccatgcggccatccttgttttagcagaatgcggctgtttggtggcttgggtgggggaacagggagtccgcttttactcatccgggacagggaccacccgtagttccgccaaccttatgcgtcaggctgccgcctggtcaaatcgagatacgcatctgcggatagttcgcagaatgtatgaattgaggttcaaggaaaaactggacccaaccctctctcttgaacagataaggggaaaagagggagcgagagtacgggatacctatttcagactttcaaaagaattcgatgtgcccatgagtgcgaggaattacgacaggagcaactggaataaaaccgaccccatcaacagagccctgtccgttgccaattcctgtctctatggcatctgccacgccgcgatagtggccgctggctattcacctgccctgggtttcgttcatactggcaaacaactgtcatttgtttatgacattgccgatctttataaaatggaaacctccgtgcccgcggctttcatagccacagccgcaggggtcgataacctggacagaaggacacgcattgcctgccgtgaccagttctatcaatttggtctgctaaagaagatagtggccgacattcacgcccttttcggtattctggaaacttcggacgatgagccagaccttgctgatgtcgatccagccgtgccaggcgggctttggaacccagatgataaagtgagccccggcggcttgtcatggggtctggatgatcctggaggccatgatgatggttctggtgcttgaaaaagttccctctggcctgagaggagaaattacacgctggctcctcgaaatcaaggctggagtatttgtcggtcaggtatcggccatgataagggaaaagctgtgggacaaggccaggtctggttgtgccggtggaacttgtatcatgatttacagcaagcattgcgaacaaggctttggaattgagttttggggtgccgcggaaaggatagtgacagaatgggaaggattgaaattgatgaccaagcatccgtgatccatacttgaagcctgttcaatggcctcaaagcgtctactttcgaagtgtgttccccacctgcgtgggggtgaaccgacatct

SEQ ID NO: 734 - DNA, 7342 bp, Artificial Sequence
  Synthetic Oligonucleotide
ggaacgcggttcacccccacgcaggtggggaacacacttcgaaagtagacgctttgaggccattgaacaggcttcaagtatggatcacggatgcttggtcatcaatttcaatccttcccattctgtcactatcctttccgcggcaccccaaaactcaattccaaagccttgttcgcaatgcttgctgtaaatcatgatacaagttccaccggcacaaccagacctggccttgtcccacagcttttcccttatcatggccgatacctgaccgacaaatactccagccttgatttcgaggagccagcgtgtaatttctcctctcaggccagagggaactttttcaagcaccagaaccatcatcatggcctccaggatcatccagaccccatgacaagccgccggggctcactttatcatctgggttccaaagcccgcctggcacggctggatcgacatcagcaaggtctggctcatcgtccgaagtttccagaataccgaaaagggcgtgaatgtcggccactatcttctttagcagaccaaattgatagaactggtcacggcaggcaatgcgtgtccttctgtccaggttatcgacccctgcggctgtggctatgaaagccgcgggcacggaggtttccattttataaagatcggcaatgtcataaacaaatgacagttgtttgccagtatgaacgaaacccagggcaggtgaatagccagcggccactatcgcggcgtggcagatgccatagagacaggaattggcaacggacagggctctgttgatggggtcggttttattccagttgctcctgtcgtaattcctcgcactcatgggcacatcgaattcttttgaaagtctgaaataggtatcccgtactctcgctccctcttttccccttatctgttcaagagagagggttgggtccagtttttccttgaacctcaattcatacattctgcgaactatccgcagatgcgtatctcgatttgaccaggcggcagcctgacgcataaggttggcggaactacgggtggtccctgtcccggatgagtaaaagcggactccctgttcccccacccaagccaccaaacagccgcattctgctaaaacaaggatggccgcatgggtgatggatacgcctggccccagcatcagcagggccagtccagcgcagggaacaggagtggagcccatggcatcgtgaaaggcgattgcctgttgttctttgtctattttggcatgctccacatagagataggtgaagcggtcccgcatttttggcattaggtgaaggtctctgttacgcatcacttgccggaaccacggaaaggaggccgaagcccattcctttggcgctgccgatacctttttccaaggcttcccggaacagaaaggcatcatccactgtcagataaccttccagcagggcggaacggtatctcaggggacggtattcgttctcacgccggggcgaatttccccggggctccggtttggaaccgtatacccagcccaggcttaccagttcggtctccccgggcgtgaagcccagtctgccagccttggcggcaaaccattgcgccaccgcatcctttgggttggaatttgtgtcccaggtaagggcgacccgtttgtgcagaacccttcccgttttttcctttcctccgggtccttcccgcaactcgtcgattttgcgtttgacactggcattcacgaggatgcggaagcgcagccgctgacctgctgagaactggggatcgtattccttaacctggggaggggctgccaaaaatcccgtggcattctggaaagcccagtcccaatccggcggcagggacgactgcaccaaaaccatcgccctttgattttctccatcggtgttgttgtccacccgaaagaggaactggcgcttttcaaaatctgcggggtcaaagggctgcagaaacctcgggtctccttccttgcgcttgcgcatggggaaagccatgctgagccgccggtggacattatagatattgttcagccacaagcgcccgggccttggccggtcagggttgccgcctgtgtcgatgagcagttgggatagatacatcatccgttctcctccttcggatcgagtttgcgcctgcgctgctccagcgagcggaatttgattatttcctcgcgtttggccaagatgcgctcacgccaggcggggtcacagggatctatgcggtccatggtcatgccgctgccatattccagcatggtgcaggcatcgtggcagaggcggcagagggcgcgcaagtcctccggcttctcgctgcctccggcgcgtcggtaattcacgtgctgcacagtagtggcgggtgccttgcagaacatgcaggcggcattgtccatcaccaaacgctcagcgcggacccttttgtattcaggattgtcgtaatttgcccggttgcggggcggttgccaggctttgccggaaagcacggtctctgcctcgaagttgcggtccaatggcaggttacagcggatcaccagccggggcaagtggtggggaggctcaaaggacaccggcacgtcgtaatgcgcttcggcgttcggcggagcgtgcacgtcatcatgggccggaacccagtcgagcacacagggaacactgtcaggtatcggttcgcctttttccctcagttgcgccgggatcgaccgcaaagcctctttcagactggcataaaaccctggcgggtgttcatccaccggacgggaggggggacaggattttcgccccagataaagcgtccagactggttttttcagcgcttcagccagttgtgccacgatatccggttcaccctggagcgcaaccaggaagctggcatcagccaaatactcgcgtcgggagagcaaagccccgggtttggatttgatcttgtccgcgcccaggtttttggccagggcagtgccaaccagaactaggccgttgggcattttcaggtcagaaatgcgcagcttctgctccgctcccacagtatggtaatcccaccagcggatgcccgggcggtctatccgcacccccatgcgcaatttggcaatttcacccagccaatactgtccggcttcggcccggctgattcccagggcagcgcagagcaggcctgccactccggatttggtgggcgcgtcggctgtcctgcgcacggcgaatttggcctcattgcttccccaggcctgaaggggagcctccaatctcaggaacagggtattaggcggagaagacatttcaactctctactttctcgttttttacatcatcccattcaaaacccaacatctcaactgcttcgcgaacaagttctagcaggttgcaaactggctttatgtccagcgtgccctgttgaggctttaggggataacgtccattgggcgagaaccacagagcgttgcctttcatctgtccagggaagaaaccggcacttatatccttcacatagttggccagttggccaatgctttgttctaccaagtcagaatccttaacgattcccaccggtcgcacaaaggcatttgcatagctgacaggtgtctcttttatttctaccaatattccatcgggaaggttatgtgcggcaaagctgttctgctttccgctgggattagtgagtgcagcggcctggataaaggctccgacagtatgagctgccaacttttcattaccctggaggttgattatcaaggtattccaatcaattgagtaatatttgtagaaacaggccgaagcaaacatcgcctcgtctatgaatccagcacctgtgtcgtcgccaggctcgtcatcagctgctacatagtaatctatttctgggcgggcgatgtgggttgaaatggcgtgcgacacctgcagggctgcttcaacagtggtattttcccacttgaccttgtctgtgttcttgtccttggtatcgggctcgagcattcttccgcacagagcgatgtcaggggaatgtattgcccccgatattacatctgccgctttcttggctttctctgcaacactcaggccttcgctggtgacaatttgagcaagggcatcgatcttgttccgggtcatgaacaccagcatcttactatgtccgttttcgtgtttcaaaccggctttgttcagaacttcctctgcctgattcctgcagtcctgtcctgtagcttttgtaatcaactcggccaaccgacgggtacggatacccccgagcaagtttttgaattcatcgctcatcctgatgctccgctttaggcactggctggagatgcgggaccgcaacaccccaccgaaataacaggtcttgggcgcgcccaggtcgtcccggttcaggttggccgggctgtggttttggatcatgtgtatttcaatcaacatttgattcctccttgctgattattaaatgctgaaataaatgtgtctgaccatatcgctctgtttgattcccgttcccaagcggagaggtcatcgatgagggcaacccagtccagactggcaatgtcatgtctttttaaaatcgcgagcacttgcgccagcggttcctccagttggttcaactcgagcgtgagcaagcggtcgaacctggctaaaacacgtgggaactctttttcttctttaagtccacggcatattctgcccatgagccaaggcaggctggcgcctttcttttgctcaaagcggaattccgcgaaaagcttggtgactagccagaccaccttccgcctgggggttttggggcttatactgcggagtggccaccacaggccggaaaacaggtcgaaacccggcagggattcatccagacggcgacccctgagctttctgagcaagcccaggtcgccctctttgagttcgcccaggctccgaacaaatttcacggtgctctcattcattatcgcctccggatgaaggttttttaattgattttggttttaggggccagggcttgcgccgagccagttgttctcgttcaagcttggcggcaaccgtaatttccggcactagagaaacggcaaaacgcttcatgaagaatccgtaatcttcatccgcttcctgccagacattgccgctgttttccaccatctcgcccgaatggacgtcaacccgatgctctacgtgcgggatgatgtccgccacggcggtgattcccacggattccttgtaatcgccccggcggtcttgtttcctcatcctgtgcagggagtaggctctttcggatatctggtccagcagttcctcggagcttgtttttccggatagggcaatggtcttttcccaaacgtccacacatttggcttgaacgcttgtgaagcccactaaaaacagcgtggcggtccgagacatgcctttcgcccgtaagaagccgaccaggggtttatgccaatccctgttagcgaaagtgtatttgtccccggacatcagagccacctgggcagtcaggccattattgtcatcccggtaaatcgcgtgagggtcgttccagacaaggttcggaggcactttcaccgcctcattgttgcaggcatagaccagaggctcatgctcttctccgcaggcgctgcattttgctccgtctgacaccgggccaagcaggaataccttgcggggcagccaggtgaggccagtcagcaaggctacatccttctcgttttgggatccaaacgggttcagccaggcaggaacacccaaccgggaagtgggttcccaattcaggaatatcgattccgacagactatcaccctgccagatggcatagaagggaggagttctgttgatgccggctccgattccgctgccgcctacggtggtaaagagtggcaggcgcagcagaccggtaacgcagcaagctgggcaaatgccatcgatgaaatcggtcacatggcggaagtgccagaaattgtttgccgtgggaagctcgtggataaggtccgtgctggggcgtattctggatgttcctggggattggtagaatctggggccatcaccgaacaattcgaaatattcttggttttgttcaagccagtccgtccatgcctgaggcagtggcttatctgataccggcgcttgttttgtattggcaaaacaccaatagcccagggcgaggaggaaacggaaaacggacatgcggtccatcggattgccgtaagccaaacgcagtgtgtgtgcttttcgcaggacctcagccaggccgagcctggcagaatgcccgtcaagctgtagcacactgatccagggtttgtctgtcaaattataatacattgaagctcctgtcgcatggggagggttgatagcttgttgatcctttacagaggccgttccacaggctaacatcattatgccccatagctattatacaccaaatttaccaaggaataatttgtcaagtccaaaatagggctctaatttcaaacttccttaaggccggcaaggtcagattcacaaattcacaaccggtaaatatggcttgtgaatccgtgtgttattgtggcacagtgagttgggggacaaattcacaaaatacgcttatctcttatatccagccggaccaggggagaatgccggtttgcagtggctcatgccgcaaacaagagatgaagggaaggtagagatgatataatatcaatatataataatatataatactattatatattatatatactatttctatatgtattatagactggtagcgtggatacatcatatcctgtttacaatcggcttccgcggatgtataagagaccccttttttgtgaattagcctcataattacccgtctatcagcaggttgcaaattcacaagccatatttaccggttgtgaatttgtgaatttgccttccaacgttggtgagcctggagtgcagcgagcttgcgagtatggactacaggagatgttgctggcgtccatgctcgtgcctcgctcgacgccagcgtcaggaaggtcgatgtccccgtcggccaatcgttctgggaccttcgggctccaaacatatggattacttgcccgattgggaagtaagtcctttattttaggttatctaccacagttggtagcgtaactggaaaagcaattcgtatgaattcgcgcaatttgtggacttcctcccattttgatacccactatcaatagaagccccatttgccccatcccatacacatctaaaatacttcccgctgagttcccattggccgggcgggaatttaaggggaggtttacgggatgttagtgggaaggggcaaacggcctgtccgtgggcgaaaaaggctttgggaaaggaatccgcagttattgtggcagattcggaacgattcttgcatctactatatg

SEQ ID NO: 735 - DNA, 7340 bp, Artificial Sequence
  Synthetic Oligonucleotide
catatagtagatgcaagaatcgttccgaatctgccacaataactgcggattcctttcccaaagcctttttcgcccacggacaggccgtttgccccttcccactaacatcccgtaaacctccccttaaattcccgcccggccaatgggaactcagcgggaagtattttagatgtgtatgggatggggcaaatggggcttctattgatagtgggtatcaaaatgggaggaagtccacaaattgcgcgaattcatacgaattgcttttccagttacgctaccaactgtggtagataacctaaaataaaggacttacttcccaatcgggcaagtaatccatatgtttggagcccgaaggtcccagaacgattggccgacggggacatcgaccttcctgacgctggcgtcgagcgaggcacgagcatggacgccagcaacatctcctgtagtccatactcgcaagctcgctgcactccaggctcaccaacgttggaaggcaaattcacaaattcacaaccggtaaatatggcttgtgaatttgcaacctgctgatagacgggtaattatgaggctaattcacaaaaaaggggtctcttatacatccgcggaagccgattgtaaacaggatatgatgtatccacgctaccagtctataatacatatagaaatagtatatataatatataatagtattatatattattatatattgatattatatcatctctaccttcccttcatctcttgtttgcggcatgagccactgcaaaccggcattctcccctggtccggctggatataagagataagcgtattttgtgaatttgtcccccaactcactgtgccacaataacacacggattcacaagccatatttaccggttgtgaatttgtgaatctgaccttgccggccttaaggaagtttgaaattagagccctattttggacttgacaaattattccttggtaaatttggtgtataatagctatggggcataatgatgttagcctgtggaacggcctctgtaaaggatcaacaagctatcaaccctccccatgcgacaggagcttcaatgtattataatttgacagacaaaccctggatcagtgtgctacagcttgacgggcattctgccaggctcggcctggctgaggtcctgcgaaaagcacacacactgcgtttggcttacggcaatccgatggaccgcatgtccgttttccgtttcctcctcgccctgggctattggtgttttgccaatacaaaacaagcgccggtatcagataagccactgcctcaggcatggacggactggcttgaacaaaaccaagaatatttcgaattgttcggtgatggccccagattctaccaatccccaggaacatccagaatacgccccagcacggaccttatccacgagcttcccacggcaaacaatttctggcacttccgccatgtgaccgatttcatcgatggcatttgcccagcttgctgcgttaccggtctgctgcgcctgccactctttaccaccgtaggcggcagcggaatcggagccggcatcaacagaactcctcccttctatgccatctggcagggtgatagtctgtcggaatcgatattcctgaattgggaacccacttcccggttgggtgttcctgcctggctgaacccgtttggatcccaaaacgagaaggatgtagccttgctgactggcctcacctggctgccccgcaaggtattcctgcttggcccggtgtcagacggagcaaaatgcagcgcctgcggagaagagcatgagcctctggtctatgcctgcaacaatgaggcggtgaaagtgcctccgaaccttgtctggaacgaccctcacgcgatttaccgggatgacaataatggcctgactgcccaggtggctctgatgtccggggacaaatacactttcgctaacagggattggcataaacccctggtcggcttcttacgggcgaaaggcatgtctcggaccgccacgctgtttttagtgggcttcacaagcgttcaagccaaatgtgtggacgtttgggaaaagaccattgccctatccggaaaaacaagctccgaggaactgctggaccagatatccgaaagagcctactccctgcacaggatgaggaaacaagaccgccggggcgattacaaggaatccgtgggaatcaccgccgtggcggacatcatcccgcacgtagagcatcgggttgacgtccattcgggcgagatggtggaaaacagcggcaatgtctggcaggaagcggatgaagattacggattcttcatgaagcgttttgccgtttctctagtgccggaaattacggttgccgccaagcttgaacgagaacaactggctcggcgcaagccctggcccctaaaaccaaaatcaattaaaaaaccttcatccggaggcgataatgaatgagagcaccgtgaaatttgttcggagcctgggcgaactcaaagagggcgacctgggcttgctcagaaagctcaggggtcgccgtctggatgaatccctgccgggtttcgacctgttttccggcctgtggtggccactccgcagtataagccccaaaacccccaggcggaaggtggtctggctagtcaccaagcttttcgcggaattccgctttgagcaaaagaaaggcgccagcctgccttggctcatgggcagaatatgccgtggacttaaagaagaaaaagagttcccacgtgttttagccaggttcgaccgcttgctcacgctcgagttgaaccaactggaggaaccgctggcgcaagtgctcgcgattttaaaaagacatgacattgccagtctggactgggttgccctcatcgatgacctctccgcttgggaacgggaatcaaacagagcgatatggtcagacacatttatttcagcatttaataatcagcaaggaggaatcaaatgttgattgaaatacacatgatccaaaaccacagcccggccaacctgaaccgggacgacctgggcgcgcccaagacctgttatttcggtggggtgttgcggtcccgcatctccagccagtgcctaaagcggagcatcaggatgagcgatgaattcaaaaacttgctcgggggtatccgtacccgtcggttggccgagttgattacaaaagctacaggacaggactgcaggaatcaggcagaggaagttctgaacaaagccggtttgaaacacgaaaacggacatagtaagatgctggtgttcatgacccggaacaagatcgatgcccttgctcaaattgtcaccagcgaaggcctgagtgttgcagagaaagccaagaaagcggcagatgtaatatcgggggcaatacattcccctgacatcgctctgtgcggaagaatgctcgagcccgataccaaggacaagaacacagacaaggtcaagtgggaaaataccactgttgaagcagccctgcaggtgtcgcacgccatttcaacccacatcgcccgcccagaaatagattactatgtagcagctgatgacgagcctggcgacgacacaggtgctggattcatagacgaggcgatgtttgcttcggcctgtttctacaaatattactcaattgattggaataccttgataatcaacctccagggtaatgaaaagttggcagctcatactgtcggagcctttatccaggccgctgcactcactaatcccagcggaaagcagaacagctttgccgcacataaccttcccgatggaatattggtagaaataaaagagacacctgtcagctatgcaaatgcctttgtgcgaccggtgggaatcgttaaggattctgacttggtagaacaaagcattggccaactggccaactatgtgaaggatataagtgccggtttcttccctggacagatgaaaggcaacgctctgtggttctcgcccaatggacgttatcccctaaagcctcaacagggcacgctggacataaagccagtttgcaacctgctagaacttgttcgcgaagcagttgagatgttgggttttgaatgggatgatgtaaaaaacgagaaagtagagagttgaaatgtcttctccgcctaataccctgttcctgagattggaggctccccttcaggcctggggaagcaatgaggccaaattcgccgtgcgcaggacagccgacgcgcccaccaaatccggagtggcaggcctgctctgcgctgccctgggaatcagccgggccgaagccggacagtattggctgggtgaaattgccaaattgcgcatgggggtgcggatagaccgcccgggcatccgctggtgggattaccatactgtgggagcggagcagaagctgcgcatttctgacctgaaaatgcccaacggcctagttctggttggcactgccctggccaaaaacctgggcgcggacaagatcaaatccaaacccggggctttgctctcccgacgcgagtatttggctgatgccagcttcctggttgcgctccagggtgaaccggatatcgtggcacaactggctgaagcgctgaaaaaaccagtctggacgctttatctggggcgaaaatcctgtcccccctcccgtccggtggatgaacacccgccagggttttatgccagtctgaaagaggctttgcggtcgatcccggcgcaactgagggaaaaaggcgaaccgatacctgacagtgttccctgtgtgctcgactgggttccggcccatgatgacgtgcacgctccgccgaacgccgaagcgcattacgacgtgccggtgtcctttgagcctccccaccacttgccccggctggtgatccgctgtaacctgccattggaccgcaacttcgaggcagagaccgtgctttccggcaaagcctggcaaccgccccgcaaccgggcaaattacgacaatcctgaatacaaaagggtccgcgctgagcgtttggtgatggacaatgccgcctgcatgttctgcaaggcacccgccactactgtgcagcacgtgaattaccgacgcgccggaggcagcgagaagccggaggacttgcgcgccctctgccgcctctgccacgatgcctgcaccatgctggaatatggcagcggcatgaccatggaccgcatagatccctgtgaccccgcctggcgtgagcgcatcttggccaaacgcgaggaaataatcaaattccgctcgctggagcagcgcaggcgcaaactcgatccgaaggaggagaacggatgatgtatctatcccaactgctcatcgacacaggcggcaaccctgaccggccaaggcccgggcgcttgtggctgaacaatatctataatgtccaccggcggctcagcatggctttccccatgcgcaagcgcaaggaaggagacccgaggtttctgcagccctttgaccccgcagattttgaaaagcgccagttcctctttcgggtggacaacaacaccgatggagaaaatcaaagggcgatggttttggtgcagtcgtccctgccgccggattgggactgggctttccagaatgccacgggatttttggcagcccctccccaggttaaggaatacgatccccagttctcagcaggtcagcggctgcgcttccgcatcctcgtgaatgccagtgtcaaacgcaaaatcgacgagttgcgggaaggacccggaggaaaggaaaaaacgggaagggttctgcacaaacgggtcgcccttacctgggacacaaattccaacccaaaggatgcggtggcgcaatggtttgccgccaaggctggcagactgggcttcacgcccggggagaccgaactggtaagcctgggctgggtatacggttccaaaccggagccccggggaaattcgccccggcgtgagaacgaataccgtcccctgagataccgttccgccctgctggaaggttatctgacagtggatgatgcctttctgttccgggaagccttggaaaaaggtatcggcagcgccaaaggaatgggcttcggcctcctttccgtggttccggcaagtgatgcgtaacagagaccttcacctaatgccaaaaatgcgggaccgcttcacctatctctatgtggagcatgccaaaatagacaaagaacaacaggcaatcgcctttcacgatgccatgggctccactcctgttccctgcgctggactggccctgctgatgctggggccaggcgtatccatcacccatgcggccatccttgttttagcagaatgcggctgtttggtggcttgggtgggggaacagggagtccgcttttactcatccgggacagggaccacccgtagttccgccaaccttatgcgtcaggctgccgcctggtcaaatcgagatacgcatctgcggatagttcgcagaatgtatgaattgaggttcaaggaaaaactggacccaaccctctctcttgaacagataaggggaaaagagggagcgagagtacgggatacctatttcagactttcaaaagaattcgatgtgcccatgagtgcgaggaattacgacaggagcaactggaataaaaccgaccccatcaacagagccctgtccgttgccaattcctgtctctatggcatctgccacgccgcgatagtggccgctggctattcacctgccctgggtttcgttcatactggcaaacaactgtcatttgtttatgacattgccgatctttataaaatggaaacctccgtgcccgcggctttcatagccacagccgcaggggtcgataacctggacagaaggacacgcattgcctgccgtgaccagttctatcaatttggtctgctaaagaagatagtggccgacattcacgcccttttcggtattctggaaacttcggacgatgagccagaccttgctgatgtcgatccagccgtgccaggcgggctttggaacccagatgataaagtgagccccggcggcttgtcatggggtctggatgatcctggaggccatgatgatggttctggtgcttgaaaaagttccctctggcctgagaggagaaattacacgctggctcctcgaaatcaaggctggagtatttgtcggtcaggtatcggccatgataagggaaaagctgtgggacaaggccaggtctggttgtgccggtggaacttgtatcatgatttacagcaagcattgcgaacaaggctttggaattgagttttggggtgccgcggaaaggatagtgacagaatgggaaggattgaaattgatgaccaagcatccgtgatccatacttgaagcctgttcaatggcctcaaagcgtctactttcgaagtgtgttccccacctgcgtgggggtgaaccggctc

SEQ ID NO: 736 - DNA, 7339 bp, Artificial Sequence
  Synthetic Oligonucleotide
catatagtagatgcaagaatcgttccgaatctgccacaataactgcggattcctttcccaaagcctttttcgcccacggacaggccgtttgccccttcccactaacatcccgtaaacctccccttaaattcccgcccggccaatgggaactcagcgggaagtattttagatgtgtatgggatggggcaaatggggcttctattgatagtgggtatcaaaatgggaggaagtccacaaattgcgcgaattcatacgaattgcttttccagttacgctaccaactgtggtagataacctaaaataaaggacttacttcccaatcgggcaagtaatccatatgtttggagcccgaaggtcccagaacgattggccgacggggacatcgaccttcctgacgctggcgtcgagcgaggcacgagcatggacgccagcaacatctcctgtagtccatactcgcaagctcgctgcactccaggctcaccaacgttggaaggcaaattcacaaattcacaaccggtaaatatggcttgtgaatttgcaacctgctgatagacgggtaattatgaggctaattcacaaaaaaggggtctcttatacatccgcggaagccgattgtaaacaggatatgatgtatccacgctaccagtctataatacatatagaaatagtatatataatatataatagtattatatattattatatattgatattatatcatctctaccttcccttcatctcttgtttgcggcatgagccactgcaaaccggcattctcccctggtccggctggatataagagataagcgtattttgtgaatttgtcccccaactcactgtgccacaataacacacggattcacaagccatatttaccggttgtgaatttgtgaatctgaccttgccggccttaaggaagtttgaaattagagccctattttggacttgacaaattattccttggtaaatttggtgtataatagctatggggcataatgatgttagcctgtggaacggcctctgtaaaggatcaacaagctatcaaccctccccatgcgacaggagcttcaatgtattataatttgacagacaaaccctggatcagtgtgctacagcttgacgggcattctgccaggctcggcctggctgaggtcctgcgaaaagcacacacactgcgtttggcttacggcaatccgatggaccgcatgtccgttttccgtttcctcctcgccctgggctattggtgttttgccaatacaaaacaagcgccggtatcagataagccactgcctcaggcatggacggactggcttgaacaaaaccaagaatatttcgaattgttcggtgatggccccagattctaccaatccccaggaacatccagaatacgccccagcacggaccttatccacgagcttcccacggcaaacaatttctggcacttccgccatgtgaccgatttcatcgatggcatttgcccagcttgctgcgttaccggtctgctgcgcctgccactctttaccaccgtaggcggcagcggaatcggagccggcatcaacagaactcctcccttctatgccatctggcagggtgatagtctgtcggaatcgatattcctgaattgggaacccacttcccggttgggtgttcctgcctggctgaacccgtttggatcccaaaacgagaaggatgtagccttgctgactggcctcacctggctgccccgcaaggtattcctgcttggcccggtgtcagacggagcaaaatgcagcgcctgcggagaagagcatgagcctctggtctatgcctgcaacaatgaggcggtgaaagtgcctccgaaccttgtctggaacgaccctcacgcgatttaccgggatgacaataatggcctgactgcccaggtggctctgatgtccggggacaaatacactttcgctaacagggattggcataaacccctggtcggcttcttacgggcgaaaggcatgtctcggaccgccacgctgtttttagtgggcttcacaagcgttcaagccaaatgtgtggacgtttgggaaaagaccattgccctatccggaaaaacaagctccgaggaactgctggaccagatatccgaaagagcctactccctgcacaggatgaggaaacaagaccgccggggcgattacaaggaatccgtgggaatcaccgccgtggcggacatcatcccgcacgtagagcatcgggttgacgtccattcgggcgagatggtggaaaacagcggcaatgtctggcaggaagcggatgaagattacggattcttcatgaagcgttttgccgtttctctagtgccggaaattacggttgccgccaagcttgaacgagaacaactggctcggcgcaagccctggcccctaaaaccaaaatcaattaaaaaaccttcatccggaggcgataatgaatgagagcaccgtgaaatttgttcggagcctgggcgaactcaaagagggcgacctgggcttgctcagaaagctcaggggtcgccgtctggatgaatccctgccgggtttcgacctgttttccggcctgtggtggccactccgcagtataagccccaaaacccccaggcggaaggtggtctggctagtcaccaagcttttcgcggaattccgctttgagcaaaagaaaggcgccagcctgccttggctcatgggcagaatatgccgtggacttaaagaagaaaaagagttcccacgtgttttagccaggttcgaccgcttgctcacgctcgagttgaaccaactggaggaaccgctggcgcaagtgctcgcgattttaaaaagacatgacattgccagtctggactgggttgccctcatcgatgacctctccgcttgggaacgggaatcaaacagagcgatatggtcagacacatttatttcagcatttaataatcagcaaggaggaatcaaatgttgattgaaatacacatgatccaaaaccacagcccggccaacctgaaccgggacgacctgggcgcgcccaagacctgttatttcggtggggtgttgcggtcccgcatctccagccagtgcctaaagcggagcatcaggatgagcgatgaattcaaaaacttgctcgggggtatccgtacccgtcggttggccgagttgattacaaaagctacaggacaggactgcaggaatcaggcagaggaagttctgaacaaagccggtttgaaacacgaaaacggacatagtaagatgctggtgttcatgacccggaacaagatcgatgcccttgctcaaattgtcaccagcgaaggcctgagtgttgcagagaaagccaagaaagcggcagatgtaatatcgggggcaatacattcccctgacatcgctctgtgcggaagaatgctcgagcccgataccaaggacaagaacacagacaaggtcaagtgggaaaataccactgttgaagcagccctgcaggtgtcgcacgccatttcaacccacatcgcccgcccagaaatagattactatgtagcagctgatgacgagcctggcgacgacacaggtgctggattcatagacgaggcgatgtttgcttcggcctgtttctacaaatattactcaattgattggaataccttgataatcaacctccagggtaatgaaaagttggcagctcatactgtcggagcctttatccaggccgctgcactcactaatcccagcggaaagcagaacagctttgccgcacataaccttcccgatggaatattggtagaaataaaagagacacctgtcagctatgcaaatgcctttgtgcgaccggtgggaatcgttaaggattctgacttggtagaacaaagcattggccaactggccaactatgtgaaggatataagtgccggtttcttccctggacagatgaaaggcaacgctctgtggttctcgcccaatggacgttatcccctaaagcctcaacagggcacgctggacataaagccagtttgcaacctgctagaacttgttcgcgaagcagttgagatgttgggttttgaatgggatgatgtaaaaaacgagaaagtagagagttgaaatgtcttctccgcctaataccctgttcctgagattggaggctccccttcaggcctggggaagcaatgaggccaaattcgccgtgcgcaggacagccgacgcgcccaccaaatccggagtggcaggcctgctctgcgctgccctgggaatcagccgggccgaagccggacagtattggctgggtgaaattgccaaattgcgcatgggggtgcggatagaccgcccgggcatccgctggtgggattaccatactgtgggagcggagcagaagctgcgcatttctgacctgaaaatgcccaacggcctagttctggttggcactgccctggccaaaaacctgggcgcggacaagatcaaatccaaacccggggctttgctctcccgacgcgagtatttggctgatgccagcttcctggttgcgctccagggtgaaccggatatcgtggcacaactggctgaagcgctgaaaaaaccagtctggacgctttatctggggcgaaaatcctgtcccccctcccgtccggtggatgaacacccgccagggttttatgccagtctgaaagaggctttgcggtcgatcccggcgcaactgagggaaaaaggcgaaccgatacctgacagtgttccctgtgtgctcgactgggttccggcccatgatgacgtgcacgctccgccgaacgccgaagcgcattacgacgtgccggtgtcctttgagcctccccaccacttgccccggctggtgatccgctgtaacctgccattggaccgcaacttcgaggcagagaccgtgctttccggcaaagcctggcaaccgccccgcaaccgggcaaattacgacaatcctgaatacaaaagggtccgcgctgagcgtttggtgatggacaatgccgcctgcatgttctgcaaggcacccgccactactgtgcagcacgtgaattaccgacgcgccggaggcagcgagaagccggaggacttgcgcgccctctgccgcctctgccacgatgcctgcaccatgctggaatatggcagcggcatgaccatggaccgcatagatccctgtgaccccgcctggcgtgagcgcatcttggccaaacgcgaggaaataatcaaattccgctcgctggagcagcgcaggcgcaaactcgatccgaaggaggagaacggatgatgtatctatcccaactgctcatcgacacaggcggcaaccctgaccggccaaggcccgggcgcttgtggctgaacaatatctataatgtccaccggcggctcagcatggctttccccatgcgcaagcgcaaggaaggagacccgaggtttctgcagccctttgaccccgcagattttgaaaagcgccagttcctctttcgggtggacaacaacaccgatggagaaaatcaaagggcgatggttttggtgcagtcgtccctgccgccggattgggactgggctttccagaatgccacgggatttttggcagcccctccccaggttaaggaatacgatccccagttctcagcaggtcagcggctgcgcttccgcatcctcgtgaatgccagtgtcaaacgcaaaatcgacgagttgcgggaaggacccggaggaaaggaaaaaacgggaagggttctgcacaaacgggtcgcccttacctgggacacaaattccaacccaaaggatgcggtggcgcaatggtttgccgccaaggctggcagactgggcttcacgcccggggagaccgaactggtaagcctgggctgggtatacggttccaaaccggagccccggggaaattcgccccggcgtgagaacgaataccgtcccctgagataccgttccgccctgctggaaggttatctgacagtggatgatgcctttctgttccgggaagccttggaaaaaggtatcggcagcgccaaaggaatgggcttcggcctcctttccgtggttccggcaagtgatgcgtaacagagaccttcacctaatgccaaaaatgcgggaccgcttcacctatctctatgtggagcatgccaaaatagacaaagaacaacaggcaatcgcctttcacgatgccatgggctccactcctgttccctgcgctggactggccctgctgatgctggggccaggcgtatccatcacccatgcggccatccttgttttagcagaatgcggctgtttggtggcttgggtgggggaacagggagtccgcttttactcatccgggacagggaccacccgtagttccgccaaccttatgcgtcaggctgccgcctggtcaaatcgagatacgcatctgcggatagttcgcagaatgtatgaattgaggttcaaggaaaaactggacccaaccctctctcttgaacagataaggggaaaagagggagcgagagtacgggatacctatttcagactttcaaaagaattcgatgtgcccatgagtgcgaggaattacgacaggagcaactggaataaaaccgaccccatcaacagagccctgtccgttgccaattcctgtctctatggcatctgccacgccgcgatagtggccgctggctattcacctgccctgggtttcgttcatactggcaaacaactgtcatttgtttatgacattgccgatctttataaaatggaaacctccgtgcccgcggctttcatagccacagccgcaggggtcgataacctggacagaaggacacgcattgcctgccgtgaccagttctatcaatttggtctgctaaagaagatagtggccgacattcacgcccttttcggtattctggaaacttcggacgatgagccagaccttgctgatgtcgatccagccgtgccaggcgggctttggaacccagatgataaagtgagccccggcggcttgtcatggggtctggatgatcctggaggccatgatgatggttctggtgcttgaaaaagttccctctggcctgagaggagaaattacacgctggctcctcgaaatcaaggctggagtatttgtcggtcaggtatcggccatgataagggaaaagctgtgggacaaggccaggtctggttgtgccggtggaacttgtatcatgatttacagcaagcattgcgaacaaggctttggaattgagttttggggtgccgcggaaaggatagtgacagaatgggaaggattgaaattgatgaccaagcatccgtgatccatacttgaagcctgttcaatggcctcaaagcgtctactttcgaagtgtgttccccacctgcgtgggggtgaaccgaag

SEQ ID NO: 737 - DNA, 7336 bp, Artificial Sequence
  Synthetic Oligonucleotide
tttggagcccgaaggtcccagaacgattggccgacggggacatcgaccttcctgacgctggcgtcgagcgaggcacgagcatggacgccagcaacatctcctgtagtccatactcgcaagctcgctgcactccaggctcaccaacgttggaaggcaaattcacaaattcacaaccggtaaatatggcttgtgaatttgcaacctgctgatagacgggtaattatgaggctaattcacaaaaaaggggtctcttatacatccgcggaagccgattgtaaacaggatatgatgtatccacgctaccagtctataatacatatagaaatagtatatataatatataatagtattatatattattatatattgatattatatcatctctaccttcccttcatctcttgtttgcggcatgagccactgcaaaccggcattctcccctggtccggctggatataagagataagcgtattttgtgaatttgtcccccaactcactgtgccacaataacacacggattcacaagccatatttaccggttgtgaatttgtgaatctgaccttgccggccttaaggaagtttgaaattagagccctattttggacttgacaaattattccttggtaaatttggtgtataatagctatggggcataatgatgttagcctgtggaacggcctctgtaaaggatcaacaagctatcaaccctccccatgcgacaggagcttcaatgtattataatttgacagacaaaccctggatcagtgtgctacagcttgacgggcattctgccaggctcggcctggctgaggtcctgcgaaaagcacacacactgcgtttggcttacggcaatccgatggaccgcatgtccgttttccgtttcctcctcgccctgggctattggtgttttgccaatacaaaacaagcgccggtatcagataagccactgcctcaggcatggacggactggcttgaacaaaaccaagaatatttcgaattgttcggtgatggccccagattctaccaatccccaggaacatccagaatacgccccagcacggaccttatccacgagcttcccacggcaaacaatttctggcacttccgccatgtgaccgatttcatcgatggcatttgcccagcttgctgcgttaccggtctgctgcgcctgccactctttaccaccgtaggcggcagcggaatcggagccggcatcaacagaactcctcccttctatgccatctggcagggtgatagtctgtcggaatcgatattcctgaattgggaacccacttcccggttgggtgttcctgcctggctgaacccgtttggatcccaaaacgagaaggatgtagccttgctgactggcctcacctggctgccccgcaaggtattcctgcttggcccggtgtcagacggagcaaaatgcagcgcctgcggagaagagcatgagcctctggtctatgcctgcaacaatgaggcggtgaaagtgcctccgaaccttgtctggaacgaccctcacgcgatttaccgggatgacaataatggcctgactgcccaggtggctctgatgtccggggacaaatacactttcgctaacagggattggcataaacccctggtcggcttcttacgggcgaaaggcatgtctcggaccgccacgctgtttttagtgggcttcacaagcgttcaagccaaatgtgtggacgtttgggaaaagaccattgccctatccggaaaaacaagctccgaggaactgctggaccagatatccgaaagagcctactccctgcacaggatgaggaaacaagaccgccggggcgattacaaggaatccgtgggaatcaccgccgtggcggacatcatcccgcacgtagagcatcgggttgacgtccattcgggcgagatggtggaaaacagcggcaatgtctggcaggaagcggatgaagattacggattcttcatgaagcgttttgccgtttctctagtgccggaaattacggttgccgccaagcttgaacgagaacaactggctcggcgcaagccctggcccctaaaaccaaaatcaattaaaaaaccttcatccggaggcgataatgaatgagagcaccgtgaaatttgttcggagcctgggcgaactcaaagagggcgacctgggcttgctcagaaagctcaggggtcgccgtctggatgaatccctgccgggtttcgacctgttttccggcctgtggtggccactccgcagtataagccccaaaacccccaggcggaaggtggtctggctagtcaccaagcttttcgcggaattccgctttgagcaaaagaaaggcgccagcctgccttggctcatgggcagaatatgccgtggacttaaagaagaaaaagagttcccacgtgttttagccaggttcgaccgcttgctcacgctcgagttgaaccaactggaggaaccgctggcgcaagtgctcgcgattttaaaaagacatgacattgccagtctggactgggttgccctcatcgatgacctctccgcttgggaacgggaatcaaacagagcgatatggtcagacacatttatttcagcatttaataatcagcaaggaggaatcaaatgttgattgaaatacacatgatccaaaaccacagcccggccaacctgaaccgggacgacctgggcgcgcccaagacctgttatttcggtggggtgttgcggtcccgcatctccagccagtgcctaaagcggagcatcaggatgagcgatgaattcaaaaacttgctcgggggtatccgtacccgtcggttggccgagttgattacaaaagctacaggacaggactgcaggaatcaggcagaggaagttctgaacaaagccggtttgaaacacgaaaacggacatagtaagatgctggtgttcatgacccggaacaagatcgatgcccttgctcaaattgtcaccagcgaaggcctgagtgttgcagagaaagccaagaaagcggcagatgtaatatcgggggcaatacattcccctgacatcgctctgtgcggaagaatgctcgagcccgataccaaggacaagaacacagacaaggtcaagtgggaaaataccactgttgaagcagccctgcaggtgtcgcacgccatttcaacccacatcgcccgcccagaaatagattactatgtagcagctgatgacgagcctggcgacgacacaggtgctggattcatagacgaggcgatgtttgcttcggcctgtttctacaaatattactcaattgattggaataccttgataatcaacctccagggtaatgaaaagttggcagctcatactgtcggagcctttatccaggccgctgcactcactaatcccagcggaaagcagaacagctttgccgcacataaccttcccgatggaatattggtagaaataaaagagacacctgtcagctatgcaaatgcctttgtgcgaccggtgggaatcgttaaggattctgacttggtagaacaaagcattggccaactggccaactatgtgaaggatataagtgccggtttcttccctggacagatgaaaggcaacgctctgtggttctcgcccaatggacgttatcccctaaagcctcaacagggcacgctggacataaagccagtttgcaacctgctagaacttgttcgcgaagcagttgagatgttgggttttgaatgggatgatgtaaaaaacgagaaagtagagagttgaaatgtcttctccgcctaataccctgttcctgagattggaggctccccttcaggcctggggaagcaatgaggccaaattcgccgtgcgcaggacagccgacgcgcccaccaaatccggagtggcaggcctgctctgcgctgccctgggaatcagccgggccgaagccggacagtattggctgggtgaaattgccaaattgcgcatgggggtgcggatagaccgcccgggcatccgctggtgggattaccatactgtgggagcggagcagaagctgcgcatttctgacctgaaaatgcccaacggcctagttctggttggcactgccctggccaaaaacctgggcgcggacaagatcaaatccaaacccggggctttgctctcccgacgcgagtatttggctgatgccagcttcctggttgcgctccagggtgaaccggatatcgtggcacaactggctgaagcgctgaaaaaaccagtctggacgctttatctggggcgaaaatcctgtcccccctcccgtccggtggatgaacacccgccagggttttatgccagtctgaaagaggctttgcggtcgatcccggcgcaactgagggaaaaaggcgaaccgatacctgacagtgttccctgtgtgctcgactgggttccggcccatgatgacgtgcacgctccgccgaacgccgaagcgcattacgacgtgccggtgtcctttgagcctccccaccacttgccccggctggtgatccgctgtaacctgccattggaccgcaacttcgaggcagagaccgtgctttccggcaaagcctggcaaccgccccgcaaccgggcaaattacgacaatcctgaatacaaaagggtccgcgctgagcgtttggtgatggacaatgccgcctgcatgttctgcaaggcacccgccactactgtgcagcacgtgaattaccgacgcgccggaggcagcgagaagccggaggacttgcgcgccctctgccgcctctgccacgatgcctgcaccatgctggaatatggcagcggcatgaccatggaccgcatagatccctgtgaccccgcctggcgtgagcgcatcttggccaaacgcgaggaaataatcaaattccgctcgctggagcagcgcaggcgcaaactcgatccgaaggaggagaacggatgatgtatctatcccaactgctcatcgacacaggcggcaaccctgaccggccaaggcccgggcgcttgtggctgaacaatatctataatgtccaccggcggctcagcatggctttccccatgcgcaagcgcaaggaaggagacccgaggtttctgcagccctttgaccccgcagattttgaaaagcgccagttcctctttcgggtggacaacaacaccgatggagaaaatcaaagggcgatggttttggtgcagtcgtccctgccgccggattgggactgggctttccagaatgccacgggatttttggcagcccctccccaggttaaggaatacgatccccagttctcagcaggtcagcggctgcgcttccgcatcctcgtgaatgccagtgtcaaacgcaaaatcgacgagttgcgggaaggacccggaggaaaggaaaaaacgggaagggttctgcacaaacgggtcgcccttacctgggacacaaattccaacccaaaggatgcggtggcgcaatggtttgccgccaaggctggcagactgggcttcacgcccggggagaccgaactggtaagcctgggctgggtatacggttccaaaccggagccccggggaaattcgccccggcgtgagaacgaataccgtcccctgagataccgttccgccctgctggaaggttatctgacagtggatgatgcctttctgttccgggaagccttggaaaaaggtatcggcagcgccaaaggaatgggcttcggcctcctttccgtggttccggcaagtgatgcgtaacagagaccttcacctaatgccaaaaatgcgggaccgcttcacctatctctatgtggagcatgccaaaatagacaaagaacaacaggcaatcgcctttcacgatgccatgggctccactcctgttccctgcgctggactggccctgctgatgctggggccaggcgtatccatcacccatgcggccatccttgttttagcagaatgcggctgtttggtggcttgggtgggggaacagggagtccgcttttactcatccgggacagggaccacccgtagttccgccaaccttatgcgtcaggctgccgcctggtcaaatcgagatacgcatctgcggatagttcgcagaatgtatgaattgaggttcaaggaaaaactggacccaaccctctctcttgaacagataaggggaaaagagggagcgagagtacgggatacctatttcagactttcaaaagaattcgatgtgcccatgagtgcgaggaattacgacaggagcaactggaataaaaccgaccccatcaacagagccctgtccgttgccaattcctgtctctatggcatctgccacgccgcgatagtggccgctggctattcacctgccctgggtttcgttcatactggcaaacaactgtcatttgtttatgacattgccgatctttataaaatggaaacctccgtgcccgcggctttcatagccacagccgcaggggtcgataacctggacagaaggacacgcattgcctgccgtgaccagttctatcaatttggtctgctaaagaagatagtggccgacattcacgcccttttcggtattctggaaacttcggacgatgagccagaccttgctgatgtcgatccagccgtgccaggcgggctttggaacccagatgataaagtgagccccggcggcttgtcatggggtctggatgatcctggaggccatgatgatggttctggtgcttgaaaaagttccctctggcctgagaggagaaattacacgctggctcctcgaaatcaaggctggagtatttgtcggtcaggtatcggccatgataagggaaaagctgtgggacaaggccaggtctggttgtgccggtggaacttgtatcatgatttacagcaagcattgcgaacaaggctttggaattgagttttggggtgccgcggaaaggatagtgacagaatgggaaggattgaaattgatgaccaagcatccgtgatccatacttgaagcctgttcaatggcctcaaagcgtctactttcgaagtgtgttccccacctgcgtgggggtgaaccgaacagacggcgttgttgacatcaccctccccggtgttccccacctgcgtgggggtgaaccgagataatcacgcttaataagcactttctcggcgtgttccccacctgcgtgggggtgaaccgaagccccagaccacagcaagccagccgcttaagtgttccccacctgcgtgggggtgaaccgtatgtccgacatcgtgcgcatcattcacgaacgtgttccccacctgcgtgggggtgaaccgccagacagcacggcatatccacacttaccgaagtgttccccacctgcgtgggggtgaaccgaagctgatctcgccaaagcaatattggcagacgtg

SEQ ID NO: 738 - DNA, 7327 bp, Artificial Sequence
  Synthetic Oligonucleotide
gtcgcgcattgtggaaggcgtaatcccagtccggctcgacggccgactggacgataatcatcaccctgccggcatgtttcgggtcgatgcggaaaagaaagccctgctgctcgctgcgctccaaatgaatttcgtcaagcacggccttgtcaatggcagcggccagctttgctgtagggttttgttcctctggcaagggcgtatctgaaacgttgttcttattctcaagctccttgtaccgcttcccattgcgctccagccggtcggcaagatggcgctgcaagggaaagtattgcggttgatatggggctaggaactgagggtcgttatgtttgtgttccgctacgggaaaggccatgcaaagccgctggtgaacgcggtagaggttgcgcagccagaggcgccccggtcgcggacggtcgggattggttcctacgtcgatcattaaacaagagagatacatggctattcgacctcctcgggactgagccggcggcggcgggtttctagtgaacgggagcggacgatttcatcgcgcttggcgataatgcggtcgcgccattgcgggtcttggggattgatgcgatccagccccatgcccaggccgtattcgatcatcgtcacggcgtcgtggcagaggcggcaaagggaacgtaggtcgttcggttcttccttgccgccggcccggcggtaggtaacatgctggacggtggttgccggcaacttgcagaagacgcacagcccccaatcggcctgtagccgctcggcgcggcgacgcttgtactccgcattgttgtagtttgcccggggacgcggcggcggcggagtccggttctgcgccggctggtctgccacatgaacctggccgccattgccgacatcgagttgcttctgaattacaaatcgcgggcggtgcgaaggcggctcgaacgtcaagggcacgtcgtaccagacctgcgcatcgagcggcgcttccggctgctcggcggtcggcgtccagtcgatcaggcaatccaaacactttggtttgggatcgtccttgaaccgcggctgccaagggagcgacgtcaacgccgaagccacatcggaaaatgtcgccggcggatgttcccacagcggccggcagggcgggcaacatttgcggcccaggtagggcgtccagcgtggattcttcactgcctcggccagggtgtcgataagagccggctcaccttgcagagccaccaggaaaccggcgtcggcaaggtattcacggcgggtgataagcgtgccttgcggtcctgtcttcaatttgcccgcggccgtcatcaggccgatgccggcgccaacggtgtgatagtcccaccagcgcgtgccgggtcggtcaatgcggacgcccatttgcagctcggcaagccttggcaaccagatttcggcggcttcggcccgcggaatgcccatcgccgcgcagagcatgccgaatacgccggactttgtcggcgcgggcatggtgcgacgcataacaaacttcgacgtatcgccccaagcctgaaggggaccttccaggcgcaggaaaagggtgttggcgtccatcatttagactcctcattcacgacgacccgttgcacatcttgccagtcgaaaccaatggacttgataacggagacaaccagatcgtctagcgaattgtgcctctgggcgtcgatctcgacttcctctaccttgtcgccctccccaatgacttctttcttaacgtaagtaagtgagtgtcggttattgggcgagaaccaaaaacgtttttcgcgagcgggggcgccaaatcccacgtcaagatcgtgaatgtactgcccaagctgggcgatgctctgcgcgacgatgtcgcggtcgccattcgcggccggtttggcaaaggcattggcgtaactggtcgggctgttcttgatttccaccaggatgccgtcgggcggattgtgtgccgcaaagctgttctgcttgccggtgggagtcgccaaagccgcaccgcgtagaaaagcaccgacggtgtgggcggccaactctttgtggccatctccgaagcctttgaggttctgaaccagcttttcccagtgaatggaaaaatacttgtagaagcaggccgatgcatacatggcctcggctacatatccggccccggcatcctcgccaggaatgtcgtctgcggcaacatagtagtccacatccatgcgggcttcatgggtggaaatggcatgagcgacttgcaatgccgcctcgacggtggtatttaggttgttccagacatccttagcgtccttgtgtggctccaacatgcggcccgataaggccacatctggcgccacagtagaattggcaataatttccgcaactttttttgcgatattcttgttactctccttagagttcttctcactcccattagatttcttcagaatcgtggctatgctttcaatgccctcgcgcgccatatacacaagcatcttgctcctatcctccgattgctcggtggtttgatcatcatcagatttggcattcttggcttccttagacttgaaaccacaaagattaagaatctcctcgacccatttgcgcatggtgtcaccgccgtcaatcttctcggcaattagcctggccaattgcctggtgcgaatgccaccgagcagttttctgaactcctcgctcatgcggatactgcgtttgatgcactggctggagatgcgcgaacgcagcacgccgccaaaatagcaggtcttcggtgcgcccaggtcgtcgcggttcagattggccgggctgtggttctggatcatatggatttcgattaacatggcaaagctccttattgtgaaaggttggtgttgttcagatatacttccgcccaaatgtcccgaatgtcacgtttcaggcgatgctcggacccgcggtcccagatggaaagatcatcggtcaacgttacccagtcgaatccggacaggcaaccggagttgacttcctcctgcacaacagatagcccccaacgcaagtgcggttcgattgccgaaagcggcgcacacaacagggcatcgaaccgccggcggtatcgcgggcgaccgtgctcgtcgcgcggctcgcggcggccaagaacggccggcaaccgagcgttttcctgatccacctgtggcaaggggaatttcgcgtagagcttggctacaagccatgccacttcgcgtcgcggggcctttggacttttttgccgcagcggccaccaaaggccggcaaacagatcgaagccgggcactgattcgtccaggccgcgcccggcaagcgtccgcagcctagcccgctcgccggggccgaatagccggtcgttttccagtcgctcgatgaaagagatggtgctcatgaatcggtctcctggcgtgactttctggtagtgcgtttctttttgcccgtggacgccggggcgtcggcggcattggcttgggcttgattttgtattgctcgctcgatggctcggtttagcgccgctttgcccttatgcagtgcctcgcgcctccgcagcggcgagccgacagtggtcgaggccataatcgactcgaccatcggttcatagatgccgcgtaagaacagtttgtcatcagtgacgtcggtcgggttgttcagcgccgcgcgaatccgcgcctcggcattcggcgtcagaaagtcgaatgccgagtaaatctcaggatggttgcggtcgggattaaacgagtccattcggagaaaaccgagccgttcgagtttgtccttataggtttctttttttttgcggggggagttggtgccatacaggagcttcgaacattcattcgtaaactgcactcgcttcttcacggtggtatccggcagagtcacagcgaaatcgatggacacggcgtcttgaaacgtgaacttgttgaccacaggaccaatcgctaccaccttgccggcttgttcggaacgcaagcacaaagcttcccgccagaattgtgaagagtgcaatgcaatattcgttttcaagagcggaagtgatattggttcctcgtctttcaacagatgaggatcggaattccagaacttcttcttgctgtcttccggttttgacgttttccagccacctccgttgtacagactcgtaatcagaacacttttacaaccgcagtaggcgcagaggcttttttctattgggtcattgagccacatacttcgtggtcgccatgcaagtctggctatgacgcacggtgatttaggctctttatccgataaccacggaacatcttctgattcaatacctgcttccgttagataactcttgagtgtcagaaaaagattgccaacttgaacaaacgcataggccgcagacccagggttgaccgatgcgggataggacccgttggtcgacgcccagaccgacaaccgcagaattcccattgcacagcacgccgggcataatccataagagccatcatgtatgacatgccgcatgtggttcactgaatccgcgccgggaaactccaccagtaggtccgcgattggccggactttcttgttctccaacgatttgtcctgatagaaccgctttccttctcccagcaagttgaagcaatccttgtggtcgtctagtatctggaaccattccggcgggaaccggccttgaggcatgttgttgggcgggttgcctcggcaccaatagagaatcgccagcaggaatcgcagcaaggcgatgttgtccatcggattgctagccgcgatttggcggataagatgggcgtcttccaacgccttacgaatgcctacgcggcaccaattcccatcggcataaagaaccggaatccagttttctacaacaaggttgaactccgtgaccatgtgaatgccctcggaataaatctgtattacgaaccccccattaggcagtaagttattgtagttgaaaagtaatattgccagaagtatccccgtcccaaaaagttctttatgtacagcggtgagaaaatcttgggatgccacccacatttcgcttgagcttttcgtagacccgaggtaactgtctgtcggctggcatcgcgatggccgcgatgctgaacgaaaacccaagatgaaagggaacgacagatggctaccacgaagaccaccgcgaagaaggccgcaaagccgaacgccgcaaaggcggccaagaaggacgctccgaagcccaaggccaagaaggacgtcccgcaggccaaggatataaaggccaagtcggcaggcggcaagcaagcaaagcggctcagccagattgacaccgcggcgcgcgtgctggccgaggccaaggagccgatgaattgcatggcgatggtcaatgccatgcaggccaagggctattgggccagccccggcggcaagacgccacagcagacgttgtacgcttcgatcctccggcgacatccgtaagggcaaggacgcccgtttcgtgaaggccgctcgcagcacattcgccctgaagaagtaactacctcgcgacaaatcgcacgtcgtcgcacacgacgcccgtaacgcgggcgttttctcgttggcgtttcggccaatccttcccgaccgatgcgacacgggccaaaccacgcgcccatgttggccgcagtccggcttgattgcggggggacgttgtgctttggaatctattcctctgccttgattggccctagagcgtcgtagagggccaatctgggcggaggaaccacgcggccttgcaagtgcggacggctgtcgagacggaagtatttcaccggcgtttcccggccgtcctgcaataacagtcgaatggcctcgaccgtcaacacgccgatctccagggcgcgatccaccgcgcgggccagttccatcaatttgcacgattccaacagtcgcagcaccttgatgaactcgcggcggcccgtgctgcccaactcgccttccaagcgccgtcgcaatacgccaaaaccctccggcggactccattcgtcaaacggcttgccgaagtccaaggcccctggtttccgctccaaaagggccaagtagtgccgcggatcgtagtggacgttctcccggtcccagtcgcgcggatgctcggccaccacctgctcctgcaccacaaaccgcacccgctcgatgccgccgacggccatcaccgcgtgatgggcataggccgtcggcaccgagtagtcgttgcggtcgaaacggaccagcgacagcgaattggcctggcaaggttcgacacgccgcgcctcgaacggcttttcgggcagcggcagcatggcgcgtacgtcctcggccagcagctcggccttcgggcccggcttgccaagtacctggcgatcgagttcccggcggcagtcttccgccaaagctgcgttgaagacctcgaagtcgtcaagttgcggcaccgacaccaagaagttccgccgcccgtagtccacgaggctttccacatgcctcttctcgttggcgtgacggaccaggcagaagtgatgctcgaacagataatggcttcccagccgcaggaactcgcgcgtcaacacgccaccgcgtttccgaatcaccttggccacagcaatcttggtattgtcataggtgatgcgtttcggcacgccgccgaagaactcgaacgctcgacgatggccctcttgaaacgtctcggtgcattcgcgggggaaaatctggcagaatagagcatcgctgtagggcagtgacatcacgaacacggccaccttccgctccacgccgcaatagaccacggtggccgagccgaaatcgacctgggcctcgcccggcggatgccccaagggtatgaagacttccgccgaccgctgcttccaacgacgcacctcctcctgaacgatcgttcggccgccgcgattgccatgctcgctgcggagtcggtcaaggatgcgtctggccgtatgccgctgcttgggcggagctgttttgtcggcttcgagaatctcgtggatgatcgccacgaaagggccgagaatcggcttctctcgtggcttgcgccgacgatagctgggcggttcactgtgcccgagaatcttccgcagcgtgtcccaatgcaacttgtacttctgacacgcccgccgtttcgacaattcgccggtcaatacccggcgacgcacttcactccacagttccatatgcgtgtacactctcgactgcctcgcggaggggtgagacttgtaacggttataccgtcacaagtgttgctcacccatcagcgagtggtttcaagagcgccacgtttttcggccggcacgcccagcccgccccgcgccacacttttcaaccggcgtttacatcgtggggaacccagcgtccgttcaga

SEQ ID NO: 739 - DNA, 7315 bp, Artificial Sequence
  Synthetic Oligonucleotide
caagaaaagcacggtgctggaacacatggccgccactgtggaaagtatgctcgaacttgatcccacgacaaggccgaatctggaggaggttcagtccgcttttgacggcttcttccagcacgtgggcaacgaaaagcatggcataagcattttctatcacaagggataaaacccgataaatatcaaaaaagcgggcattgaagagagtctcggaagacatgacgggttgaatgttgggtgccactgctggctcgtccagcagtgctggttttattccggcagagcttttgagaacagctttagatgctccacgccttcttcgctgcgaactcggagcctgccccggactgtgatccgggggtctctgcggtgaactggttttccggaacctcctcgcgcaactggatgcatcgttcctcatggtgaatttcattgacatgtggaaagcattccgcataatgacctcaaatctcttgatgggctgctaaagccatcatctctatcatcgaatgacttacagcatttctcaaaggttctttccgaatggccgttcccgtcgtcccggcgaaagccgggacccagcctcttccggattccggcttccgcccgggcgccactgctggctcgcccagcagtgctacgccattcagaaaaaacttcggcatagccataacgactgccgatactcagatttttcccgcgcacgaggtagccatgaagcacaaaaccgagaacttcaacctactcgaagaggattggattcccattttatggaccaatggcaaacctgatcgtgtaggcatcaggactgcgctaacggaagcaggccatatccgccagatcgctgcgagcaatccgatggacaacgtcgcactgctgcgccttttcctggctgcacttcattggtgtacgaggaccctgggagacgaagagcacaagcgcctttgtgatgccaaaggaatccgcgatgactggttgagagagttggatgaacatcaggacaagttttgcttgctcggggattcctatcgcttcatgcaagcgcccgatggtgcggacaatcgtcgtcccgttgccgacttattccacgagttacccggagcgaccaacgtggcgcatttttaccacatccgggactatcgtgatggcgcgtgtatagcctgcactgctatcgggctggctcgcttgccgactgcgatcaccggaaaaggtgccggtaaacggagagggatcaacggcgatccgcccatttactttgttccgataggcaagtctctcgctgagacactgttgatgaattggcgacctttgcgccacgtaacgggggacgcaccgtgctggtctcaatggccggtcgctcctgggctggacgcacctggcctcatggaggggttcacctggactccacggcagttcaggattgacgataggtctatgcggtcgggccattgcgtagtgtgcggcaaatcaaccaccaatttggtcacatgcctgtacgagttaaacacaccgaacgggcgaagtgaattgaatgaactgcggaggtggcgcgaccctcaccttgcttatcccgacgatcagaagaaccttggccccgtggatacagagaagaacccattgggagcctctggcgaatggcgcaactggttgaaaggcgtgatccaaagcgacacagagggcaatagagcccccgccgcaataatcgaggcggcacgtcgctctggtaagaactcgttgcgactaagagtcgtcggcttggcgacgaggaaggacaagagcgtggaatgttgggaaaggagcttttcgattcccacccagttcttaactgctgagggcggaggtaaatttgcggacaggaccaccaatctcaacaatgctgtggccaaaattctagatcctcaaaccaaagcctggaccaaggctgtaggcaaactgagagatgcaagcttgctcaaatctttagccgcccacgacgggcaaaagcttcaccccctccgcagttccctcgctgatagcctacccgcgctggaactggctatgttcaccactgtcaagcaggatctcgctcattccaatggcgcagtaccacccacgcgtccaacgatcggctgggatgcagtgctggatgcggccgttttgagcacaaccttcggctcgcccctgcgcaggcgcgaagcaactgaacgggctcggcaagcactgactgtggagatagccaaattaggcaagaccgaccagaaggagccagagccagagaacaagaagaagcccaaaagccccaaggaagatggggctggctcgactcagactgagcaattcattcgacggctcgaatcgctgaaggaaggcgagcgctcgcggctgcgccgactggcgggcaaaccgttggacgagaagctggaggggttcgacctgttcactggactctggtggactctccgggacaaaagcgccggagcgccgcggcgcgaaacaagttggatgatagccaagttgtacggagcgtttccaatgcgtcacgtgcgtccagccgatccggtcgcccggcccaccctcccgcgagtcctgggcacgtgtgagccccgcgatgagcacggccgcccccgattccggacgcgattcgatagtctgctgtgctcaccgctcgccgcgctggagccgcacctgtgctgggctctgtccgtcgtggccgaagcagtcgagaaaggaaaatgctctggcttggactgggtcgagttgctcgacaatttgtccatttgggaccgcggggaagagcaccgtcgcgagcgagacgtccgcgatatctgggcggaacagtacctagaaactgttcatcaatccgaaaggagtgttaaccatgctgattgaaatccacatgatccaaaatcacagcccgtcaaacctgaaccgtgacgacttgggagctcccaagacatgcgtctttggcggggtcacaagggctcgcatctccagccagtgcctcaaacgcagtatccggaatccgggcaacccggacgacgagcacaatcgggagccaggaatgttcgcgaaatcgatggagggccatatcggattactgacaaaattcctgccttggctggttgaaaagggactgcaaaagctaaaggtggacgaaaatgaaattcgaggagtcgggatcaaactgcaaagcatcgccaagtctgaggagaagttaggtgcaggtaagaagaagaggcgactcgacccccgcagacagaccccacaactaattcgcatacatcctggacttgctggggaacttgctgaacgtctggtcagccttagagagtctgacgaggattcgtttcgctatttcttgaatccggctgtgagcttcagacagttggtggaagcagaactcgaggattcgcaattcaacgagaaccaacgaaagtccatcttagacaaggcttggctgatcttgaactgccgaatggaggaactcgaatccgacgcagagcagcctgaagcggtggctcaacagtcgacatatgcgctcgacgcagagagtgccaagatcatcgtgactactcttgagagtctaccggatgacaagttcaagaatatcatcagaaaacagactgatccggaaaagaagcaactaaaggatgacgctcctaaaccgcccccaggatacaaagacgctgagaagaaactgtgggccgacctgcagcacaattgcgctgacattgctctctttggccgcatgacgacatcggagttttttgaggatgtcaaagccgccctgcaggtggcgcatgcgatctccacgcatgcagcggtcaatgaggtggactatttcactgcggtggacgaccgagccagggctggcggcagggctggccacgtggatgaggccatgtacaactctgcgtgcttttacaagtatttctctctcgattgggaccagttggtgtacaaccttgcgccagagccgaagaagcctgaagacaagaaggacgatagtcaggaaataaagaactgggaggaagagcacaagaactgggctgacaaactcaagccgaatgcggtgaagctcgccgcttgcacgctaggccacttcttgcgtgctgctgctcgtaccacgcctagcggtaaacaaaacagctttgcctcccattgcgaaccgtgcggcatcttggtggaaatcaagaagaacggaaagattcccacgagttatgccaacgccttcgcggaccccgcaggcaagatcggcgatccgccggacgacaacgccgattgcgagagtctggtggggcgaagtatcgcccagtttggcgaccatgtctacaacgtgcgcaatgcctacggcatcgagtcgactcttttctggcatgctttgcctctttaccgctatccgcttcagggctgggaacgtgaagctgacggtcgcaaggcgaaagtgcgagatgagaatggcgaagaaaccaaaaaggacaaaccggctgttcagttcgcaacaaagtgtttgcgtggcctcggcggcgaagatggaaagccggaaggcctggttgaagcagtgatcgaggcccttgatctcggtttcaaatgggccgacgtgaaagatcctggagagtccgctgcaaaggagtcgtgactatgatcgctgcccttaataccatcttcctacgtctggaagggccgcttcaagcatggggcgacacttccaagattgtgattcgccgaaccatggaagctcccaccaaatccggcgtcttgggtatcatctgctgcgcgatgggactgtcgcggaaggcagcgcgtgagcgtttgccggatttgaagaagttggcgatgggcgtgcgcatcgaccggacaggtattcgatggtgggattatcacaccgtaggtgccaaggtgggattgctaaaagccgaaggaggaatcaaacgcacggggggagcaaaaggcccgattgaaacgctcatcagccgcagggagtacctttgcgacgctagttttctcgtggcgctaaaaggcgattcagacttaatccaggaggtctccacagcgcttcagaaccccaagtggccgctttttctcggccgtaagtcgtgcccgcctgccgtaccgataggatggaaagctgataatggcaagtgtgctgcagacacggatcgatttgacagtctcgagcaggcgttaaagtcgcggccttggcgtccccgatttaagagtgacgctcctcgtgacgacaaaggaattccatcgaagacgaaacagctggattgtataatcgaatggcagccgcgcaatggcgtgatcgctcctgcggaggcagaggtctggtacgatttaccagcctccttcgatccaccagtgcatgaaccacgactggtgctgcggctggaaggagaccggcgcatcgaagtacgagtcgacaggccactccagcatcatacgtcccctccgcctcgcccgagagcagactaccaaaataaggaattcaggaaacgccgcaaacaaaggttggaatctgaccaaggcctctgcgttttttgcaagtctcccgccacgaccatgcaacatgtcacgtatcgacgtgccggcggcaatgaagagcaggacgatctgcgctcgctctgtcgactctgtcacgacgctgtgaccatgatcgagtacggcctgggaatgggcctggatcgcattgacccctgcgattcccgttggcgcgagcaaatcatcagaaagagggctgagatcattgagtttcggtcgttggaaacccgacgccgtcgcctcagcccagaggaggtggaatgatgtatctttccacgctgctaatcaatgttggtagtaaccctgaccgccctcgccctgggcgcctgtggctgcggaaccgctatcgcgttcatcagcgccttgcgatggcctttccgtcagatccacgaaaaggtcgcgatccagaattccttttgccttacgatttcaaagactttcccgaacagcgccacttggccgacccatttgattacctgtcggaaaaaccgaggacggagcttgattccgatttgctggccgacgtccacaccccacgcagtgcgggcaccgggtttctctttcgcgtcgaccctctccctggtggacgggcggtgattctcgtcctttcccatagaaagcccgattggcgctacgcgttcggcctgattcccggccaaatcaattcgcggccgaaatctcccatcggaaacgctgggtatctattggcagcaatgcctgacgagccacgccctctcaaggtcgcgctgaatctgggtgaaaggtttcgcttccgtctgacagcgaatccaaccaagaaaaagggcacgatcctcaagaccgaacgcctggcgatgaatgagcgcgggacgaaagacccgaagagacatggatgccgcgtaccggtgcgccccgaggaatacgagcactggcttgtctctagaagcgatacgcatggctttcggcttgtagaacctctcaaagatactcttcatatcgaagccggatatgtgtacgtcaacaagactctcgattccggcaaagggcagcgactaagaagcttgagctacgacgggcttctggaaatctgcgaccccacccgttgccgcgaggctctgcaatctggtatcgggccggccaaggctttcggatttggtcttctctcgatagcgcccgttagaccctgacttcagggaggggggatatgagaattcaagatctgcacatcttgcccaagttccgggactgttggagctacttatatgtggagcactgtgtgattgaacagcaggacaaagccatcgccattatagacgcccgcggtaaagtgcccgtgccgtgcgccactctgtgtttgctgatgctgggaccggggacgaagatcactcacgctgctgtaaccgctctggcggacaatggatgtctggtctattggtgcggcgaagaaggggtccgattctacgcatacggtcacggaaagacccgaaatgcggataatctcatgcaccaggcgaaactatggggcgacccccgcttacggttggaagtagtgatgaggctctaccggatgcggttcgaggaaaccctggacgagtctctgaccttggcgcaaatccgcggaaaagaaggggtcagagtcagagaagcctacgcgcgtgccagccgagaaacaggggtggaatggaaaggccgctcttacgataggagttcctggtctgacgctgacccggtgaatcgagcgctctcggccgcgaatagctgcttatacggcctgtgtcaggcggcaattctggcgctggggctgtctccggccctc

SEQ ID NO: 740 - DNA, 7305 bp, Artificial Sequence
  Synthetic Oligonucleotide
ggcggtgttgttcagggtgatgtcgccggttcacccccacgcaggtggggaacacacttcgaaagtagacgctttgaggccattgaacaggcttcaagtatggatcacggatgcttggtcatcaatttcaatccttcccattctgtcactatcctttccgcggcaccccaaaactcaattccaaagccttgttcgcaatgcttgctgtaaatcatgatacaagttccaccggcacaaccagacctggccttgtcccacagcttttcccttatcatggccgatacctgaccgacaaatactccagccttgatttcgaggagccagcgtgtaatttctcctctcaggccagagggaactttttcaagcaccagaaccatcatcatggcctccaggatcatccagaccccatgacaagccgccggggctcactttatcatctgggttccaaagcccgcctggcacggctggatcgacatcagcaaggtctggctcatcgtccgaagtttccagaataccgaaaagggcgtgaatgtcggccactatcttctttagcagaccaaattgatagaactggtcacggcaggcaatgcgtgtccttctgtccaggttatcgacccctgcggctgtggctatgaaagccgcgggcacggaggtttccattttataaagatcggcaatgtcataaacaaatgacagttgtttgccagtatgaacgaaacccagggcaggtgaatagccagcggccactatcgcggcgtggcagatgccatagagacaggaattggcaacggacagggctctgttgatggggtcggttttattccagttgctcctgtcgtaattcctcgcactcatgggcacatcgaattcttttgaaagtctgaaataggtatcccgtactctcgctccctcttttccccttatctgttcaagagagagggttgggtccagtttttccttgaacctcaattcatacattctgcgaactatccgcagatgcgtatctcgatttgaccaggcggcagcctgacgcataaggttggcggaactacgggtggtccctgtcccggatgagtaaaagcggactccctgttcccccacccaagccaccaaacagccgcattctgctaaaacaaggatggccgcatgggtgatggatacgcctggccccagcatcagcagggccagtccagcgcagggaacaggagtggagcccatggcatcgtgaaaggcgattgcctgttgttctttgtctattttggcatgctccacatagagataggtgaagcggtcccgcatttttggcattaggtgaaggtctctgttacgcatcacttgccggaaccacggaaaggaggccgaagcccattcctttggcgctgccgatacctttttccaaggcttcccggaacagaaaggcatcatccactgtcagataaccttccagcagggcggaacggtatctcaggggacggtattcgttctcacgccggggcgaatttccccggggctccggtttggaaccgtatacccagcccaggcttaccagttcggtctccccgggcgtgaagcccagtctgccagccttggcggcaaaccattgcgccaccgcatcctttgggttggaatttgtgtcccaggtaagggcgacccgtttgtgcagaacccttcccgttttttcctttcctccgggtccttcccgcaactcgtcgattttgcgtttgacactggcattcacgaggatgcggaagcgcagccgctgacctgctgagaactggggatcgtattccttaacctggggaggggctgccaaaaatcccgtggcattctggaaagcccagtcccaatccggcggcagggacgactgcaccaaaaccatcgccctttgattttctccatcggtgttgttgtccacccgaaagaggaactggcgcttttcaaaatctgcggggtcaaagggctgcagaaacctcgggtctccttccttgcgcttgcgcatggggaaagccatgctgagccgccggtggacattatagatattgttcagccacaagcgcccgggccttggccggtcagggttgccgcctgtgtcgatgagcagttgggatagatacatcatccgttctcctccttcggatcgagtttgcgcctgcgctgctccagcgagcggaatttgattatttcctcgcgtttggccaagatgcgctcacgccaggcggggtcacagggatctatgcggtccatggtcatgccgctgccatattccagcatggtgcaggcatcgtggcagaggcggcagagggcgcgcaagtcctccggcttctcgctgcctccggcgcgtcggtaattcacgtgctgcacagtagtggcgggtgccttgcagaacatgcaggcggcattgtccatcaccaaacgctcagcgcggacccttttgtattcaggattgtcgtaatttgcccggttgcggggcggttgccaggctttgccggaaagcacggtctctgcctcgaagttgcggtccaatggcaggttacagcggatcaccagccggggcaagtggtggggaggctcaaaggacaccggcacgtcgtaatgcgcttcggcgttcggcggagcgtgcacgtcatcatgggccggaacccagtcgagcacacagggaacactgtcaggtatcggttcgcctttttccctcagttgcgccgggatcgaccgcaaagcctctttcagactggcataaaaccctggcgggtgttcatccaccggacgggaggggggacaggattttcgccccagataaagcgtccagactggttttttcagcgcttcagccagttgtgccacgatatccggttcaccctggagcgcaaccaggaagctggcatcagccaaatactcgcgtcgggagagcaaagccccgggtttggatttgatcttgtccgcgcccaggtttttggccagggcagtgccaaccagaactaggccgttgggcattttcaggtcagaaatgcgcagcttctgctccgctcccacagtatggtaatcccaccagcggatgcccgggcggtctatccgcacccccatgcgcaatttggcaatttcacccagccaatactgtccggcttcggcccggctgattcccagggcagcgcagagcaggcctgccactccggatttggtgggcgcgtcggctgtcctgcgcacggcgaatttggcctcattgcttccccaggcctgaaggggagcctccaatctcaggaacagggtattaggcggagaagacatttcaactctctactttctcgttttttacatcatcccattcaaaacccaacatctcaactgcttcgcgaacaagttctagcaggttgcaaactggctttatgtccagcgtgccctgttgaggctttaggggataacgtccattgggcgagaaccacagagcgttgcctttcatctgtccagggaagaaaccggcacttatatccttcacatagttggccagttggccaatgctttgttctaccaagtcagaatccttaacgattcccaccggtcgcacaaaggcatttgcatagctgacaggtgtctcttttatttctaccaatattccatcgggaaggttatgtgcggcaaagctgttctgctttccgctgggattagtgagtgcagcggcctggataaaggctccgacagtatgagctgccaacttttcattaccctggaggttgattatcaaggtattccaatcaattgagtaatatttgtagaaacaggccgaagcaaacatcgcctcgtctatgaatccagcacctgtgtcgtcgccaggctcgtcatcagctgctacatagtaatctatttctgggcgggcgatgtgggttgaaatggcgtgcgacacctgcagggctgcttcaacagtggtattttcccacttgaccttgtctgtgttcttgtccttggtatcgggctcgagcattcttccgcacagagcgatgtcaggggaatgtattgcccccgatattacatctgccgctttcttggctttctctgcaacactcaggccttcgctggtgacaatttgagcaagggcatcgatcttgttccgggtcatgaacaccagcatcttactatgtccgttttcgtgtttcaaaccggctttgttcagaacttcctctgcctgattcctgcagtcctgtcctgtagcttttgtaatcaactcggccaaccgacgggtacggatacccccgagcaagtttttgaattcatcgctcatcctgatgctccgctttaggcactggctggagatgcgggaccgcaacaccccaccgaaataacaggtcttgggcgcgcccaggtcgtcccggttcaggttggccgggctgtggttttggatcatgtgtatttcaatcaacatttgattcctccttgctgattattaaatgctgaaataaatgtgtctgaccatatcgctctgtttgattcccgttcccaagcggagaggtcatcgatgagggcaacccagtccagactggcaatgtcatgtctttttaaaatcgcgagcacttgcgccagcggttcctccagttggttcaactcgagcgtgagcaagcggtcgaacctggctaaaacacgtgggaactctttttcttctttaagtccacggcatattctgcccatgagccaaggcaggctggcgcctttcttttgctcaaagcggaattccgcgaaaagcttggtgactagccagaccaccttccgcctgggggttttggggcttatactgcggagtggccaccacaggccggaaaacaggtcgaaacccggcagggattcatccagacggcgacccctgagctttctgagcaagcccaggtcgccctctttgagttcgcccaggctccgaacaaatttcacggtgctctcattcattatcgcctccggatgaaggttttttaattgattttggttttaggggccagggcttgcgccgagccagttgttctcgttcaagcttggcggcaaccgtaatttccggcactagagaaacggcaaaacgcttcatgaagaatccgtaatcttcatccgcttcctgccagacattgccgctgttttccaccatctcgcccgaatggacgtcaacccgatgctctacgtgcgggatgatgtccgccacggcggtgattcccacggattccttgtaatcgccccggcggtcttgtttcctcatcctgtgcagggagtaggctctttcggatatctggtccagcagttcctcggagcttgtttttccggatagggcaatggtcttttcccaaacgtccacacatttggcttgaacgcttgtgaagcccactaaaaacagcgtggcggtccgagacatgcctttcgcccgtaagaagccgaccaggggtttatgccaatccctgttagcgaaagtgtatttgtccccggacatcagagccacctgggcagtcaggccattattgtcatcccggtaaatcgcgtgagggtcgttccagacaaggttcggaggcactttcaccgcctcattgttgcaggcatagaccagaggctcatgctcttctccgcaggcgctgcattttgctccgtctgacaccgggccaagcaggaataccttgcggggcagccaggtgaggccagtcagcaaggctacatccttctcgttttgggatccaaacgggttcagccaggcaggaacacccaaccgggaagtgggttcccaattcaggaatatcgattccgacagactatcaccctgccagatggcatagaagggaggagttctgttgatgccggctccgattccgctgccgcctacggtggtaaagagtggcaggcgcagcagaccggtaacgcagcaagctgggcaaatgccatcgatgaaatcggtcacatggcggaagtgccagaaattgtttgccgtgggaagctcgtggataaggtccgtgctggggcgtattctggatgttcctggggattggtagaatctggggccatcaccgaacaattcgaaatattcttggttttgttcaagccagtccgtccatgcctgaggcagtggcttatctgataccggcgcttgttttgtattggcaaaacaccaatagcccagggcgaggaggaaacggaaaacggacatgcggtccatcggattgccgtaagccaaacgcagtgtgtgtgcttttcgcaggacctcagccaggccgagcctggcagaatgcccgtcaagctgtagcacactgatccagggtttgtctgtcaaattataatacattgaagctcctgtcgcatggggagggttgatagcttgttgatcctttacagaggccgttccacaggctaacatcattatgccccatagctattatacaccaaatttaccaaggaataatttgtcaagtccaaaatagggctctaatttcaaacttccttaaggccggcaaggtcagattcacaaattcacaaccggtaaatatggcttgtgaatccgtgtgttattgtggcacagtgagttgggggacaaattcacaaaatacgcttatctcttatatccagccggaccaggggagaatgccggtttgcagtggctcatgccgcaaacaagagatgaagggaaggtagagatgatataatatcaatatataataatatataatactattatatattatatatactatttctatatgtattatagactggtagcgtggatacatcatatcctgtttacaatcggcttccgcggatgtataagagaccccttttttgtgaattagcctcataattacccgtctatcagcaggttgcaaattcacaagccatatttaccggttgtgaatttgtgaatttgccttccaacgttggtgagcctggagtgcagcgagcttgcgagtatggactacaggagatgttgctggcgtccatgctcgtgcctcgctcgacgccagcgtcaggaaggtcgatgtccccgtcggccaatcgttctgggaccttcgggctccaaacatatggattacttgcccgattgggaagtaagtcctttattttaggttatctaccacagttggtagcgtaactggaaaagcaattcgtatgaattcgcgcaatttgtggacttcctcccattttgatacccactatcaatagaagccccatttgccccatcccatacacatctaaaatacttcccgctgagttcccattggccgggcgggaatttaaggggaggtttacgggatgttagtgggaaggggcaaacggcctgtccgtgggcgaaaaaggctttgg

SEQ ID NO: 741 - DNA, 7288 bp, Artificial Sequence
  Synthetic Oligonucleotide
agacgatgttcctggcgatgatgccggtgcgggatttgtggatgaagcaatgttcgtatccgcctgtttctacaaatacttttctatcgattgggaccagttagtcaataacttgaacaacaatgcagaactcgccgcacatactgtcggtgccttcatcaagggagccgcactgacaacgccttccggcaaacaaaacagttacgccgcacaaaatcgaccagacggtattctcgtagagtttcggaactcaccgattagctacgctaacgcattcgcaaagccggttgaattgactgaacgcgatctggtcggtcagagcatcgcccaactcgcgcagtatgtacgtgatctcgatgttgggtatggtgagccagatcagcgcttctggttctctccgaatctacgaaatccgcttcaatacatttttgaagaaaaggcggacggaaaggatcataagactagaaaagagatagatttaagcaacgacaatctcgtttctcttgacgacttaattccttcagtcatcaaagcaaccggctttgactggactgaagtccaaaaggtcgtggttaaccatagcgccgcccaatgagcgccaacaccgtattccttcgactcgaaggaccgatgcaggcttggggcagtcatgaagccaagttcgtcatcaggcggacgatggatgctccgacaaagtctggggtgattgggttgctattagccgccaaggggatttcgcgaccagaggctcgcactgactggttatcacggctaagcgacctaaaaatgggtgtccgcattgatcgccccggcatccgctggtgggattaccatactgtcggcgcggaaatgctaatgcgaacagctgacggtggacataagaaaggcgcgatgctaacccgccgagaatatctttgcgacgcgagcttcctggttgcacttcaaggcgaaataggtttgattgccgaacttgaatgtgcactacaaaaacccaaatggaccctttatttaggtcgaaagtcctgcccaccatcccgtccattgtgtgaacatcaagaggataaatcacgttatccatccgatcaccccgatattctttcagccttacaatctgttccttggcgacctcgctacaaaggcgatcaacagccaccaatcgtagaagtattgtgcgactggtatccgtccgagacagagccaaatgctccggatgatgctgagacttggtacgatgtaccctattcacttgatccacccgcacatctgccgcgacttgtaacgcgaaaatcgttcatcgtaagcccgaacggcgatgttaaaaatggaacatcaacccagaatttcacgccgccgccaccccgcccaagggctgattacggaaatacccactacaaggaagttagattgaaccgtttgcagaaggacaaccacctttgcgttttctgtaaattgccgttattcggaaaaggcgctacggttcagcacatcacctaccgtcacgccggtggagatgaacgcattgaagaacttcgttcgttatgtcggctttgtcacgatgcggtaactatgatcgaatatggcgcaggtatggaaatggaacgaatcaacccggaagaagaaaggtggcgcgagcgaattagacaaaaacgagatgaaatagtcgcatcacgttcgattgaaactcgcagacgtcgtcttgaagctgaggaggtataatgagttatctctcgcacctgctaatcgacctgggcgataatcctgatcgtccgcgccccgcccgtctctggcttcgcaaccgctatcacgtccatcagcgactctgcatggcgtttccatcggcaaaattggtgatagatgaccccttcttcttgagtccgttctcgccggataacttcgacagtcgtcaggttaaaaccgctcgagacacagactccggcttcctctttcgcattgaccctcagcccggcagtaaggctgtcatccttgttcagtcggctatcgcgcctaactggcagtacgccttccagaacacgcccctcatgccatttattcaaatgcgtgaagagactcgttcctttaccattggtgaaagatttcggttccgtctcgaagccaatccaaccaagcgactgcgtgagggctctctccatccgaacggcgaaaagattaattctcaatgggttggaaagagagtgcctgtcccgacggatcaaatggacgattggttgactcgccgggcgaccggatccggttttttggtcgaaaaaatcaccaattttgtccccggatacgcctttgttggcaaatcatcacactcaatcaaagaaaatctaccccgttcgttgaaagatcaacttcgagccgttcgctatgaaggcatcctcgaagtcaccgattctgacaagatgacggggactataatctccggtataggacctgcaaaagcgttcggttttggtctgctctctttggtgaaaatgacttgaaataacagggaataccctatgaactacgatttacgctcgcttcccaagatgcgcgatgggctctcctatgcctatttcgagcattgtgtggttgaacaagaagggatgtcgatttcgatcttcaatgaacaggaacgaattcaagtacccgccgcggcacttggtgtattattactcggtcccggttcctctatcacccactctgccataaaaacacttgccgaaaatggatgtttagtgcagtggacgggagagggagcacagcgcttttatgcacaagggctcggtgaaactcgcaaagggggtcaccttgaacttcaagctaagctttgggcagatagtaagctacatgaacaaattgtacatcggatgtatcttctgcgctttcggcgaaaattgccagcgggactctctttagaacaaatccgaggcatggaaggcgttcgagttcgcgaggcttatgcgcaggcttcacgagaaactggtgttccttgggaaggtcgaagttacgaccgaaataactggtcgaatggagatcccattaaccgcgcattgtcagccgccaactcctgactgtatgcagtctgtcatacagcaatagtaagcggtggttatacgccgggacttgggtttgtccatgttggtaaagctctatcgttcgtttatgatgtgggcgatttgtataaggtcgaaacaactattccgctggcatttcggattaccgccgaaaatcctcccaagctggagtcgtcgattcgaacagcctgcagggaatcatttcataagttcaaccttttagggaaaatcctgcccgatatcgatagattgttcgaccttgaagctccctttggtgaagatgagatcgaatgggatatcgatgccgatgtggctcgaccaacgccctattggaatcctggtgatgacgatgaaaaaagtgggaagaaaaacgttagtgaggtaggtggaagcgaaaatttcgataactgatgaggttaatatggtagtgatgatcctcgaaaatgcaacgccttctttgagaggcgaattgactcgattcttaatagagccaaaagctggggtgtttgttggaaaagtatccgcaatagtgcgggaaaagctttgggagctatgcacagatcgacgatctccgccgggtataatccaaatttggagtgatgccaacgaacaaggcttcaacattcgtagtgctggggataccaacagaataatacgggattatgaaggcctgaatctaatctcgattccggacgaatctcatgcaactcgggtaaggtcggtcggacgtcaagcctgatttaacttggatgatacttggtcggaggcaaaatgcctcaaacccttgtctgttcaagggtattccccacgcacgtgggggtgaaccgaaaggaaaggcattgaatgagttggcacttttcgtattccccacgcacgtgggggtgaaccggtcaattctctgaagatgttcgctctatcatcgtattccccacgcacgtgggggtgaaccggtcgtagaacgcgccggattcagttgttgcacgtattccccacgcacgtgggggtgaaccgactacgcttgaaacaatcccttgccgaaatacgtattccccacgcacgtgggggtgaaccgaaaatccttgaggctgaggtagtcgaaatcgcgtattccccacgcacgtgggggtgaaccggataagacgattaaatagggtagacaggtcttgacactttacgtgacatcgactcaggagttgattttcgagttggtctggctgttctcgaaagaacatatcgggttaggattaatgagttgaagcctgaacaggatgtaaagctggaataggcgagactgggaatgcctgaattacttgacgctgatcagaaggccatcgaagcgaagaaggcgggggaggtgtggcggtaggtgattcgttaaccgtggtatcccgagggcaacgcgaaccaaagggaagcacagtagttttcgattcgacggcgctaggacggtgctggtggaggagttggtgcttgaccagttggtccaggcaaaactaccggaaccgtaaagggagccagatgtggaaagagaatcttccgagccttgatcggaatgtaatacgcaaattgttcgagacacgtcagaaggtcgcctagctgacggtctgatatatgtgtctttttctcaactacattgagcatattcagctttataagttccccgaatgagaacagataaataggtcgcattggaatgaatgtgtcgagcaacagcgtatcccaacccttcggaacaacatacactgtctctggtctattacacccggcaatcaccgtccggtagtagctcttttgtgaagtagtaatgagtgccaggcaagttgacgagccatcgttcacataatcgttgagaacaatgaagagtttgtctctggtggttccgttcaggaattggtaattctcgtatagaaagacatcgcccggcgcgattggtgttcctgtgttcattttacaaatgctccgatttggaagttgtgaagaacggcaaagaactcatttagtgaatcggctgcgacctcaggtgagatcacagaacctacttccaggcaggttaggtaatcaatctcgctccccatgcctttcgtttcgaccgttttcttccaaggcgttccttcggcggttactatatcaaccatctgtttagccgtcatggtgcgatacgctcccgcgatctcttcaaggatgtccagttcacagggagagaagacatccaagtctggatggctggtcgtcctaaaatcgatccttggcctctcactgtcagcaatgagtgtctcagttatgtttaggctttccgtaaagtcctcagggaggccgtggttatggattgcgttcctgaaatcgacagggaatggcccgtagtcgaaggcagcatagtgcaatcctatagcgggtattcccgttcgctgaaaatgaccaaagtcaaattggaagaggaatagatctatagctgtaacggtcgtcttttgaggctcccgtgccttcacgaagtagagaatggcattgaggagtttttgctgatagaagttcatataattgtgggtgatagattttagaccgatgatgcgagaccccaacctcatgtacggggtcgggggcactaactagctgaatacaattcagtatacaaacgggatcgcatatccgcaagaggctggcaccccagtgcccgctcgatcacgaatcgcccacccgggcagctctttgaaatattggggtcggttgtctcttttgccctaatgctatatttctaaaatacctacattccaaatcattaattcctcattcacgggcgatagccactttcggaggtaatatgcctaagaaggcaaggttggctcatccattgcaaaagagccacaaaaacaagaaaatagatttgaacgacaagcaaataaattcggaatccctgtcaaccacttgctctcggcgggctgacggcagtaaagcgccgtgtaattgtccccgctcgtgtctcttttgggagcagtgccataaggtccatcatgaggattaaagtggcatccatgcttttgaaattcgaggagagaagaattaaggtgaaggcccgtaggctttacattcaattgaaagccctgccaaacgagggagccaaagcgaagctgcaaccgaagttcgagcttctcacgcggaaatgggacaaaaatcaagcccgccttgctcaattggagaataacttgagccactttggcggtaactgattaattaattaggtgattgaggcaccgaccctagtatcattgtctggggcaagacatccacagccccttgcgagtttaaaagcccaattcctagcccaatagagccgtgatcgtctactcgggatgattacaccaaaacttttcagcgcgccttgcccttgatttaggctcagaggcaaccacaaccctttactcgagctatttgatgccagaccagaacgagactactgcggtagatccgccagctcccgaaccttttccccacggacaaactgctccagcagtcatgccaccgcctgttattccaaaccttgcgcgggtctccatctcgcatgagagagtcgaagatgggagcgtccgtgccgctctcgaaggagccgaagttagatatcggactcaaagctgggactccctctatgtcagtagcataaggaaatgtcagaatgctcgggcagtaggcaggccaataaaggtagtcgcaacgatccaggaattgacaacgccgatgcctacgctgatagctggcagcaggtattccacgatgatgattaccctgatggatcgggcgggcgaaaagcttcaatgtctgcgtgtgggagatccgatcgcggagggtattgtgccagtccagcttgaaaacgaagaatatgagcctcttgtggatgatccgtacatcgaacagctggaacggattcacaagaagcacctgttctgctgtttctacggcgtgattgtttcggtgcttgatgttgggtatgtcttctatctgatgagcatcaaagagaaggtcacatcaaaagaactggtcagaaccacgtcagcggaaagtgatcgtatccaccagattaggacagagtgcattcgcgacgacaaagatcttgtcgattacattcgagagactttgacgaccaaattgaagattgtggcactcgattccgcccctgacttgaaaaagtgtatcgacttcatgattctccagagcttctcggcaggaaagattggtcg

SEQ ID NO: 742 - DNA, 7286 bp, Artificial Sequence
  Synthetic Oligonucleotide
cccacgcgcgtggggacaacgaaccctgcctgtaactacactcacgactccccggttcacccccacgcgcgtggggacaactttcagcggcaatgcgaatcgccgcgagctgccggttcacccccacgcgcgtggggacaactttggggtataaggccgctgtgctgcccgatgcggttcacccccacgcgcgtggggacaacacatccaagtgcttggtcttgatattgttttgcggttcacccccacgcgcgtggggacaactggggtacggtgatcctgcctgcggctgggaacggttcacccccacgcgcgtggggacaactccgcgaccttctcctccaacacggcccgctgcggttcacccccacgcgcgtggggacaacatcggtcgagcagaaggtgcaagccaccattacggttcacccccacgcgcgtggggacaacgcatcggccttggcctcagccttaacctgcgccggttcacccccacgcgcgtggggacaacgtgatcgaggaccgtgccttcaaagttctcccgcggttcacccccacgcgcgtggggacaacccgcagtctcacaagcgcgcgtcggccccagccggttcacccccacgcgcgtggggacaacatcgccagcacgcgccccgcgccctcggaggtcggttcacccccacgcgcgtggggacaacctaagtggattcgccttgccactcgccgataccggttcacccccacgcgcgtggggacaacatcaagcgccagccccggcacatgcagcatatcggttcacccccacgcgcgtggggacaacttctttccagcccatgaaaccttcagccccggcggttcacccccacgcgcgtggggacaacacttactaaattattgattctgcggcatgcgaacgagaaaaaggccctcgaagtcatcgatgacccgagctgtttggccccaggttcggactcgaaagccctgttcattgtcgcttgaatagataatcaagcacccgcctcccttggcctggctgcaggctttttcccagagccgatcacggaccatggcggagacgcgtcccacgaacactcccgcctgaggttccaaaaaccagcgagtcagctcgcctcgcaaccctggggggacgcgctcaagaatcaggaccaccatcgccgggctccgtttcaccgatttcgggggctagcaggcggccgccttcgacctctccttccagattgtcccagaggaagccgggggcggcggcatccaggtcgaaggtagtgtcccaggccgtcgcttttgccagcatcaacgccctttggacatccgggatgattctctccagaagccgcgtggatacgaactgatcgcggcaggtgatgcgcacccggcgttccaactgtcccgtcccctcggcggcggcgcgaaatgccactggaacggtaatttcagccttgtacaggtcggcgagatcgtagacgaaggacagcatcttgccggtgtggataaacccgagtgcgggcgaaaaacctgctgacacgatggcagcatggcagattccatataggcaggagttagcggcggacaaggctcggttggcagggtccgccttgctccactcatcgcgtttatagctgcggcccgaccacgtgatgccggcttcctgggcggccttggcgtaggcatcgcgcacccgcacgccctccatgccgcggatttgctggagggtcagggcagggtcgaacttctccgaaaatcgcaactgatagaggcggcgcaccacctgcatatggaaaccctggtccgcccacagcctcgcctgatgcaggaagttggccgcgttgcgcgtctcgcccatgcccacggcgtagaagcggactccctcctccccgcaccaagccaccaggcacccatggtccgccaacacggagatggcggcgtgagtaatcgagacgcccggacccaacatcaggagagccagattggcacaggggaccggcaccttcccggcttgatcgtggacggcaatggcccgctcttcctgatcgacgtggcaatgctcgacgtacagataactccacccgtcactgaacttgggtagaacgtggagatcttgaattctcacagagcctccagcccgtgctgtagcgtcgatctccgatcgacggcggttgtagcgtcgatctccgatcgaccggggttgtagtcgatctccgatcgacgttacggcggtcggagaccgccgctacaaaaccaggcgatggatctcaccctggtacggccaatcttccgggcgcttgactaaaccggcccggaccggattctgccggacatattcatatttctcccgataggattcttgcgatctcaggacgtgatcgaaaaagtctttctcccaatgtgtgccctcgccctcatcttcccggaggactttggataaatccccgcgcagcgccttgatccatttccctaaaggtggggactcacgacaaaagccggcgaaaagatggatgtgatcaggcatgatcatgaagaacccgacccaaacaagaaaatcgctcgcccgttcggagaatctcgtgaattcccggtgaatcgcaggatttgccaacgagcgtttgcggtcctgcgtacacagcgtgagatagtagattgggctgcccgtatagagccagtccagtcgccgcaagcggggtttgaatttcatattggctcgatctccgctcaagaaatgttgcacggatccccgatcgacaagggattgtagcgtcgatctccgatcgacgtaccggcggtcggagaccgccgctacagcgagagcggcgccacggaaagcaggccgaagccgaaggctttgccgtgcccaacgccgcccacgatggtttctctgaagctgtccgcgtcctcaaccgtaagcgtcccctccaataacgccgagcgaaatttcatgcggccgcccgtcggcctcgggtcggatcggtctcctgcgccccacccgatctgcaagacccggaaagtttccacttggaatccaccttggccgcccttgccggcgaaccattttcgtatcacatcgtcgcggttctggtccttgtcccaggtcagcgccacgcgtttgccttgggccttcgggcggccccgcttatctgtcccctctcgcgtcctcgtaagatcaacgccctctgtgctggtttttatcttcttactcagattggcgcggatacggaagcgaagccgctgacccttctcaaagcgggggtcgaattcctgcacctgagggggagcggctagaggattcagaagaaaacgggcgttgtggaaggcgtagccccagtcaggctttacggcagagttagactggacgaggatcacgacccgcccgcccggttgcgggtcgatgcggaagagaaagccggagtcgccgtcacgtcttacatggacctggttgttggcaaagtccgcgggtttgaaaggcttgaggaagtggggatcgtgggatattcggtctttggatggaaacgccatgcaaaggcgctggtggacgtgatggaggtttcgcagccagagccgcccgggcctggggcggtcggggttggtgccgacgtcaatcaagaggcaggagaggtacatggctattccacctcctcagcggcaaggcgtctgcggcgagtctccagagagcggaacctgataatctcttcccgcttctcgatgatcttgtcgcgccaacggggctcttcggggttgatgcggtccaagcccattccgagcccgtactcgatcatggtcacggcgtcgtggcagaggcggcagagggagcgcaaatcgtcccggagttcgccgccgcccgcgcggcggtacgtgatgtgctgcacggtgctggcgggagacttgcaaaaaacgcacaagtgatagtcgtcgtcgagccgctccttgcgtcggtttttgtactctgtgttcgtgtaatccgctcttgggcgcggaggcggtggcgtgtcgctctgcggtggctgcaccgcaagtgttacgtcgccgtccgctccgacgcgcaactgcctgcggatgacgaatcggggttggtgcgacggcggctcgaatgtcaacggcacgtcgtaccagacgagcgcatcatcgggcgcctcgggctgctcgttggtgggttcccaatcaagcaggcaatcgacgggtcgcggctggggatcgtccttcagccgccgacgccaggggaccgattcgagggcagaaagcaagtcggggaattcacctcccggatgctccagcagagggcggcaaggggggcagcactttctgccgaggtagagtgtccacttgggcgctttgattgccgcctccagttcctcaatgaggtccggttcgccctgaagagcgacgagaaacgaggcgtcgcaaaggtattcgcggcgggtgagcatggctccggacttggttcccccctcggcggtacgcatcggcatccccgcacccaccgtgtgataatcccaccagcggacccctggcgcatcgacgcgtacgcccatgcgcagccgggccagccttggaagccagccttcgcgggcctctggccgggaaacgcccaatgccgcgcaaagcatcccgatgacgccggacttggtcggcgcctcggccgtgcgccgaatgacgaacttggattgctgatcgccccatgcctgaagaggaccttcaagccgaagtagcagcgtctttgcgctcatggggcacctccggattcaggaccactttcttggcctcctgccagtcgtaaccgatttccttgagtacagccgctatcagttcgtcaagagacttaacatctttgtcggcaagcgggacctcacgctgtttctgttttccgtcttcgctctccgtggtggtagccgtcaacggatagcggagatttggagagaaccagaaccgcttcgtcggcttgccgtatcccgtatctatgtcgttcacataatgggcaagctgcgccacgctctgcgagatgatgtcccgttcgccctgaggagccgccggtttggcgaaggcgttggcgtagctgatgggagtgtttctgacttccaccaacatcccgtcaggagggttgtgcgcggcaaaactattttgttttcccgtggggttggccaaggccgcggcgcgaatgaaggcgccgacggtatgggccgccagtttttcgtgattcgtcccgaagggcttcaggtttttgaccagcgtttcccaatgaatggagaaatacttgtagaaacatgccgaaccgaacatggcttcatccacgtaacctgcgcccgcgtcctcgccggggacatcatcggcggcgacatagtagtccacctcgggccgggcctcatgggtggaaatggcatgggcgacttgaagcgatgcctcaaccgtcgtgtctttgaggactcccgtttcaagcatcctgccgctcagcgccatgtccggcacggcgacggattcactgatgagcttgccgaactccgctgccaaggcctcgtccgtttttccgtcgccctgctggaggagttcggccatgcgtgtaatcgcctcttgggtggtgtaaaccagcatcttgctcctctcagcactttcctgttcgtcttctccttcctgtttttttgctttcttaggctccagcccgcaggctttgagaatgttctccgctcgcttcctgacgtctttgcccgtcaccttttccgcaatctctttcgccaactggcgggtgcgaactccgcccagcaattgtctgaactcctcactcatgcggatgctgcgcttaaggcactggctggaaatacgggagcgcaagactccgccaaaaaagcaagtcttgggcgcgcccaggtcatcccggttcaggttggccgggctgtgattctgaatggcgtgaatctggatcaacatgactctcctcctcttggacagttcaaaaattcctcggcccatttgagccgggtggattcgcgttcccagatggaaagatcgttcgtcagccgcacccagtcgagttcgaggtgcttggaagctatgaggtcgattgcccactgtagggcgggttcgatttcagcaagcggcagcgtgagcatcctgtcgaagcgttgctcgaaacgctgccgcgctgttttctcgcccggccgggatcgcccgagctggcgagcgagggtctcgcggggtgaatgctcgaggggccggagggcgtagagtttggcgacaagccaggccacctcacggcgaggcgcccgttgggtttgcgcccgcagcggccaccaaaggcctgcgaaaaggtcaaagccctctaccgattcgtcgagcccttgcccggcatggttgcgcaagagcccgagctcaccgggtttcagtcgagtcagaacttcgacgtactgctccgttggagtcacttgtcccccccttcgtctttgttgtttctctttggccgcatgtccggctttacagcggcaatttcttgtcgcctccggagggaagcggttgtgtagcccggggaaagcgatttggcgacggcggccatcaacggacgatattcctgggccgcctcttcccatgccttaccgccttctgcgatcatctcgtcgatttttccggaaaccgttgcctcggcttggggacgaacagcggcgactgcggagagaatttcaaggtgtcctctgtttcgtgaagtctctcgcggtttggctctgccaacgagcttccagccttccttctgccacgcctggatttcttgcaaactcgcctgaaccttcacgtcgtcgagcgcggccaagaattgaatctcccgctcggctgcttccaggtatttgtcgttctgcactgtcgcaaagctgacgacccacaacttactgttccccttcggcttttccccgcacaggattcccgccacgaccttcgtccacttcccagccgcagcgtcggccgggccaagcgcgctgaaaggcttcacaatctcgtcgccttcgctgatggtgtgcgggtcgttccagattcgtgccagactgccttcgcctgtctttgtgctcccaatacccgcaaagacacattgacgtatcagagcctccctgcgcccgcaggcgatgcagttggactctggtgtctccggagtgtctaaccagacgcgccgcggtacccacgttaatcctatcaataatggaacattgccgtgttgagggaggcttatgtccggattttcccatgtgggcgtgcccaggttcatctccgacgtcttccgccatgagaggcgcagggtttcggaaagg

SEQ ID NO: 743 - DNA, 7254 bp, Artificial Sequence
  Synthetic Oligonucleotide
caaagaatttccggcgctcccgaggcggcaaggccttcacgtactccaatacttcattcgcgcccatcatcgaaaaatatcacgcacggggcgcgcagcgcaagttcggcgggctgccgcagggcgagcacagctctacgattcaccgtctcgccaaaacgcagagttgcactctgcgccagccagccttttttcttcgcggcacaaaggggcgctacagttctgctcccggacttgcctttcatccctcccaggtgtataccttcgtcatgtttatcctgtggtagccacctggcgggcggccgggtcgcgatcacccaacggccccaccacccgcctcttgccccgtgaaggaggaagcagtgaagtataacctgctcgaagaaaagtggattcccgttctatacaaggacgggatcagcacacgtgtgaatgtcattgaggcgtttacggaagccggccgcatccgcgaaatcgcggccagcaaccctatggaccgcttggccatcctgcgtttcctgctcgcgcttctctattggtgcaaggggaatcctccagacgaaaccgacttgatctcttcgtttccctcggattggttcaagaggctcgatgacaataaggactgtttcaacctgctgggcgatgggaggcgtttttaccaacagaagcctaagcgtcttgagaagaaactctcggccgactatctcatgcaggaggtgcccaccggcacaaacttctggcacttccggcatgggacagatttgagagacggcttatgtccggcgtgctgtgcaatgggcctgttgcgcctgccgctctttgctacctcggccgggcgcggcaagcccccgggcgtcaatcaaaaaccgccgacctacatcgtgccgatgggcgactcgctttccgaaaccctgcgtctctcgtggcggaaaagaccggagccgaacctgggcacgcccacatgggaaaagccggacataaccctccctcaacacggcaatgttcccctattaacgggattaacgtgggtgccgcgccgcgtgtggttggacgctcccgaggaaccccagtccaactgcatcgcctgcgggcgcagagaggctctgatccgtcgatgtgtctttgcgggtatcggcagcacaagaacagacgaagggagtccggcacgagtgtggaacgacccgcacaccatcagggaaggcgacgagattgtgaagcctttcagcgcgcttggcccggccgatgctgcggctgggaagtggacgaaagtcgtggctggaatcctgtgcggggaaaagccgaaggaaaaacaaaggttgtgggtcgtcagctttgcgacagtgcagaatgacaaatacctggaagcaaccgagtgggagattccgttcctgaccgcgcttgacgacatgaaggttcaggagagtatagaaagcatcggggcgtggcagagggaaggctggaagctccctggcaaaaccaaaccgcgagagatttcccaaacaaggggacaccttgaaattctctccgccgtcgccgcggttcgtccccaagccgaaagaacggtttccggaagaattgaccaattgatcgcccaaggcggcgacgcatggcaagaagccgcccaggagtatcgtccgctgatggccgcagtcgccaaatcgctttcacccggttacacaagcgcgtctctccgaagtcggcaagaaattgccgcagtaaagccggacatgcggccgaagaaaaaccacaaaaacgaagggagggacaagtgactgcaacggagcagtacgtcgaagttctgagtcggctgaaacccggtgagctcgggctcttgcgcaaccatgccggacaagggctcgacgaatcggtggagggctttgaccttttcgcaggactctggtggccactgcgggcgcaaacccagcgggcgcctcgccgtgaggtggcgtggcttgtcgccaaactctacgccttccggcccctcgagcattcacccggggagacgctcgctcgccaactcgcgcgctcccggcccggcgacaaaacagagcgaaagcgtttcgagcaacgcttcgataggatgctgacgctgccgcttgctgaaatcgaacccgccctacaatgggcaatcgacctcatcgctgccaagcaccccaaactcgactgggtacggctgacgaacgatctttccatctgggaacgcgaatccacccggctcaaatgggccacggaattcttgagctgttcaataggaggagaatcatgttgatccagattcacgccattcaaaatcacagcccggccaacctgaaccgggatgacctgggcgcgcccaagacttgcttttttggcggagtcttgcgctcccgtatttccagccagtgtctcaagcgcagcatccgcatgagtgaggagttcagccaattgcgcggcggagtgcgcacccgccagttagcgaaagagattgccgaaaaggtgacgggcaaagacgtcaggaagcgcgccgagaacattctcaaggcctgcggcctggagcctaaaaaggcaaaaaagcaggaaggagagggtgaacaagaaagtgccgagaggagcaagatgttggtttacaccacgcaaggggcgattgtacggatggccgaactcctccagaaggaagacggaaaaacggacgaggccttagcagcggagttcgggaagctgatcagtgaatccgtcgccgtgccggacatggccctgtgcggcaggatgcttgaaacgggagtactcgaaaacaccactgtcgaggcatcgcttcaggtggcccatgcgatttccacccatgaggcccgcccggaggtggactactatgtggccgctgatgatgtccccggcgaggacgcgggcgcagcttacgtggatgaagccatgtttggctcagcatgtttttacaagtatttctccattcattgggaaacgctggtcaggaacctcgagcccttcggcgcggatcacgaaaagttggcggcccataccgtcggcgagttcattcgcgcagcggcgttggtcaaccccacgggaaaacaaaacagttttgccgcgcacaatcctcctgacggaatgttggtggaagtcagaaacactccaatcagctacgccaacgccttcgccaaaccggcggctcctcagggcgaacgggacatcatctcgcagagcgtggcggagcttgcccattatgtgaacgacatggatacgggatacggcaagcccacgaagcggttctggttctctcccaatctccgctatccgttgacggctaccaccacggaaagcgaaaacggaaaacagaaacagcgtgaggtcccgcttgccgacaaagatgtcaagtctcttgacgaactgatagcggccgtactcaaccaaatcggccacgactggcaggaggtcgagaaagtggtcctgaatccggaggtgccccgtgagcccaaacacgctgttcattcggcttgaagggcctcttcaggcttggggcgatcagcaatcgaagtttgtcatccggcggacggctgaggccccgaccaaatcgggcgtaatcggcatgctgtgcgcggccttgggcgcctcccggtcagaggccgctgaggagtggcttccaaggctaagccggctgctcatgggcgtacgcatcgacgcgcccggagtccgctggtgggattatcacaccgtgggcgccggcatgccgatgcgcactgccgagggtggaagcaagcccggggccatgctcacccgccgcgagtacctttgcgatgcgtcgttcttggttgcactccagggtgaaccgggcctgatcgctgaaattgacgccgcggtcaagtcgccccgatggactctgtacctcggcagaaagtgctgcccgccctcgcgccctttgctggagcatccgccaggggaattttccgatttgctctccgccctcgaatcggtaccttggcgcaaacggctggagggagacccacagccccaaacgctggaatgtctgctcgactggcacccaaccgcagaccagccggacgctcccgatgattcgctcgtttggtacgacgtgcctcggagtctcgacccgccctcgcacgaagctcgattcgtcattcgcaagcaattacgcgtcggggctgaaggcggcgtgaccgttgcacctctgcccgcacagagcgccacgccggcgcctccccgcccaagggcggattacaccaataccgagtacaaaaaccggcgcaaagagcggctcgacgatgaccatcacttatgcgttttttgcaagtctcccgccaccaccgtgcagcacatcacctaccgtcgcgcgggtggcggcgagttgaaggacgatttgcgctccctctgccgcctctgccacgacgccgtgaccatgcttgaatacggcctgggcatgggactcgaccgcatcaatcccgaggacccgcaatggcgtgaccggattatcgacaagcgggacgagatcgtcaggttccgctcggaggaaacccgcaggcgattgctcgccgaggaggtggaataggatgtacatttcctgtctcctaatcaacgtcggtgacaaccccgaccgtccccgccccgggcggctctggctgcgcaacctttatcacgttcatcagcgcctctgcatggcctttccctcccatccccaaaaagatccccacttcctcgcgcccttcaagcccgcggactttgacgggaagcaagtccatgtggagcgcggtgcggattccggctttctctttcgcatcgacccgcaactgggcggccgggccatgattgtggtgcagtccgccaccaaacccgattgggactatgcctttcaaaatgcgggccatcttctggtgaattccttcgccgctccccctcaggtaaaagaactcgatccctgtttcagcgccggtcagcagcttcgctttcgaatccgcgtcaacctgagcaaaaagataaagaccagcacagcgggcatcgatcttaccaggccgcgagtggggacggatccccagggccgaccgaaggcccaaagcaaacgcgtggcgctcacctgggataaggaccaggacccgcaggacgccatacgggagtggttcgctaaaaaggcccagaacggcggcttcaagctgggagccttgcgcgctctgcacatcggctggggcgctggaaatgacccggactccacgcctgccgtccaggacagccgctcgggggacaggcgcatgaaattccgctccgccttgctcgaaggaacgctcacggttgaggaccctgctaaatttcgtgaagccgtcgttcacggcatcgggcccggcaaggccttcggtttcggcctgctttcagtagcccccgaagcccgctcagcgggcggcgacgtgtagcccacggcgcaagccagacccgtggtggtgacatgcgaactcaagatctgcatattctaccgaagttcagcgacggatggagttacctgtacgtcgagcgctgcaaggtggatcaggaagaccgggcccttgccctgcacaatgaagcggggaagacgcccgtgccttgcgcaaatctggccttgctcatgctgggaccgggcgtctccatcactcacgccgccatttccgtgctggcggaccatgggtgcctagtggcgtggtgcggagaagagggggtccgcttctacgccacgggcatgggcgagacgcgcaacgccgccaattttctccatcaggcgcgcctgtgggcgcacgagggttttcgcatgcaggtggtgcgccgcctctatcagttgcgttttgccgagaagttcgaccccgccttgaccctgcaacagatacgtggcatggagggcgtacgggttcgagacgcctacgcgaaggccgccaaggaggccggcatcgcctgggaaggccgaaactatcagcgccaggagtggagccaggcggaccccgctaaccgggccttgtccgccgccaattcctgcctttacggtatctgccatgcggccgtcgtctcggctgggttttcccccgccctcgggtttatccatacgggcaagatgctctcctttgtgtacgatgtggccgacttgtacaaaactgaaatcaccgttccgatggcctttcgcgccgccgccgaagcgcaagatcaactcgagcggcgggtgcgcatcacctgccgcgacaggtttgtatccacacggcttttggaaaggatcatcccggacatcctgtctgccctgatgctgtcaaaagcggcggcgtccgactctgaatttgaccttgatgccgctgcccccggctccctctgggacgatttgcagggcgccgtggaaggcggccacttgcacgccgtagaagaggaagaaacggagcccaaccatggtggttctgattcttgagcgcgtcccgccagcattgcgaggcgagctcactcggtggtttctcgaacctcaggcaggggtgtttgtgggacgcgtctccgctctggttcgcgatcggttatgggaaaaggcttgcgcccaagccaaaggaggcggatgcctgattctccactcaagcgataatgagcagggattccgtgtccgaacatggggcagaacagcgcgctgcatcgatgacttcgagggcctttttctcgtgcgtatgccgcagaatcaatagcttgggaagtgttgtccccacgcgcgtgggggtgaaccgtaaagatgattaagctggtgcggggtcatcccgttgtccccacgcgcgtgggggtgaaccggctttcagataaaggtgggaagcgccgtaccagttgtccccacgcgcgtgggggtgaaccgtagcagataatcccaaacccgccaggagtggcgttgtccccacgcgcgtgggggtgaaccgctgagtgcaacgcgtcggtgttttcatcgatcgttgtccccacgcgcgtgggggtgaaccgaatcggcgcgggcgatcaatttgtgtcgggcagttgtccccacgcgcgtgggggtgaaccgcaccccgataccggcaaaagccccttgagcgtgttgtccccacgcgcgtgggggtgaaccgcagacgagatgtgacttggtgcgtatcatggagttgtccccacgcgcgtgggggtgaaccgtcagcgtgtagctcgtcgcattcgagctgtgcgttgtccccacgcgcgtgggggtgaaccgcaattcctcatctcaggcaacgctcctcagtagttgtccccacgcgcgtgggg

SEQ ID NO: 744 - DNA, 7232 bp, Artificial Sequence
  Synthetic Oligonucleotide
tatgccggttcacccccacacacgtggggaatacgaggcgagcctgtccgctattaaacgagtttacggttcacccccacacacgtggggaatacggcggcgtgctcgatgcggatgagaatatgtactggttcacccccacacacgtggggaatactgtcggtggcgtccgaatctagcttttccttgacggttcacccccacacacgtggggaatactctgcaatcccaaagctaaccggtttatgcctcatgcctagctagggtgttctagtgtcagaaaaattgcttttgacaatctcttgagcgcgtttgaactcaaccaatgccagaccatccaggtcaataaatctccgatccctttcaccagtttgccggtaagaaaaaccttgcgggttctggtctgtccagatttgcattaccacgccggtatcctttgcctttttcaccgctgttgcccaaagttcgtctctaactctcgcgctcgggttcccaagaaaaacccccgtcttcggttccaacagccagcgtgacaatgcgcccttcaagctcgtcggcgttttctccagtatcatcactaacacccagcacctccgcgatgtcaggcaagagcctatccatcagtctgaattcgtggaacacctttcggcactccatgcgtactactctttctaattccggtggattttgagcagctatcctgaaagcagtagggattgtaacctcggttttgtagaggtctccgatgtcataaacgaagcttagcattttacccgtgtgaacaaatcccagagcggatgaatagccagctgaaagaatacctgcgtgacaaactccatagagacaagcgttcgccgcggatagagcgcggttgattgggtcacctttgttccaatcatcctggtcatactggcgacctttccattccaccccgtatttagctgaagcctcggcataggtgcgacgcacgcgtatgccttccataccccggatttgctccagactaaccacctgaggaaccgcttctttaaagcggaaacggtacatacgccaggcaacttccagacgtttctcctcgtcactaaccagtttcgcctggcgaatcatcctccgtgcgctgtaggtgccaccaatgcttgccgcatagagccgaataccatcctgccctgtccatgataataagcagttattctgggaaagggatttcaccgccgcatgagtaaccgtggagccgggtcccagcataatgatgcttaactggtcaattggcacccgcacgaagctctcaccctgctggaataccaacccattcgcatcaacatccagccgccccatttccatgtagaggtggctccatctatcacggaaacgcggcaattcatgtaatgtacgcatagctactccttgatacgcgctagagaaagcagcccgaagccgaagcctttggcggagccaatgccctgaatgacggaatcgtgcagatgctcagcatccgccacacggagtatgccgtcgtagcgggcgtagaagaaccgcttgagttcgtcatctttgccattggaagcgccgacgtagcccgtttgcacgttgagcaactgctcgacggtgaacccggacttttcggcatggcggatgagccattcatcgaggttagccttgtccacggggactcgcttaccgttgcttttggtgccatcctggcgggtcttcgtatctatcttccgtgtggggtttgccagcagacggaacctgagaagctgctggttctggaattgtggttcataagtcttcaactggggtggcgcggcaagaagatagccagcgttgttaaaggcatagtcccagtccggcttcattccagattgcatcacaatcgcagcattcccgccgggtagagggtcaatgcggaaaagaaatgcttgttcctccgtgcgcgggccgtgaacatgctggaagtcatcaggacgaaagggttccaagaacggagggtcgccctctttgcgcgcggaggatggaaacgccatgcacaggcgctgatgaacgcggtaaaggttacggagccagagccgtccgggggcaatgtccaagtcaactttaagaagagaaagaaacatccctaactccttatccggcattgcgccgggcgctatgtcaaaaaataccttctcaggtcgaccgcacagctttaagcaattcgcgccgccggccaggatgttgctctttgagattacgattgatttgttcgagaatggtcgtgcgttgagccgggttgcaagggtcaactctttcttttcggccatgaccgtattccagcatcgtacacgcatcgtgacaggtcttgcataacgaccggagatcagagtcggtctcgtgtccggcattttcgtaggacacatgatgcacttccacagcaggggacttgcagaagacgcaaaggccgttatcaagtttcagacgactcggcctcgcgactgtatagaagtgttcactgtaagggttgccatgacgtgcgctcagtcgctgtgtttgggttgcctgtcccattggcaccgtaacctgattcttgataaccaaacgcggagcataattatagaaaccgaaggctacgggcacatcggaaacgagccgggcacccatgggcacaagtctctctggcggctgctccaaatatgtatcgagtgttacagacgccccgctaccctcgcggtcaatggcgttgattctggggcgccaggggaccgacgaaagcgcttgggtcagcgtgtcaaaactttcggtgccggcgtaaacaggctcggccgggacgcagcactttcttccaaggaacaaaggccaggtcggatttctcagggcgttggcgcaagaggcgattatggttgaatcgccatgtaacgcaaccagaaatgaggcatcaaaaagatattgacggcgcgaaagcaaggtttcgtattcgccggtcgatgcggttatcttgattttgccgtcggcgcttcgaatgcctaacttggctcccgctgtctggtaatcccaatcaagatttccagtccggtcgacgcgtactcccatgagtagtggtgtcagcagcttgagcggctgccgtgaatcttcacgattaacacccatggcacagagcaacattcccagtatgccggacttgctcgggtaaaggtcagtgcggcgcaactgaaaacgggatgaggtgccccacgcctgcatgggaccggccaagcgcagaaacaaagtattgtggtcactgctcatgcggtaccctccacgagtttaaccacggatttgataaggtcttcgagtgtgttaactcttttagcttttgcgatatctaccgaagcagaccccactgccaggagcgctcggctcatgtctgtcggcgagaaggctgctactacggtgtcgatgtaattactcattgccgccgctgattcacgcatgaggttaataccgtcaacgggttctaggaaggcatttgcatagctgattggacactttgcttccgatacttcgacgaggataagttcaggaacgccgtgcgcggcaaagctgttctgtttgcctgtgggattggatagcgccgcggcgcggacaagcaccccggctgcaagagctgccttatcgctttgccaggaaaggtgcttcttcaaggcatcgatgtcgagattgagatacttgtagtagacggctgaattgaaaaacgtttcggtatcgccagagccgagaaaggcagcgcctgttttctcggtctgagttgatgcgaattcctgcttcttttcatccatcgcggtgaagtagtcgctctcgattagcgtctcatgcgtgctaatggcatgcgccacctgacaggctgcttccacgttcacgaccaggtcactggtagtcattctgccgaaaaggccgatgtcaaccgtgagcttcttgctcgccgcggaagctcgctggacaaactcatcaaccgttttgtctagagccttctcttcagctttagagagctttgctttggtcccaatgaaccggttgtatgccggaggggtgcgcccacgcagttctacgacaagctcagcaatttctttagcaaagggtggtgggaaaaagaccagttgacccgtccggtctgctccatcgctcacagcagaagagctttcgggctgcgcttgtgcctcctcaccctctgctgcttcgtctgaattgcctccgcgcttttcagccttgaatttgctggcaagcgcggccttgactttgttcaattcgtcatcggtaatgcttgggtcgctcttcctcaattcgtcggccaccatacgtggcaggtatgtcgttctggttgcgaggtcatcgccgaacacttctttgaattgtatagaatggcggatatttcgcttgaggcactgactgctgatgcggccgcgcgtgacgccgccaaaaatacactttttcggctgcccttcgtcatctcggtttaagtttcctggtggcatgctctggaggatatgaatctgtacaaacataatgtttctcctttttcgattctcttaattagtcgagtaattggtctagtccgtaacatagacgtgtccagtcaacaggttcgggatttctcttgcgcagattgtcaacaagtgcggcgctaagtgcggcctcaagccgacgaccgcgtgggaaagaaacagggtagggggacgccatgtcgcgctcattgctctgtcgtttcggcagtctctgcagcgggcagaattcggcgttgggatgaagagtgcgggcacgtgcggggactgatgccatcagtttgagcatcaaccacgccacattccgcgacggaagtcctttggtcttcttgtcacgaagtccccaatacaagccgctaaaaacatcgaacgccgctggtgaatcgtgcatatccatgtaggcagcgttcgatagcgtaacccaatcggtatgcgtaagaagcctcaccgcagccggcacaaaatgctcaacgtccttgcgctcgactctttcgggttctttccaaccgtcgatgccctgtctcctggacggggggacggcaggcggtaaggagcgaatcgtctctggtgaaagttgtgccagctcaacctgccgatgatcgtaggttttgttgttcgcgggatttgtgcatggaacgaccaggagccaaccctcatgcttggggttcttcacgactacggtagattcgggaaacggatcgtcatgcgccaggcgctgcaagtctcggccatcggtagccaagttctcccgggaactttttatcgttttatacggcacgttcttgactttgtcatatttcttactcacatcgtatagagcataaaaggcagccggatcctgccattcgaacaatttctcgtctgcacgcttttttgtgttttcgtttttcatgtacacgattttcccgaccgtgggtacattgctttcaccgcagtaccagcaagtgccttcttgggctgaggggagaaggatgcgccggggattccaagttagcgcctcgagataggggattggactcgtcgaatcagtcggcgtaaagtagccggaccactgcgctttgcccgctttagtatccaacggtacaaggttcaaaccaagcgtggccgccaagttatcgccagttgccattgccataattggcggcgcattgtgtaccgagggagtctttccttggccgcctgattggctccacggaaccacacggagcaggccgatggttgcgcacggcaggcatagccgcatactctcatcgtcgccgtgatgaaagtgggctatgttagtagccacagctaattcagcaaacaaagagccgaccgacttcttttctttttccttggagatggatacagacgtgtcctgcaggaatggcgattctttatcgaagaggtcaaaacaatggtcttccttgttgataccgccgagcaccgcgctcggcaattcgctcttcagcaacgacgcccgaacctcttccaccccacccgctaagtctgctttccaataaagcaaagtaagcaggaaccggtgcacggcgaacatgtcgagtgggcttgctaagcagatacaacggatgcgccctgcatgggtcagcgtatccttgatacccacgtagccaagcttcccatcggttccgagaacaggaatccagtgctcctcaagcaggttgtatttcaatgttatcctccgcgcgtgttgttatacctgcaatgtatcttttcttggcagagctaatcatacatttgttctattttcgttgtcaaaacacctattcgtgatacaatctgtaaagtgtttcgctccagtctcggaattgctctttaagacgcaacggttcaattacctcgacatccggcccccaactacgtatccagggggttatttccaatgcactgtttacctgtaaagagagccggcatccgccatcgggagtttcctcaattaattgtgaaatatgccacactgattcctttacgcggcgtgtcacatgtggtgaaaatttcagaacaatgctaattgcatctccggtgaaaataccccagcttgatgctaacaacttcccgatatttatatcagggggaatctcgaaccgcttgttcaagacctccaaatctttcatacgttcaagcttgaaggtaataatgccttcctttccttccctcacagcatgcccgatgacgtagacggagaagccaacacccgtcatatcaacgaaataaggttccagaaaccattccttgatgccttcgctttcaaaagactggtacttcattctcacctggcgttgtgttgtccatgcgattgcaatcttctcaaagttacgtataaactctaagtcttcctttttatcgccaaccgaactggcgctctctttcaaacgtatcgcaaggggtgaaggcaatacggaggaaatctttgtaagagctttttcgatatgcgggttgttctcatcggtctgacggagcgctagacggcacgccagaaatattaccattgcctcataaagtgagagggaaaccggtggcagaatgtagccttcagtaatcccataccggtctccgttctgcgtcagaggtatcttaaggtcagtatcaagtgattgaatatctctttgaatcgttcgcatacagactccacaaaggtcaggtaattctctgctcgtgagacctgacggattactgtggagaaagtgttgtatctgactgagacgaactgcccgggcgaga

SEQ ID NO: 745 - DNA, 7207 bp, Artificial Sequence
  Synthetic Oligonucleotide
ccgccgctccgcaaactcctccggaccgaaccacgtctccagccgcatcgggcttccgaccaccggctccgccatccgtcactcctccttcgccgccatcaggccaaacagcgttccgtccgcccaacattacccgatccggctttccggaaacggacgaggcgggcgagtagtggaataggcggggcagggatgccacgacagtgtcgcgaaagcagactgtgaggcccggtagcgtggacgccgggcgcggtgttgtggcattgcttcctgcatctgagggtaaggagtacctatgagcgctgcgacacatcatggcgaagtctacaacctcctcgacgagccatggatccccgttctgatggcagacggttccaaccgccgcgtcggcatcatgcaggctttcgctgacacccacagaatacgcacgatcgcggccagcaaccccatggaccgtgtggctatcctgcggtttctgctggcactgttgtactggtgccgagggaacccggccgatggggcgccgcaagacctgaacgacccgttcctagacggatggatcaccaagctcgaggaataccgtccacggttcaacctgtttggcgacaacgtccggttctaccagtaccggaagcgcggcgaggtacctgacgcccctgccaactacctgatccacgaagtgccgaccggcacgaatgcagctcactttcggcattgccgggacagggacgacggcctgtgcgcagcctgctgcgccctcgggctgctgcgtctgccggtgttcacaacgtcggcaggtcgcggcaggtcgccagggatcaacagcaagccgccagtctacgtcgtgccggagggctccagcctgagtcaaacccttgcccggctgtggagaccagcagcaacgggcgacctagggcatccgagctggatcaagcccaagcggtctctgccgagctcgggccaggtgcctttgctgatgggactgacgtggctgccgaggcgcgtgtggctggacgatcggtctggcccgcctgctgcgtgcgctgcctgcggggaatggacgacactggtgcggacctgcgtgtttgagggactaggcagcacgaaggaggaaggaaccacgaagcgcgactgggtcgacccgcacgtgctgcgggcacccgacgacaagggggaggtcgtgcccgttcacggacgcgatcccgttgcgaggcccgacgcggcggttgggcagtggagccttatccagacggggctgctgggcagtgacgtggtgcgcaacgagggtgaccgagcatcggtggcaaacttcgcaaccgtccagaatgacaagtacctagaggcaaccgaacgcgtcgtcgcgaacccatccggcccgctgggcgtggctcagaacgaaggcgtgtacatgcggtgggactccgcgtcccgcgcggttgggttcgcgcttcgacgcatagctgaacaccccaagagccagaagcctcccagagcggcctcgctcatcgcatccatccgcccccatgtcgagcaccgcgtatctcagcaggcaagcgaactcctgaccggcggcgaggacggttgggcacgagctgccgaggagtatgcgcctatgatggtggccgtagcccgcgcggtcgctcccgcagccacagtcgccgatacggaacgccgccgcaggatcgccgcgatccgcccggagttcgccgccgcgacaacaggctcggcggacgatacccaggatgaggagggaggtgagaccgactgatggctacgcctactgagcagtacatcgacgtgcttctggcgctgaagcaaggcgaactcggcctgctccgtcggtatgccgggcagcctctggaccggaccttgcaggcgttcgacctgttcacagggctctggtggccactccgccagaagagcgcgcaggcgccccggcgatccctcgcatggctcgtcgcgaagctctacgccgcgagaccggtcccccatgagcggggccgtcggctcgctcgcgtctatgcacggtgcgcgcggcgtgagccgtcccggcgcgaccgacttgtgcgcgagttcgacgctcttctcacgacgccggtgtccggcctggagccgcaccttgacttcgccctaggcctgctgcaggacttcgacgccgcggtcgactgggcggcccttaccgacgacgtctcacgctgggagaacccagccgtccgccaatcgtgggcggaccagttccttgaggcttgagaaaggagccaagacatgttgatccagatccacgccatccagaaccacagcccggccaacctcaaccgcgacgatctgggcgcgcccaagacctgctacttcggcggcgtcctgcgctcccgcatcagcagccagtgtctgaaacggagcatccgtctgagcccggagttcgcggggcttcttggcggcatccgtactcggcaactcgcgaagctgatcgccgtgggcttggaggacgacccgaaggcacgcaagcgtgctgaggacgtcctgaaggcgtgcggcttcctgccgaagaaggccgcgaaggcgacggaaggtgaagacgaggcgacctcagccgacaagagcaaagcccttgtctacacgacgcgatcggcagtcgatgcgatgacaaggctgttccgagagggagccaacctcaccgtcgacgagttggcgcgcaggttcgccgagatgatcgcgtccgacatcgccgtgcccgacatggcgctctcgggccgaatgctcgagccggacaagtccgccaaggacacgtggaaggggctggacacaaccgtcgaggcagcgttgcaggtcgcgcacgccatctcgacacacgaggccaagccggaagtcgattactacgtggccgccgacgacatcccgggggaggatgcaggagccggcttcctggacgaagcgatgtacgccgccgcatgcttctacaagtacctgtcgatcgactgggaccagctctgcaccaacctggccaagacgggcgagaaggcgccgaggctggcagcccacacagtgggagcgttgctaaatgccgccgctctcaccaccccttccggcaagcagaacagctacgccgcacacaacccgcccgacgggatcatcatcgaaatccgcgacacgcccatcagctacgcgaacgcctttgccaagcctgttgagatcggaccccgggacatcacctcgcagagcatcacgcagctagcgtcctatgcccacgacctcgacgtgggcttcggtcggccgactatgcggctctggttctccccgaaccttcgctatcgcctcgctgttggagatgacgaaccttcccttgcggatcaggactaccgatcgctcgatgaactggttcaagccctcgtagcggcgcttggcttcgactggaaggatgtggccgaggtcgggctcgcgccaagcgaagcgtgatgggcaccacgaccctcttcctccgcttggaagggccgcttcaggcgtgggggagccacgactcgaagttcgtggtgcgtcgtacctgcgaagctccgaccaagtcgggcgtcatcggccttctctgctgcgccctcgggctgtctcgcgacgacgcgccagcccatctgtccgagctgagcgacctccgcatgggcgggcggatcgatcgtgagggcgtccgatggtgggattaccacaccgtcggggcgggtatggagatgcgccgtgccgatggcggggccaagctgggggctcttctctcgcgccgggagtacctctgcgacgcgtcgtttctggtcgcgcttcagggcgacgaggacctgctccgccggctcgagacggcgctgagaagcccgcgctggaccctctaccttggccgcaagtgctgccctccgtcgcgtccgctcctcgagaagcccatcgaggagcacccggacatcctcacggcgctcgcctcgatcccgtggcagccgcgcctcaagggcgagaaggccccgccgcgccttgagtgtctgctggactggagaccgtcggccgagcagcccgaggcgcccgaagacgccgagatatggtacgacgtgccggtctcgctcgcgccgccggcgcacgcggctcggttcgtggtccgaaccgaactggccatcggcgcggacggacaggtcgcggtggaggacacgccgctggtcagccgggtcccgccgcctccgcgtccgcgcgccgactacagcaactcggcgtacaagcgagtccgggccgagaggctaagcttcgacgagcacctctgtgtgttctgcaaagcgcccgccacaacggtccagcacgtcacctatcgccatgcgggaggcgacgagcgtctggaggagctccggtccctgtgtcggctgtgccacgacgccgtcaccatgatcgagtacggcgccgggatggggctcgaccgcatcaaccccgaggacccgcgatggcgcaagcagattatcgccaggcgccgcgacatcgtcaggttccgctcgcaggaaacccggcgtcggcgtctcagcgccgaggaggtggagtagccatgtacctgtcggttctccgggtggacgtcggtacgaaccccgacctcccgcggccgggccggctctggctccgcaaccgttaccacgtgcatcagcgcctctgcatggcgtttccgtcgtcggaccgccgtaccagggatccgcagtttctggagcggtaccagaccgccgacttcggagactggtctacggacaagcagggccggtgcgttcatgcgccgcgctccgccgccgacgggttcctgtaccgcgtagaggctcggccaggcggcagcgccgtcatcctggtccaatcggccggccttccggactgggactacgcgttccacaacgtcgactacctgcgggcccccaagccaggcgtgcgggagtacgacccgtgcttcgcggaaagtcagagcttgcggtttcgcctgcaggccaatgtgacgaagcggacgccttaccccaaaggagacagctccgcctcgaagaagcgcccgcgcattgcagttccgcgggagcaggtctccgactggctcgccaagcgggtgccacaagcggggttctcgttcgcggcagacactctgcaagtagacaccggctatgtatacttcgggaagcccggtcacgatgacagcaaggtcgagcaacgcgggaagctgttctccgtccgctacgacggcgttctgcgcgtcacggacgccgatgccttccggaaagccatcgagtcgggcatcggaccggccaaggccttcggcttcggtctgctttccgtcgcgccgctgcgcgagtgaggggtcatgctcgacgatctgcacatcctgccgaaggtccgcgacagcatcagctcgctctacgtcgagcggggccgcgttgaccgagaggaccggacgatcgccatccacgacaaggatggcatcgtcccggtccccgcggccgggctcgccgttctgatgctcggccccggcacgacgatcacgcatgcggcaatccgggttctggccgagtgctgctgcctggtcatctggtgcggcgaggagaacgtccggttctacgcggcaggcatgggcgggacccgcagcgccgccccactgctccatcaggcccgcctggccagttccgaggagagccggctcgaagtcgtgaagcggatgtaccggatgcgcttccagcacgaggtcgagcccgacgcgaccgtcgagcgtctgcgcggtatggagggagtccgcgtgcgggatgcctacgccgctgccagccgcgagcacggtgtgccctgggagggacgcaactacgatcggggcaactggggcgcagccgatcccgtcaaccgtgccctctcgtgcgccaactcctgtctctacggcatctgccacgccgccatcctggcaaccggcttcagccccgccatcggctttatccacacgggcaagcagctctcctttgtctacgacatcgccgacctctacaaggtcgagctcacgatccccctcgcgttccgggctgtggcagaggaggtcacgcagttggagcggaccgtgcgcatccgctgccgagatacgtttcgtgagaaccggctcctgcagcggatcgtgccggacatccgacaggcgctggccgttggcgacgaagtgcttcctccggacttcgcgcccgacgaggacgccgcgatgcccaccgacctctggaccccctcgtccgaagccgcgggagaaggcgaggcctgatatggtggtcctgatcctggagcgcgttccgaccggcctgcgaggcgagctcacgcgctggatgatcgagccgcacgcaggggtcttcgttgggcgcgtggcggcgatcgtccgcgacaagctctgggacaagtgccgccacgagggcaacgaaggagcgggtacgatgctcttcagcagtcagtccgaacagggcttcgcggttcgcagctttggcgacacaagccgcgcgatcgtggacatggaaggcgtcacgctggtgcgcgtgccccaacggcgacgtccgaggagccgcgacgcaccggcgtcgccgccgatccctggtctcttcgataggtagacgcttttctaagttttccccacgcacgtgggggtgaaccgaatccatcaggcgcgaagtcctgcaggaagcggttttccccacgcacgtgggggtgaaccgtatggcctctcgcgcaacttccaaatgtgcgagttttccccacgcacgtgggggtgaaccgtccggtccgccggcgagcagctccggcaggccgttttccccacgcacgtgggggtgaaccgctgtgtcagtcttgcactcactctccactgccgttttccccacgcacgtgggggtgaaccgacggcaccacgtccacgattgaggtctcaggcgttttccccacgcacgtgggggtgaaccagctggttccgctgtaccgcaaggcgcgagaacgttttccccacgcacgtgggggtgaaccgtaggaagtaggaaagaggaaacgtcttcctcggttttccccacgcacgtgggggtgaaccgtcggaggcgaatgcgaaggtcttgtctgcggtgttttccccacgcacgtgggggtgaaccggcctcgcgctgccactgcgggggcgtgagacagttttccccacgcacgtgggggtgaaccgtctgtatgccatgtcagc

SEQ ID NO: 746 - DNA, 7172 bp, Artificial Sequence
  Synthetic Oligonucleotide
ataacctaaaataaaggacttacttcccaatcgggcaagtaatccatatgtttggagcccgaaggtcccagaacgattggccgacggggacatcgaccttcctgacgctggcgtcgagcgaggcacgagcatggacgccagcaacatctcctgtagtccatactcgcaagctcgctgcactccaggctcaccaacgttggaaggcaaattcacaaattcacaaccggtaaatatggcttgtgaatttgcaacctgctgatagacgggtaattatgaggctaattcacaaaaaaggggtctcttatacatccgcggaagccgattgtaaacaggatatgatgtatccacgctaccagtctataatacatatagaaatagtatatataatatataatagtattatatattattatatattgatattatatcatctctaccttcccttcatctcttgtttgcggcatgagccactgcaaaccggcattctcccctggtccggctggatataagagataagcgtattttgtgaatttgtcccccaactcactgtgccacaataacacacggattcacaagccatatttaccggttgtgaatttgtgaatctgaccttgccggccttaaggaagtttgaaattagagccctattttggacttgacaaattattccttggtaaatttggtgtataatagctatggggcataatgatgttagcctgtggaacggcctctgtaaaggatcaacaagctatcaaccctccccatgcgacaggagcttcaatgtattataatttgacagacaaaccctggatcagtgtgctacagcttgacgggcattctgccaggctcggcctggctgaggtcctgcgaaaagcacacacactgcgtttggcttacggcaatccgatggaccgcatgtccgttttccgtttcctcctcgccctgggctattggtgttttgccaatacaaaacaagcgccggtatcagataagccactgcctcaggcatggacggactggcttgaacaaaaccaagaatatttcgaattgttcggtgatggccccagattctaccaatccccaggaacatccagaatacgccccagcacggaccttatccacgagcttcccacggcaaacaatttctggcacttccgccatgtgaccgatttcatcgatggcatttgcccagcttgctgcgttaccggtctgctgcgcctgccactctttaccaccgtaggcggcagcggaatcggagccggcatcaacagaactcctcccttctatgccatctggcagggtgatagtctgtcggaatcgatattcctgaattgggaacccacttcccggttgggtgttcctgcctggctgaacccgtttggatcccaaaacgagaaggatgtagccttgctgactggcctcacctggctgccccgcaaggtattcctgcttggcccggtgtcagacggagcaaaatgcagcgcctgcggagaagagcatgagcctctggtctatgcctgcaacaatgaggcggtgaaagtgcctccgaaccttgtctggaacgaccctcacgcgatttaccgggatgacaataatggcctgactgcccaggtggctctgatgtccggggacaaatacactttcgctaacagggattggcataaacccctggtcggcttcttacgggcgaaaggcatgtctcggaccgccacgctgtttttagtgggcttcacaagcgttcaagccaaatgtgtggacgtttgggaaaagaccattgccctatccggaaaaacaagctccgaggaactgctggaccagatatccgaaagagcctactccctgcacaggatgaggaaacaagaccgccggggcgattacaaggaatccgtgggaatcaccgccgtggcggacatcatcccgcacgtagagcatcgggttgacgtccattcgggcgagatggtggaaaacagcggcaatgtctggcaggaagcggatgaagattacggattcttcatgaagcgttttgccgtttctctagtgccggaaattacggttgccgccaagcttgaacgagaacaactggctcggcgcaagccctggcccctaaaaccaaaatcaattaaaaaaccttcatccggaggcgataatgaatgagagcaccgtgaaatttgttcggagcctgggcgaactcaaagagggcgacctgggcttgctcagaaagctcaggggtcgccgtctggatgaatccctgccgggtttcgacctgttttccggcctgtggtggccactccgcagtataagccccaaaacccccaggcggaaggtggtctggctagtcaccaagcttttcgcggaattccgctttgagcaaaagaaaggcgccagcctgccttggctcatgggcagaatatgccgtggacttaaagaagaaaaagagttcccacgtgttttagccaggttcgaccgcttgctcacgctcgagttgaaccaactggaggaaccgctggcgcaagtgctcgcgattttaaaaagacatgacattgccagtctggactgggttgccctcatcgatgacctctccgcttgggaacgggaatcaaacagagcgatatggtcagacacatttatttcagcatttaataatcagcaaggaggaatcaaatgttgattgaaatacacatgatccaaaaccacagcccggccaacctgaaccgggacgacctgggcgcgcccaagacctgttatttcggtggggtgttgcggtcccgcatctccagccagtgcctaaagcggagcatcaggatgagcgatgaattcaaaaacttgctcgggggtatccgtacccgtcggttggccgagttgattacaaaagctacaggacaggactgcaggaatcaggcagaggaagttctgaacaaagccggtttgaaacacgaaaacggacatagtaagatgctggtgttcatgacccggaacaagatcgatgcccttgctcaaattgtcaccagcgaaggcctgagtgttgcagagaaagccaagaaagcggcagatgtaatatcgggggcaatacattcccctgacatcgctctgtgcggaagaatgctcgagcccgataccaaggacaagaacacagacaaggtcaagtgggaaaataccactgttgaagcagccctgcaggtgtcgcacgccatttcaacccacatcgcccgcccagaaatagattactatgtagcagctgatgacgagcctggcgacgacacaggtgctggattcatagacgaggcgatgtttgcttcggcctgtttctacaaatattactcaattgattggaataccttgataatcaacctccagggtaatgaaaagttggcagctcatactgtcggagcctttatccaggccgctgcactcactaatcccagcggaaagcagaacagctttgccgcacataaccttcccgatggaatattggtagaaataaaagagacacctgtcagctatgcaaatgcctttgtgcgaccggtgggaatcgttaaggattctgacttggtagaacaaagcattggccaactggccaactatgtgaaggatataagtgccggtttcttccctggacagatgaaaggcaacgctctgtggttctcgcccaatggacgttatcccctaaagcctcaacagggcacgctggacataaagccagtttgcaacctgctagaacttgttcgcgaagcagttgagatgttgggttttgaatgggatgatgtaaaaaacgagaaagtagagagttgaaatgtcttctccgcctaataccctgttcctgagattggaggctccccttcaggcctggggaagcaatgaggccaaattcgccgtgcgcaggacagccgacgcgcccaccaaatccggagtggcaggcctgctctgcgctgccctgggaatcagccgggccgaagccggacagtattggctgggtgaaattgccaaattgcgcatgggggtgcggatagaccgcccgggcatccgctggtgggattaccatactgtgggagcggagcagaagctgcgcatttctgacctgaaaatgcccaacggcctagttctggttggcactgccctggccaaaaacctgggcgcggacaagatcaaatccaaacccggggctttgctctcccgacgcgagtatttggctgatgccagcttcctggttgcgctccagggtgaaccggatatcgtggcacaactggctgaagcgctgaaaaaaccagtctggacgctttatctggggcgaaaatcctgtcccccctcccgtccggtggatgaacacccgccagggttttatgccagtctgaaagaggctttgcggtcgatcccggcgcaactgagggaaaaaggcgaaccgatacctgacagtgttccctgtgtgctcgactgggttccggcccatgatgacgtgcacgctccgccgaacgccgaagcgcattacgacgtgccggtgtcctttgagcctccccaccacttgccccggctggtgatccgctgtaacctgccattggaccgcaacttcgaggcagagaccgtgctttccggcaaagcctggcaaccgccccgcaaccgggcaaattacgacaatcctgaatacaaaagggtccgcgctgagcgtttggtgatggacaatgccgcctgcatgttctgcaaggcacccgccactactgtgcagcacgtgaattaccgacgcgccggaggcagcgagaagccggaggacttgcgcgccctctgccgcctctgccacgatgcctgcaccatgctggaatatggcagcggcatgaccatggaccgcatagatccctgtgaccccgcctggcgtgagcgcatcttggccaaacgcgaggaaataatcaaattccgctcgctggagcagcgcaggcgcaaactcgatccgaaggaggagaacggatgatgtatctatcccaactgctcatcgacacaggcggcaaccctgaccggccaaggcccgggcgcttgtggctgaacaatatctataatgtccaccggcggctcagcatggctttccccatgcgcaagcgcaaggaaggagacccgaggtttctgcagccctttgaccccgcagattttgaaaagcgccagttcctctttcgggtggacaacaacaccgatggagaaaatcaaagggcgatggttttggtgcagtcgtccctgccgccggattgggactgggctttccagaatgccacgggatttttggcagcccctccccaggttaaggaatacgatccccagttctcagcaggtcagcggctgcgcttccgcatcctcgtgaatgccagtgtcaaacgcaaaatcgacgagttgcgggaaggacccggaggaaaggaaaaaacgggaagggttctgcacaaacgggtcgcccttacctgggacacaaattccaacccaaaggatgcggtggcgcaatggtttgccgccaaggctggcagactgggcttcacgcccggggagaccgaactggtaagcctgggctgggtatacggttccaaaccggagccccggggaaattcgccccggcgtgagaacgaataccgtcccctgagataccgttccgccctgctggaaggttatctgacagtggatgatgcctttctgttccgggaagccttggaaaaaggtatcggcagcgccaaaggaatgggcttcggcctcctttccgtggttccggcaagtgatgcgtaacagagaccttcacctaatgccaaaaatgcgggaccgcttcacctatctctatgtggagcatgccaaaatagacaaagaacaacaggcaatcgcctttcacgatgccatgggctccactcctgttccctgcgctggactggccctgctgatgctggggccaggcgtatccatcacccatgcggccatccttgttttagcagaatgcggctgtttggtggcttgggtgggggaacagggagtccgcttttactcatccgggacagggaccacccgtagttccgccaaccttatgcgtcaggctgccgcctggtcaaatcgagatacgcatctgcggatagttcgcagaatgtatgaattgaggttcaaggaaaaactggacccaaccctctctcttgaacagataaggggaaaagagggagcgagagtacgggatacctatttcagactttcaaaagaattcgatgtgcccatgagtgcgaggaattacgacaggagcaactggaataaaaccgaccccatcaacagagccctgtccgttgccaattcctgtctctatggcatctgccacgccgcgatagtggccgctggctattcacctgccctgggtttcgttcatactggcaaacaactgtcatttgtttatgacattgccgatctttataaaatggaaacctccgtgcccgcggctttcatagccacagccgcaggggtcgataacctggacagaaggacacgcattgcctgccgtgaccagttctatcaatttggtctgctaaagaagatagtggccgacattcacgcccttttcggtattctggaaacttcggacgatgagccagaccttgctgatgtcgatccagccgtgccaggcgggctttggaacccagatgataaagtgagccccggcggcttgtcatggggtctggatgatcctggaggccatgatgatggttctggtgcttgaaaaagttccctctggcctgagaggagaaattacacgctggctcctcgaaatcaaggctggagtatttgtcggtcaggtatcggccatgataagggaaaagctgtgggacaaggccaggtctggttgtgccggtggaacttgtatcatgatttacagcaagcattgcgaacaaggctttggaattgagttttggggtgccgcggaaaggatagtgacagaatgggaaggattgaaattgatgaccaagcatccgtgatccatacttgaagcctgttcaatggcctcaaagcgtctactttcgaagtgtgttccccacctgcgtgggggtgaaccgatatggcgagattagacccaagcacagtaaaagtgttccccacctgcgtgggggtgaaccgacacagaccaccgaggacgctttggaggcgatgtgttccccacctgcgtgggggtgaaccggtgc

SEQ ID NO: 747 - DNA, 7138 bp, Artificial Sequence
  Synthetic Oligonucleotide
gctcttcggttcacccccacgtgcgtggggacaacgctggccaccgtccgcttggcccgccgttccacggttcacccccacgtgcgtggggacaaccgagcaagggatcacccagacagaagggataacggttcacccccacgtgcgtggggacaactcacgatttggtcttcgatccttgtgatcattcggttcacccccacgtgcgtggggacaactgttttagggcctcaatcagctccagactctgcggttcacccccacgtgcgtggggacaacgaaaaaaatctggtctacgagttcgactttatcggttcacccccacgtgcgtggggacaacgaagtggatgatgcttataaagtcccgacaaacggttcacccccacgtgcgtggggacaacaccttgtcgaaatcaccgacctaattccaaaccggttcacccccacgtgcgtggggacaacaacacgggcaccgaccccttcggcaaggactacggttcacccccacgtgcgtggggacaacactgaccaaacccgcatcattgcgggacccggatcagcaaaaggccctcgaagtcttccacctgccgggagggttctccccacatgcggatggcgaaaccctgctcccgctcggccgcgtggaccagcaggctggcgccgccccgggattcccggcacaccttatcccagagaaggtcgcgcaccagagcggagatcttgccgacgaagaccccggccttggcttcaagcagccacctggtgagctcccccctcaaacccgggggcaccttttccaaaataaagaccaccatgatttactcgcctccttcatcatcgggagcgaaattttgcccgccggcgacgccgccgctcgcgtccgggtcccagagttctccggggcgggcctcatcccggtgaaacttttccagctcccggctccgtccccggccatccaggcccaggacggcctgaagatcataaatgatccttttcaggaacagggtttgcttgaaagcgtcccggcaccgttgacggacccggctttccaagctctcgaggcctggggccgcctcctgaaacgcggcggggatggagatctgggttttatagagatcggccacgtcatagacaaaagaaagcattttgccggtatggatgaagcccagggcaggagaaaggcccagggccaggatggcggcgtggcaaataccatagagacagctattggccgcggacagggcccggttcaccggatcggccgcgtgccaggcgtcccgccggtaggcccgcccgtgccagggaaccccggtttcccggctggcccgggcataggcctgcctgacccgcactccttctttgccccggatctgggggagagtcagggtctcgtccaggggctcctcaaagcgcaggcgataaagccgcaggaccacctgcagcctggagtcggcatcggcccacaacctggcctggtgcaggagattagccgcgtttctggtcaggcccatgccctgggcatagaggcggacgccttcctcgccgcaccacagcaccaggcagccgttatccgccagggtagttaccgcggcatgggtgatggaggtccccggaccgagcatgaggagccccaggctggcgcaggggaccggcaccttgcccttagcgtcccagaacgcaatggcccggctttcctgctcaatgcggcagtgctccacgtagagatagctcaggcagtcccgaaatttgggcagaaaatgaaggtctttcaatctcataaccatcctcacggcggagatagggagagaaggcccagcccataggctttcccggggccgattccccgaataacagtatcctgaatacgatccgcatcggtgacttggagaataccgtcgtaacggacagtgcgcaggcgctggcctttatcgtcctggctcttttttttatgcacatagatatagcccggctgaattgtgatggattcttccttgacagagaaccccttcttttcaccctggtaagcgagccagtggaaaagttgggagtctataaaaatgcgagcatctttgccgggattcttgaggcgccattctttgatctcggtcgcgcatggtaccggaaggcgcctgccgtggcgcccttttatttccttaagctcctctttggtgtaattctgccggtcttttttctttatcgtctcgactttctttgtcggattcgccaggaggcggaagcgaagagactgtccctttacgaaacaaggttcgtatgtcttcacctcgcaggccgccaaaaaactggcattgtgaaaggcgtaatcccaatcgggccatgcggcgcattgaacgagaatcatggcccggccgccggggaggggatcgacgcggaagaggaagccggaatccgcctggcgggttacatgaacctggttgatgccaaattcctccggcttgaaaggtttgaggaagtcggggtcttcggatattcgggaatcggacggaaacgccatgcacaggcgctgatggacatgatagaggttgcgcagccacaagcgccccggccgggggcgatcagggttgtcacccacgtcgatcaagagggaggacaggtacatagctctattccacctcctccgcggccagacgccggcggcgggtctgaagcgagcggaatcggatgatctcgtcccgcttccggatgatcaggtcgcgccagcgcggctcttcgggattgatgcggtccaggcccatgcccaggccatattcgagcatggtcacggcatcgtggcagaggcggcataaggaacgcaaatcgtccaggtcttcatgccccccggcccgccggtaggtgacatgttgcacggtggtggccggggacttgcaaaagaggcacagatgatggtcgtggtccagcctctcctgccgtttcttccggtattccgtgtggcgataatttgcccgcgggcgcggcggcgccggggtgtgattctgcgccggctctttggcaagttctagccctccgtcggcgcccacttttaattcccggcgcaggacgaagcgcggcagatgggccgggggctcaaaggaaacgggcacatcgtaccagatgagggcctcatcgggggcttcgggctgttcagacgtcggttcccaatcgagcaggcaatccacggttggcggcgactgatctctcttgagccgccgacgccagggaaccgcttgcagagcagaaagcaaatccgggaaatcgccggccggatgcgccccgtctccctgatggcttaagagcaacgggcgggacggcgggcaggactttctgcccaggtaaagagtccaatggggcgctttgatagcggcctccagttgggcaatcaggcccggttcgccctgcagggccaccaggaaagaggcatcgcagagatactcgcgcctggtgagcatggcgccgggtttggacttcccttccccttcggcaatgcgcatctgcatgccggcgccgaccgtatgataatcccaccagcgcaccccgggccggtccaggcgcacgcccaggcgcaaggcgcagagtttgggaagccacttatcaatagcctctggacgggaaactcccaaggccgcgcccagcatcccgatcacaccggatttcgtcggagcctcagccgtccgccggacgacgaatttcgattgctgatcgccccaggcctggagagggccttccaggcggagaaacagggtgttggcgctcatcaggctacctccggctttaccaccaccttctggacctcctgccactcatgaccaagttccctgatcactgcggggatcaattcttccaacgatttgaggttctttccggccagggcgaattccttcttgccttccccaaagctcaagggatagcaaagattgggcgagaaccagaaccggttcttaggtttgccgtatccggtgtccaggtcgtgaacatattggccaagttgggcgatactctgcgatatgatatctctctcgccttgactcaccggcctggcaaaggcgttggcgtagctgatggggctgttttccctgatctccaccaagatgccatcgggaggattgtgcgccgcgaagctgttttgcttgccggtggggttggccaaggcggctcctcgtatgaacgccccgacggtatgtgcggccagtttctcattgttgtgaagatttttgaccagggtttcccaattgatggagaagtacttgtagaaacaggccgaggcgaacattgcttcatccacatagccggcgccggcatcttcgccggggatatcatcggcggcgacataataatcgacttcggggcgggcctcgtgagtcgatatggcgtgggccacctgaagagccgcctcaatggtcttatcaagtcctttccacacgtcattatcaccttttttcggttccagcatcctgccgcagagggccatatccggtgcgatgatatgcttagcgatgattttggcaaattcctttgccatatcattatcagatctacccgtttccaaaagtttagacatcttatccaccgcttcgttgctcacatataccagtccagcacttttatcttccccgataaggtcgtcatcctcgcttttcttttttctcttttcttttggtgcaatcccacaaatctccaataccgtcattgccttcttaaacgacgccggaccatctccggcaatcaattgcgccaaccgccgggtgcggaccccgccgagcaactgcttaaactcagcgctcaggcggatactccgcttaaggcactgactggaaaggcgcgagcgcagcaccccgccgaaatagcaggtcttgggcgcgcccaggtcatcccggttgaggttggccgggctgtggttttgaatggcgtgaatctcgattaacatgggtgtcatcctccgtaggttcttaaaaattggttcgcccatttgagccgcgtggattcgcgttcccagatggaaagatcatccgtcagtcgtgcccagtcgagtttcaggtttcttgtggcgagcagacccagcgcccagcgcaggtgaggttccatcttgccaagcggtttagtcagcaccctgtcgaaactttgcgtgaaacgctttttggctggatccttgttcggttggcatcgtgcaagctggcgggcgagcatctcgccgggcgatggtggaattggacggaaggcgtatagtttagctatcagccaggccacttcgcgccggggtgtgcgctcacttttcgcccgcagcggccaccagcagcccgcgaacaggtcgaagccgtccaccgtttcatcgagaccctgacccgcgtgctggcgcagcaacccgagttctccggatttcatacgcgtcaggtattcaatgtactgttcggttgcagtcacttttcccctcccttcttcctgtcggactttttgacgccttggaactcggtcccaggttcggtttaacgtcggcaatctgtttctgtctttccaccgcagcagtcgtataacccggagaaagcgatttggcgatggcggtcatcatcggactatattcgcgggctgcctggtcacaggcatcttcacctccggtaatcaattcgcccgcttgcgcggagaccctggcttcgacatgagggcggatagcggcgataaaggcaggtccctcgaccttcgatcttcctatctccttctccatctcttttgccttttcctgccattgctttatcgaaggtgccgccgtttctgagattgatcctgttgatgacatatcaataattcgctcccacacatcaacgttctttgccttgttcgtcgcaaaaccgatgacaagtagaggagtagatttacctgtttccactatacgggcaagcagatcggaccatgggcggtccattctgaacttgcctgccgaagttaaatctggtgccctcaaggtttttcgtgttttgccgtccaaatagatcacatggggatcgttccacttttcattctcctttttgccggccgtctgaaactcgcaggtcaaaataaccgctgttttctggccacaactgatgcacatggccggttctttgaccggatcatgcagcaagactcgcctaggcagtagcgtcaggccagttagcagaggaacatcctcatcttgaatttggctgatgccgggcttcacccatgaaggttcgccgatattcgtgcatgtcgcccaattcgccaagagcgtactaaacagcaacttcccccaaggcacaacatacaccggaggaacgccattgatcccggccatcagattaggctctcccgggccgcttaggccactcacggagaagagcggcaaccgcaacaaccccatagaacagcaagcagggcagagcccgtttttcttatctgtggaatgcctgaagtgccagaagttgttgcccgcagggatctcttgaatcaaatccgtaatcgctcgcgtgcgttttgcagtatgatcctgatagaaccgcttgccatcccccagaaggtcgaagctgtttttatggtcatgcagcttctcgaaccaatccggggggaaggcgtcgtctggaatcttgtccggtgggtttccctggcaccaatacagcaacgccagcaggaaacgcaggatggccacgcggtccatgggattgctggccgcgatttgacgaatccggccggcttgcgtgagggcctcaataatgcccacacgattggtgttcccatttttccatagaacagggagccacttctcttcgagcaggttatagttcacggctttctcctctcttttccttttaaaccgatataaaccgtatgccgcagtcttggccacggcgctgcagtcggccagcccgctgcaaaatcaagtcgatgggggccatttcagtaaccatcaggtcaaaatccaggtccaggctctgttcaatcacttgggtggcgaccagcaccgctcggtggagccgcttcccttcttggatattcccctctccatattcaacttgaccacccggtttcccgaaacgtatcagggtgcgtttctccctctcttcccgcgcctcataaaggtatcttgcatggaagaggtccagctccggccagccgtcaccggcatttatctcgggaa

SEQ ID NO: 748 - DNA, 7080 bp, Artificial Sequence
  Synthetic Oligonucleotide
agaagaagcggctgggtaactctgagccttatggactgcggcgtgaaggacagcgacctccgcacgcttctcgacgcgccgggtgtcgaacagcttcaggggctgaacctcagcggaaatcagctttccacgcttcccccggagatcggccgcctcaccgcactcgataggctgtacctcgtcaacaatcagctttccgcgcagccgacttcgtcggccgccctgccagacagtcaacaatatcagcacataacgattctatacagcacgaccgaattttcccaccttcctgtaggtccggaataattccgggccctcgagtttctacattatcacgcggcagcggcggcagccagacccctttctgagcaacgtatgcctaagcgtaggtccggaataattccgggccctcgagtttctacattatcacgcggcagcggcggcagccagagccctttctgagcaatgtatgcctaagcgtaggtccggaataattccggacccacattcagcaaaaattatgtcgtcatatataaaggcagcgcggcccagctgtggtttgaggagaatctccgctcacgtatactcaccctggcccattcagcccttccggcttggcgagacaattcatcgagcctcccaataccgccgctgaccccaacttccacatcaaaatcgctcacttagataacccctcaatctacttgatttaaacagaacccccgcgtagactcactgcagggcgcgcaaaaaggggctgtctatgaactcgtacaacttgctttcccaaaactggattcccgttctctatcacaatggcgatttcaaacgcgtcggtatcctcaaagcattccaagacgcacacagaatccgccaagtcgccgcatccaatcccatggaccgcctcgccatactccgctttctcctcgccctgctctactggtgcaagggaaacccggcgaacggcccacaggccgcgccttacgaaccattccctccggattggttcttgaaactcgaacagaataaagaatgctttgacttgtttggagagacccggcgattttatcagtacaagaaacctgtgggcgaagataaacggctgaccgccaactaccttgtccatgaggtgccgaccggtacgaatgcgtggcattttaggcattcaacggacgaagtaaacggtttgtgtcgcgcatgttgtgcaatgggcttgctaaggcttccagcatttgcgacttccggtgggcgtggtaaaccgcctggaatcaactcaaagcctcccctttacgtcataccgctgcgcggttcacttgcggccactgtacggctttcctggcggccggtcggcccgttaggaacgcccgcatgggaaaaaccggacgtccaactgcctggcataggcgaggtgccactgctcacaggtttgacctggctgccgcggcgagtgtggttagactctcctgcggaacgggcagaaacctgcatctcatgcgggcgcagcgagaggctaatcctgcgtactgtatttgccccaattggcagcaccaagacggaagaaggagaaccggtcagggcgtggtgcgacccgcatgtcatctacgggatgtccgccaagggcgaaatcagcagcctgcatgcgcgggacgctcttggcgcaccagacgccgcggcggggcagtgggccaatatccttgccggcctgcttcgaaaggggcaaacaggaaacgcatctccttgctggatagtgggcttttctaccgtccagaacgacaagtatcttgaggctgtcgaatgccagatcccttgcgatatcgaccaggcgccacaagaacagcgggacgaatgcctcaacaacttggaacaatggcgcaagggaaaatggggtttcgccaaaaacctgggatcggacaacgaaaagggcgagcggcgtgagcatcgagagattacctctatgcttgcgtccattggaccgcacgttgaaaagcaggtgtcggagaaaagtggatcgttgatagcgggcggcgaaaccgcatggcaggaagcggccaaggcgttccgcccgatgatgcgcttagccgcacaatcgctgtccccagggtttacgatccaagcagccagaatacgcaagcgcattgccaatgccatgccaaacatgacacccaaggccgcgaagaaggggcggggaaaaggacgggataaatgaccgcgacggaagaattcattcgcgtattgagtggcctcaagtcaggggatcttggtctgctgcggacttattcccaacacggcttggatgaatccgtggatgggtttgacctcttttcggggctttggtggccgttacgggcgaagaaccagcgggcgccgcgccgggaagtggcgtggcttatagctaaactctacgctgcccacccaattccccaggcccgcgaggccacgcttgcgcgtcaactccgccggtgcctcccgaccgatgagaacggtagaaatcggtttgggcggaagctcgacaacatattgatgctgccgctcgacaagatcgaggcggaacttcgttgggcgatcgggcaggttgcctcgagaggactttcactcgattgggtaagactcacggatgaactctccgtgtgggaatacgaatccgtccacctgcgatgggcggaacaattccttcaaaccgaagattaaggatgaaaggggtccatcatgctgatcgagattcacgcaatacaaaaccatagtccgtcaaacctaaatcgggacgacctgggtgcgccgaagacgtgctattttggcggtgctctgcgctcgcgcatctcaagtcaatgcatcaaacgaagcatccggatgagcagggagttccaagcgctttgcgggggaattcgcacgcgccagttggccagactgatcgccgagaaggttcaagggaagccagacgtccagaagcgcgccgagaagatactcgaactatgcggtttcaagcccaagaaggcgaagaaggaagaaacggacgacgcagcagatagcgaaaaaagcaagatgctcgtttatacgagccgccaagccatcgaggaaatggccgcactactccaaaacggggacggaaggactgagaaacaactggccgcggacttctgcgcgttgatcagtaagcatgtggcagtccccgatatggcactatccggacggatgctggagccggacaaatcttcaaacgacctttggaaggagcttgacaagaccgtcgaggccgcccttcaggttgctcacgcgatttcaacgcacgaggcgctgcccgaggtggactattatgtggccgccgatgacattccaggcgaagatgcaggggcgggctacgtggatgaatccatgtttgcctcggcatgtttctacaagtacttctcgatcaattgggacaagcttgtggaaaacctcaatggccagaaagaacttgccgcacatacggtaggggcttttatccgtggagcagcgctggcaaatccttcgggcaaacagaatagttttgcggcgcacaatccgcccgatggcctgctgatccaattcgccgacaccccgacgagctatgcgaatgccttcgccgctcccgtgtcgggcaagggcaatcctgacgtcatttcacaaagtgtggcgcagttggcgcattatgttcgcgacttggacacggggtacggcaagccccagaagcgtttctggttctcgccgaatctgcgttatccgctttgcgtcatcgaagccaagaaaacgattccggtggccgaggtaaacctcaaatcgctcgatcaactgattccggccgtcatcggcggcttgggctttgattggaattcggttcagaagaaagtgacaagccaacaggtggcgccatgacggccaacacgctgtttcttcggtttgaaggaccgctgcaggcgtggggtaatcaggagtcgaagttcgttgtacggcgcacggctgaagggcccactaaatcgggcgtgatcggactgttgtgtgcggctttgggcgtgacgcgggcggaagcgcaggaatgccggttgcctcaactggccgaactgcgtatgggcgtccgggtggatgcgcccggataccggtggtgggactatcacacggtaggcgcggggatggacatgcgcatcgccgaagccgaggggaagacaaaacccggcgcaatgctcacgcggcgggagtatctttgcgacgccactttcctggtggtgcttcaggggaatccggccctgatcaaagaactccggcaggtgatcgaaaagccgcgctggacgctctatttgggcaggaaatgctgtccgccgtcgcggcgggtgctcgaggaggcgccggcggcgcatccggacctgatttcggcgcttgtgtcggttccgtggcagcggcgctttgaaagggataatcccccggaaacactcgagtatctgctggattggtttccgtcgcccgaccagccggaggcgccggatgacgccgaggtgtggtacgacgtgccgttgacgttcgagccgccgtcgcatggtgcgcgctttgttgtgcgcgggcagttccgcgtgggcgccggggggcaggtcccggtggcggaatcggcgttgcagcgccaggtgccctcgccacaacgcccgcgggcagattatggcaattccgagtaccggaagatgcgcgcgcagcggctcgagaaggactcgcatctttgcgtgttctgcagatcgcgtgcaacgaccgtgcagcacgtcacgtaccgccacgccggcggcgatgagcggatcggcgagctgcgttccctttgccgcttgtgccacgacgccgtcaccatgctcgagtatgggctgaacatggggctggaccgcatcgacccggaggatgctcgatggcgggagcggattatcgagaaacgcgacgagatcgtcaagttccggtcgctcgagacgcggcggcgtcggcttagccccgaggaggtcgagtgatgtatctatcgagtctgatgatcaacaccggcgacaatccggatcgggagcggccgggccggcggtggctgcgcgacatctaccacgtccaccagcggctgtcgatggcgtttccatcgaggtcgcacggaagcccgtccggttttctgttccgcatcgacaaccagatcgaggagaactcgccgcgcgcgatcgttcttgttcagtctcaattggccccggactgggatagcgcattttacaatgcgggcatgcttctggcggcgccgccggaggttcgcgaatatgccccgtctttcgcgcccggcgaccaccttcggtttcgcatcagaatgaatttaagcaagaagaccaagacggcgcgcgatggtacagatctgtgcacgccgcacgagggtgtcgacaccttcggccgccccaaatctcagtcgaaacgcgtggccgtgacctgggacggcgatcaaggcgaaaccccggaccgggcaatccgccaatggtttgccgcgaaggcccaacacgccgggtttgcactccagaacgaattcaacgtggttcacctcggctgggtggcgggacacaagccgggaacggccgagaaccggctgcggtttcgttccgcgctgctcgagggagacttgacggtggcggacgggccggctttcatgctatcggtcgagagcgggctgggctcggcgaaagggtttgggttcgggctgctgtctgtggttcgtgcaggcgggacgcccgcaccacaatcgaggcgtggcgaatgctgacgcgtgacttgcacgacctcgccaaggtgcgcgaccggctcagctacctttatgtcgagcacgcccggatcgatcaggaagacaaagccatcgccattcacgacgcccagggactcaccccggtgccgtgcgccacgctcgccctgttgatgctggggcccggcaccgccatcacacacgccgccgtcctcgccctcgccgacaacggctgcctcgtcgtgtggtgcggcgagcagggggtccggttctatgccgcggggcacggaaccacgcgaaactcccagaaccttctgctccaggcgcgcctctcgagccgccgctccacgcgcctcgccgtggttcgccgcctgtacgagatgcgctttccgggaaagctcgattcgagtctgacgctccaacagatccgcggcatggaaggcgtgcgcgtgcgcgaagcctactcgagcctgtcccgccaattcggcataccgtggacgggccgggcgtacgaccgccagaactggcgcgacgccgatcccgtcaaccgcgctctctccaccgccaattcctgcctctacggaatctgccacgccgccatagtcggcgcaggctattcgcccgcgctcgggttcatccacaccggcaaacagttgtcgtttgtctacgatatcgccgacctatacaaggccacgaccaccgcccccgccgcgttcgaaaccgccgcccgctcggcccgaaacatcgagcgagaggtccgaatcctgtgccgcgatgcttttgcggcgcagcgcctcctcgaacgcgttgtgaaggacctcgagtacgcgctggacgtgaagccggccgatgacgacgaagccgagaccgatttcgactcggatcccggcacgcccggaggcctgtgggaccctgacgccggcgaagtggccggcggcgtgtcctatgccgaacccgacgaacacacagaggatgaaccctaatggtcgtcatggtgctcgaacgcgtatcgccttcgctccgcggtgaactcactcgatggctgctcgaaccaaaatccggcgtgtttgtcggcaccgtctccgccatggtaagagaaaaactatgggaaaaggtttgccggaaaaccggcgaaggaggatctatcctcatttggaccgcaaataacgaacaggggttcaaaatcgacttctggggcgatccctcgagacacgtcctcagttgggatggacttcagctcattacaaagccaaaataaccaataaataccaagtgtaatccccacgcgcgtggggatgaaccgtcctggttgttatgcgctcgcccgcctccttcgt

SEQ ID NO: 749 - DNA, 7076 bp, Artificial Sequence
  Synthetic Oligonucleotide
aactgttcacactgctaggcaggattcaagttttggacagggtgtagatcaagtgacacctggaccatggcgaggccgtcgccccgatgcgcatcgtcggcacccttcacggcgagtctaagctgggccgtgcaaccctagaggcagcacccgattgggatatggacagtctgatgtgggcacgtttgatgtaactgggagggctaggcgatgagctttaatctgatcgaagagcaatggatcccaatcctccgaaccaacggcgcgccggatcgcgtgggtatcaggaacgccctgatcaatgcgggcgatatccgtctgactgccgcgtcgaacccgatggacaacatcacactattgaggttcatgctggccgtattaatgtggtgcaagccgagcatgagcgatgaggaccgcaaggtactcaatggcggaacgggcatcccggaggagtggataactaatcttggcacgcctgcgaaacctgcggaggcgttcaatctgcttggggatcaggaacgtttttttcaagaccgccaactactcgaagttctgttgaaagagaggcagaggcaatgggacgcgcgcgaacggaagaaggcaactaaaggtaagagccagcgaccaacttcgctgattgatgaagattaccgccccatcggtgatctactagtcgaattcccaactgaaaccaagagcgtccattttcgccatgtgcgagacaaagagtacggattttgcccggcctgctgtgctctcggcatcatccgcttttgtggttgggccaatgcttatggcggcggccgatacacatctgcaatcaatggacctacaccagcctatgcggttccgtacggcaccacgcttcttcaatcacttgcaatgaattggccatcaggcacaactgaggcgactaagccgccttggctgaccaacaacgcaccatcaaaggacaatctcaattcgcttcatgcctttgcgtggagatcgcgtcaaatttggctaggcgatcaacagcctaccatggagccctgtagctattgcggggatgtcgcaagattgatctatcaacacgtgttcactggcaactggaagccgccgttcgcaactgttggcacgcaaaaaaaattctgggacaaggattcgcatttgatccttgaggcgaagtcgacgaacagcgacaacgaggatgacagcggtagtcttgacgaagatggcataaatccagattcttcttcaattgactccagtgcctcacaaaaacgaaaaagtacaaagccaacgcagcaaacaacgctcgggtttccttctccgggatcaagcgccacggctcataaccgattctggcgccgagcctggcgagccatactcgctggagatgacaatcgagcgggacacacaaccatggtcgtcggcccggcagcgaacaaagggctttatcaggatgccaccgtgttgaatttgccggctgttcctacgaatgccagtcaagaagttcgggaaacaatcaattcgctttttagtaccacagagcaactcatgagtgtgctcagaagaagcacactgaaccctgaccgacaacaccccaacagaaaagcatgtctggatgcacggtcacctgacttggaagcatatttccgcatgcaagtcgaacagtggcttgccatcatggcaaccccggatgcagatgcttcgctgaacagttactcagagcagttggcaagcaaactttattgcatcatcaatgacgttgttcgctccacaacggtcggttcaccacttcgccgacgtgaggcgatgcaacgcgcggcaaaggctctcagtgaaacattacgtaagtatgggtcgcactcaaacaagctgccgccatcaggcggctctacgcccaagcaccaagatcccaatgcgaaggagagccatacatgagccagtccgagtccttcatcaagcgtcttgaggcgttgcaggagggcgagcgcgcctgtctgcgccggctcgcaggcatgccgctggacaccacggttgctggatttgacctgttcaccggcctgtggtggccactgagacagaaaagtcctgtcgccccgcgtcgcgagacgagttggttgatcgccaagctctatggggcttttccaattccgaacactccgtttgaagacgggaagaatcgacaattgctagcgcgggtgcttcgtcgctgtgagccgcatgatgatcacaatggcccgcgtttccgcagtcgcttcgatgccctgttgtgttcgccattgccgtccatcgagccgcatctgcgctgggcattgggcgaaatctccaaagcgatcgccgggcgagtgcagtgggccaagggcgtcactagcattaattgggcacaactactcgatgatctgtcaatctgggaccggggcgaggaccatcgccggggccgtgacattcgcgatatctgggcggaagactatctgaacgacacacaccaactgcaaggagccagcaatgctgattgagatacacataatccagaaccatagcccgtcgaaccttaaccgcgacgacctaggagcacccaagacgtgtctattcggtggtgtcacccgggcccgcatctccagccagtgcctcaagcgaagtatccggcgtagcgacgactttcagcaagcggtggcaaagcacggagccatccgcacccgcggtctcatcagcgagatcgctcgccgagcacaaggcaatggcgaaccgcaggatgcgctgctcaatcgaatccgcaagattttcgaagatggaggcgttggcgtcaacgagtccggcggggacgcgaccgctaccgacattctattctttgttcccgattcggcgatccaacagatggccgaggcggctaatgcgaacgaacccaacatggcggatgtatttgccaaaatcctcaacgaagccgcgcacgtccctgacattgccctctcgggccgtatgaccgagttcaaagcgaagggtcatttcgcaaaccttaacttcaccgtcgaagcggctctgtccgccgcccatgccatctcaacgcacgaagtgatcaacgaggtcgattacttcacagcagttgatgaccttgccaccggaaccggcgcggggcacgtaaacgaggccatgtttgcgtcggcctgcttctacaaacatttttgcatcgactgggaccaactcgtcaccaatctcggcggagatgtcgagcttgcgacaaccacagttcggcagttcctcaatgctgcggccctggccacgccatcgggcaagcagaagagtttcgcggcattcaatcctcctgagggcgtgctcgtggaaatcaagacggagcggtgcgtaccggtgagctatgccaacgcttttgcagacccggtgctgccaaagtccccacgtggcatgatcggcgaaagcatcgctcgtctcggccagcacgtccacgagatcgccgaaggctacggcattatggcgacgcgctattggttctcacctggaaaccggtatccgctcacttggttagatcgcgacgaagccagtgtggcaaagcaggaaaagccagtggttggcggtgctgagagtttcagttcgtttgaaacactcgtaacgaaggtgatgaacaccgtaaatatggacaacgctgccaccgccggagccgcattatgattcaccataccgtgttcctacgcctcgaaggcccccttcaggcttggggcgacacttcgaagtttgtcgtccgtcgaagcatggacgcgcctacgaaatccggtgtactgggtttgatctgttgcgcgatgggattgtcgcggcaggcggcacgggatcgattggtggatttgaacggccttacgatgggcgtgcgtatcgaccgggcaggaacgcgctggtgggactaccacaccgttggggctggcattgggctgatgacagcagcgggcaaactaaagatgggggcacagggcactctcgtcacccgccgcgaatacctcgccgatgcaagtttcctagtcgcgctcagcggcgacgccgcgattatcaacgaagtcgctctcgcactttcatcacccatgtggccaatctacctcggccgtaagtcctgctcacccgccgtaccaatattggcacggccgcgtgagggtgagtcttggacgaaccccgggatccacagcaacctgacagctgcgcttgaggcagtgccgtggccacctcgctatgacaccgatgccccatacgatgcgagacacaacaggatcaagacgattgatctgccatgcttgatcgaatggtgcgcgacggagttgcaaaccatcgcgccagccgccgccgaggtctggtacgacgctcccgttgccttcaccccgcaggtccatcagccacggctcgttgtccgtaaatcggtcgaggtcatggtcggcaaagcacttcagcagcatgcttcagcaccgcctcgcccccgtgctaactacactaattctgaatggaccagcgaacggctcgtggatgttgtgaatgaacgaaccggcgaagtgacgcgggaaccctatggcgcaagaccccggcgactacatcgcgatcacggcctttgtgtcttctgcaagtcccccgccaataccgtgcaacacgtcacctaccgccgcgccggtggcgatgagacgcaggaagacctccgctcgctttgccggttgtgccacgatgcggtgacaatgatcgagtatggactgggcatgggcttggaccggatcaaccccgaggattctcagtaccgcgagcggatcatcgccaagcgaacggagatcatccagtttcgctcactagaaaaccgccgtcgtcagctacaagctgaggagatcgaataacgatgtacatgtccaccttgctcattgatgtggggatcaatcccgatcgggttcgcccgggtcggcaatggctgcgcaatatgtaccgtgtacatcaacgtctctgtatggcgttcccattccctgatacgaaggcgaacgatcctgaatttctaaagccctatcggccagacgcattccacaatccccagccagaccgaggtttcacaagtagcgtagtgaatgcaggagagcctaatgctttgagcaacagacctgtgcatgagccgcgcgatgactcgcacaacttcctattccgtgttgaccctctgcccggtggacgtgttgtgatccttgtgaaatcagccatccaacctgattgggactacgctttccacaacgcccaacatttgctcgctgccccgccttcaatcacagggcatgttcggttgtcgtttggaatggatgcgatattacggttccaactggtcgccaatccaacacgcaagatcgataccaagagcgacgccgacggacgacgccgcaatggcaagcgtgttcctgtgccgccgaccgatgaagcgctgcagacctggctgcaacaacgggcagatgccaacggttttcggcttggcaatttgtcactgatccagcccgggtatgtgtatgtcaataagtccagtacggcgggcaagggacatcgtcttcgcagtgtgagattcgcgggcatcctcgaaatcaacgacccgcaacggtttagcaaagcgttgattgccggcatcggccccgccaaagctttcggcttcggtctgatttcagtcgcactgacgggcaacggaacattgtgatgccctcaaatgtcacaccttgcaatagccgatctttgacaagtgaatatcaacttcggtttattactcatggccctagcgaccgaagaatgaaccatccggggtgtagacatgaaaaccagcctttttgaaatcggacgtttcgatgatcgcctttccttcctctacatcgatcgcgccatcatcaagcactctggcaatggcatcgcgatccatgaactggacggcgtgactgaagtgcctgtagcgtcgctctcactgctgatgcttggccccggcgtcagtatcacccatgaagccatcaaggcgctggcggacaacaactgcctgcttgtgtggtccggcgaattcggggttcggttttacgcctgcggcatgggcggtgcgcggcacagtcggaatcttttacggcaggcaaagctcgcactggatgaacgtacccgcctacaagtagtcgtccgaatgtactgcgctcgctttaccgatgagacgatcgatcccggcctgaccttgcagcagcttcgcggcaaggaaggcatccgcatgagacagacttacgcggatgcttcgaaggcgaccggcgtgccgtggctgggccgcaaatatgcccgcaaggactggttcgccggagatccagtgaaccgtgcactatccgccgccaatgcatgtctatacggcttggttcacgctgcgattctttccgctggctattcacccgccatcggctttattcacaccggcaaacaactctcgttcgtctatgacatagcggacctttacaaggcagagctgacgatcccactggcatttgagatcgctggaagacagccaaaggaactggaaagggatgttcgcaccgaggcgagacgtcgatttcatcagatgcacctgatgaagcggatcattcctgatatgcgaaagcttctgaatgttgaagcagaagagatggatgagtttgcaggagacgaggcgcgtcctgctgaattatggcagccaaagtcgttctccttggataccccgatcgggcagatattaacgcagcgcccagaaggagaggatgtcgcatgatggtgctgattgtccgaaatgtgcgccccgggctacgaggtcggttgactcgctggctcattcaaccgcagacaggtgtttacgtgggacacctgtcgggtcgtgtgcgggaagaactatggaagactgtctgtgatgaggttgatgagaatcgtggctccgcgatcctcatcaacccggcagccaatgagcagggctatacgatcctcactcgaggcgattccgatcgtagttttgtagacttggacgggcttatcctgccgaaaaccatgatttcggagtcgtaagccagtgatgtccccacgcatgtgggggtgaaccg

SEQ ID NO: 750 - DNA, 7041 bp, Artificial Sequence
  Synthetic Oligonucleotide
cagccttgtacaggtcggcgagatcgtagacgaaggacagaatcttgccggtgtggataaacccgagtgcgggcgaaaaacctgctgacacgatggcagcatggcagattccatataggcaggagttagcggcggacaaggctcggttggcagggtccgccttgctccactcatcgcgtttatagctgcggcccgaccacgtgatgccggcttcctgggcggccttggcgtaggcatcgcgcacccgcacgccctccatgccgcggatttgctggagggtcagggcagggtcgaacttctccgaaaatcgcaactgatagaggcggcgcaccacctgcatatggaaaccctggtccgcccacagcctcgcctgatgcaggaagttggccgcgttgcgcgtctcgcccatgcccacggcgtagaagcggactccctcctccccgcaccaagccaccaggcacccatggtccgccaacacggagatggcggcgtgagtaatcgagacgcccggacccaacatcaggagagccagattggcacaggggaccggcaccttcccggcttgatcgtggacggcaatggcccgctcttcctgatcgacgtggcaatgctcgacgtacagataactccacccgtcactgaacttgggtagaacgtggagatcttgaattctcacagagcctccagcccgtgctgtagcgtcgatctccgatcgacggcggttgtagcgtcgatctccgatcgaccggggttgtagtcgatctccgatcgacgttacggcggtcggagaccgccgctacaaaaccaggcgatggatctcaccctggtacggccaatcttccgggcgcttgactaaaccggcccggaccggattctgccggacatattcatatttctcccgataggattcttgcgatctcaggacgtgatcgaaaaagtctttctcccaatgtgtgccctcgccctcatcttcccggaggactttggataaatccccgcgcagcgccttgatccatttccctaaaggtggggactcacgacaaaagccggcgaaaagatggatgtgatcaggcatgatcatgaagaacccgacccaaacaagaaaatcgctcgcccgttcggagaatctcgtgaattcccggtgaatcgcaggatttgccaacgagcgtttgcggtcctgcgtacacagcgtgagatagtagattgggctgcccgtatagagccagtccagtcgccgcaagcggggtttgaatttcatattggctcgatctccgctcaagaaatgttgcacggatccccgatcgacaagggattgtagcgtcgatctccgatcgacgtaccggcggtcggagaccgccgctacagcgagagcggcgccacggaaagcaggccgaagccgaaggctttgccgtgcccaacgccgcccacgatggtttctctgaagctgtccgcgtcctcaaccgtaagcgtcccctccaataacgccgagcgaaatttcatgcggccgcccgtcggcctcgggtcggatcggtctcctgcgccccacccgatctgcaagacccggaaagtttccacttggaatccaccttggccgcccttgccggcgaaccattttcgtatcacatcgtcgcggttctggtccttgtcccaggtcagcgccacgcgtttgccttgggccttcgggcggccccgcttatctgtcccctctcgcgtcctcgtaagatcaacgccctctgtgctggtttttatcttcttactcagattggcgcggatacggaagcgaagccgctgacccttctcaaagcgggggtcgaattcctgcacctgagggggagcggctagaggattcagaagaaaacgggcgttgtggaaggcgtagccccagtcaggctttacggcagagttagactggacgaggatcacgacccgcccgcccggttgcgggtcgatgcggaagagaaagccggagtcgccgtcacgtcttacatggacctggttgttggcaaagtccgcgggtttgaaaggcttgaggaagtggggatcgtgggatattcggtctttggatggaaacgccatgcaaaggcgctggtggacgtgatggaggtttcgcagccagagccgcccgggcctggggcggtcggggttggtgccgacgtcaatcaagaggcaggagaggtacatggctattccacctcctcagcggcaaggcgtctgcggcgagtctccagagagcggaacctgataatctcttcccgcttctcgatgatcttgtcgcgccaacggggctcttcggggttgatgcggtccaagcccattccgagcccgtactcgatcatggtcacggcgtcgtggcagaggcggcagagggagcgcaaatcgtcccggagttcgccgccgcccgcgcggcggtacgtgatgtgctgcacggtgctggcgggagacttgcaaaaaatgcacaagtgatagtcgtcgtcgagccgctccttgcgtcggtttttgtactctgtgttcgtgtaatccgctcttgggcgcggaggcggtggcgtgtcgctctgcggtggctgcaccgcaagtgttacgtcgccgtccgctccgacgcgcaactgcctgcggatgacgaatcggggttggtgcgacggcggctcgaatgtcaacggcacgtcgtaccagacgagcgcatcatcgggcgcctcgggctgctcgttggtgggttcccaatcaagcaggcaatcgacgggtcgcggctggggatcgtccttcagccgccgacgccaggggaccgattcgagggcagaaagcaagtcggggaattcacctcccggatgctccagcagagggcggcaaggggggcagcactttctgccgaggtagagtgtccacttgggcgctttgattgccgcctccagttcctcaatgaggtccggttcgccctgaagagcgacgagaaacgaggcgtcgcaaaggtattcgcggcgggtgagcatggctccggacttggttcccccctcggcggtacgcatcggcatccccgcacccaccgtgtgataatcccaccagcggacccctggcgcatcgacgcgtacgcccatgcgcagccgggccagccttggaagccagccttcgcgggcctctggccgggaaacgcccaatgccgcgcaaagcatcccgatgacgccggacttggtcggcgcctcggccgtgcgccgaatgacgaacttggattgctgatcgccccatgcctgaagaggaccttcaagccgaagtagcagcgtctttgcgctcatggggcacctccggattcaggaccactttcttggcctcctgccagtcgtaaccgatttccttgagtacagccgctatcagttcgtcaagagacttaacatctttgtcggcaagcgggacctcacgctgtttctgttttccgtcttcgctctccgtggtggtagccgtcaacggatagcggagatttggagagaaccagaaccgcttcgtcggcttgccgtatcccgtatctatgtcgttcacataatgggcaagctgcgccacgctctgcgagatgatgtcccgttcgccctgaggagccgccggtttggcgaaggcgttggcgtagctgatgggagtgtttctgacttccaccaacatcccgtcaggagggttgtgcgcggcaaaactattttgttttcccgtggggttggccaaggccgcggcgcgaatgaaggcgccgacggtatgggccgccagtttttcgtgattcgtcccgaagggcttcaggtttttgaccagcgtttcccaatgaatggagaaatacttgtagaaacatgccgaaccgaacatggcttcatccacgtaacctgcgcccgcgtcctcgccggggacatcatcggcggcgacatagtagtccacctcgggccgggcctcatgggtggaaatggcatgggcgacttgaagcgatgcctcaaccgtcgtgtctttgaggactcccgtttcaagcatcctgccgctcagcgccatgtccggcacggcgacggattcactgatgagcttgccgaactccgctgccaaggcctcgtccgtttttccgtcgccctgctggaggagttcggccatgcgtgtaatcgcctcttgggtggtgtaaaccagcatcttgctcctctcagcactttcctgttcgtcttctccttcctgtttttttgctttcttaggctccagcccgcaggctttgagaatgttctccgctcgcttcctgacgtctttgcccgtcaccttttccgcaatctctttcgccaactggcgggtgcgaactccgcccagcaattgtctgaactcctcactcatgcggatgctgcgcttaaggcactggctggaaatacgggagcgcaagactccgccaaaaaagcaagtcttgggcgcgcccaggtcatcccggttcaggttggccgggctgtgattctgaatggcgtgaatctggatcaacatgactctcctcctcttggacagttcaaaaattcctcggcccatttgagccgggtggattcgcgttcccagatggaaagatcgttcgtcagccgcacccagtcgagttcgaggtgcttggaagctatgaggtcgattgcccactgtagggcgggttcgatttcagcaagcggcagcgtgagcatcctgtcgaagcgttgctcgaaacgctgccgcgctgttttctcgcccggccgggatcgcccgagctggcgagcgagggtctcgcggggtgaatgctcgaggggccggagggcgtagagtttggcgacaagccaggccacctcacggcgaggcgcccgttgggtttgcgcccgcagcggccaccaaaggcctgcgaaaaggtcaaagccctctaccgattcgtcgagcccttgcccggcatggttgcgcaagagcccgagctcaccgggtttcagtcgagtcagaacttcgacgtactgctccgttggagtcacttgtcccccccttcgtctttgttgtttctctttggccgcatgtccggctttacagcggcaatttcttgtcgcctccggagggaagcggttgtgtagcccggggaaagcgatttggcgacggcggccatcaacggacgatattcctgggccgcctcttcccatgccttaccgccttctgcgatcatctcgtcgatttttccggaaaccgttgcctcggcttggggacgaacagcggcgactgcggagagaatttcaaggtgtcctctgtttcgtgaagtctctcgcggtttggctctgccaacgagcttccagccttccttctgccacgcctggatttcttgcaaactcgcctgaaccttcacgtcgtcgagcgcggccaagaattgaatctcccgctcggctgcttccaggtatttgtcgttctgcactgtcgcaaagctgacgacccacaacttactgttccccttcggcttttccccgcacaggattcccgccacgaccttcgtccacttcccagccgcagcgtcggccgggccaagcgcgctgaaaggcttcacaatctcgtcgccttcgctgatggtgtgcgggtcgttccagattcgtgccagactgccttcgcctgtctttgtgctcccaatacccgcaaagacacattgacgtatcagagcctccctgcgcccgcaggcgatgcagttggactctggtgtctccggagtgtctaaccagacgcgccgcggtacccacgttaatcctatcaataatggaacattgccgtgttgagggaggcttatgtccggattttcccatgtgggcgtgcccaggttcatctccgacgtcttccgccatgagaggcgcagggtttcggaaaggcagtcgcccatcggcacgatgtagatcggcggtttttgattgacgcccgggggcttgccgcgcccggccgacgtagcaaagagcggaaggcgcaacaagcccattgcgcagcatgccggacataagccgtttctgaaatctgtcccatgccggaagtgccagaagtttgtgccggtcggcacttcttgcatcagatagttgacggacagcttcttctcaagtcggttaggcttgcgttggtaaaaccgcttcccatcgccctgaaggttgaaacagtctttgttgtcatcgagtttcttgaaccaatcagagggaaacgaagaaatcgagttcttgtcgtccgggggattccctttgcaccaatagagcaacgcaagcaggaaacgcaggatggccaggcggtccattgggttgctggccgcgatttggcgaatccggcctgcttgcctaagggcctcactaatgcccacgcgaccgctgtgcccatctttccacagaacgggaatccacttttcttcgagcaggttgtactccacggcttcctccttgcctgggcaagaggcgggtggcaggcccgtcgcgccccggggggaccggaccgtccgctgcgtagctaccacaggacaatcatggcgaaggtatacacccgggacgcggcaaaggcaaggcccgaagaccacgacaacggttatcgcgtccgcttagcccacacttcacaggctgcaaggcgcgccgttgactaagcgcagaagctttgatgcctccgcggcgttccgattcggagggaatcttgcgatcgatttcgcgggtggcgcatacgtcccgacgggtttttgtcgggatgtatgcgcccctcggcatgtcgacaccttcatagcctcttgtccatgctcaagatcgaaccatcattccagaaatagaacctcccgccgcagcgcgaccacggccagtcgcccgggtgcttgaccagcactcgtttgacgggattgtcgcgcctgtgattcaatttctcgtctcgcttcttggggctccagatgttcatgtcgtagaacccaccccaacaatatatcgtccctgtggcgcatacatcccgacaaaaagaagctgtgaaaaaatcaagaaaatcgaaaaattaagaaattttcttgtcttagctatacagctatgatatattagcctctgaccgcacttccggcgggga

SEQ ID NO: 751 - DNA, 7037 bp, Artificial Sequence
  Synthetic Oligonucleotide
tgtccaggtcctgcggattcaccgaggaccgacctggaagcagaagcacatcgtcgaatgttattccgtcgccaaccaacttatcttgcatgggtgcctcccggcccgaaggccctttttcagatttaatcgcaatacgcggccaatggcaagggttcggcgaaaaatagcgccgcccgccgactcctttgcttactgaattcccgcctcggctttgccgataacaacctgtgatggcccccggagcgcgaatatgaaattgaacctgccgaacgatatcgtcgccagagccgaactgagcgagtacgacgtgcgcctcgcgctggctgtccagttctacgccgacaatcgaatcgaccacgccgacgcctgccgcttggccgaactccccccagccgcccttaactccgcactcctaaacgccggcctgagcctccagcaatacccatcccaccgcctcgccgaccgccgaaccgccggatgagagcgcccccgcacctcgcccgccctgactaccgcaacgggtcattaccgaacgccgccgaccaaccatctgcgcggcatttgcagccggtttgccaccggtttcgcgccgtttgcaacgtcaattccaacgcgaaatcaacactccccagccgtcgcaacccagccaccacgcgttaatccttcatatatagtaacatacacgccagtgccaaccccgtcaaacaccgtctccgccccgcgccagacacataaaaccacgtttccaccacgttccagacacaaaaaacaccacttccacaccctttccgcatcctttgcgaaccgttccagacacaaaaaccaccgtttgcgccccgtttgcgccccgcatcacgcacaaacaaccacacttccaccccgtatcaggtacaaaactgccctgttccacccacttgccagaaaaaaatcccgacctcacagacccacctcccgccaaaacaaaaaaccacacttcgtcaatcgacgaagtatcgccaagccacccccagcttcaccaaacaacgcagacaccccaaacgacgcacccacgcaaatgccaaaaagccccaaacaccccgcccttgggacgacgaagccaaaggcgaagacgccaaaccaccataaaccgaatcccgaccttgagacgaccaagccgaaggcaaaaaacgctcagccagccgaaaaccgccaccgccccggcctggcattcggcatttggcatttttcatccgccccaaaatttttttccgggtgcgaccatatctgtcatacctccatgtgatgatagtggttggtccggccagagcgtttctgctgggaaaatcccgacactggtccagagaaatcttgtggcaccatgacgcaactggtatgctcgcccaccacgaacgcgggattcatccaagtgcggcgggaatacgcttatgacgctccatgttcgcatttcaggggaccccggccatggtgatggttcaatctcattcttctgaaaggaaggcacgcatgaactacaaccttctggactatgctttcattcctgtcatatggtctgacggcagggcggatcgagtggggataaaaaccgccctggccgaagcgggcagcattcgccagatcgcggcttccaacccgatggataacgtcgcactgttgcgattcctgctggcggtgctgtattggtgcaaaggcctcccgccaaatcagagcgagttggaaaaaatcctcgccgcaggccaattccccccggactggttcaccaaactcgaccagcatcgggactgcttcaatctgctgggggacggcgagaggttctaccagaatcaagcctacaaaaaccaatcgccagaacacacaataaactacctgatccacgaagtgcctagcggaacgaacaaatcgcattttcagcacacggtggatttcctcaacggattgtgtccagcttgttgtgcgatgggtctgatccgcttgccggttttcgctacctccggaggcaaagggatgagttcatctaccggcaagtcgcccgggatcaactccaagcccccgctttacgtggtgcccatgggcaccacgcttgctgccaaccttgctctctcctggagcccgacaagtttggatttgggaacccctgaatgggaaacgcctggagccaatcttccgttcgtgggcgaagtgccacttctaaatgggctaacatggttgccgcgaagtgtctggttggccgatcccgaggaacaggagtctgtctgcgtatcgtgcgggcgaaaggaacgcctgattcgacgttgcgttttcgatggcaagggtagtctaaaggcggcgtccggcatctggcgcgatccgcatgtggtgtacgcaaaagccaaagatggcaaacagctttccgctcatgctggcaacgcactaggggctcccgacgcggcggcgaaccaatgggcgaggtttctgggcggtctgcttgcggaagatgccgcgccattaggcatgtgccacgcggcctcgactacatcggccattactgtatcagtgctcggtttttcaagcgtccagaacgacaaatatcttgaggcatgggagaatcgtctgacaatacacgtgagcgccttggcggacaaaggccccaatcagccagccagctacctggaattgtggaccaaagaggcgatgaagtgtcttgccaaggcaaagcctcccgaggcaaaatcatctagtcgtaagcatgtggaactgctgcctgcattggctgccattcgtccgcatattgaatcccgcgtgtcagccaacatctccgatcttctatcgcatcccgaacaagcctggccgaaggcggcgggggaatacgggccaatgatgtcggccgccgcgaagtccttgtcgcccggtttcactacccgggccttgcagcgaagaaatcaaatcgccaatgtccgacccgatatgacgcccaggccagcacctaaaccccgcaaacccaaggcaaagaaggggggcgacaaatgacatccaccgagcaattcatccaaacattggaatctttgaaggctggcgatttggggcgactccgcaatctggccgatctgcccctcgacgaatcggtcgatggcttcgaccttttcgcgggcctctggtggcctctgcgccagaaaaaccagagagctccgcgccgcgaagtcgcctggctgatcgccaagctctatgccttccgccctatgccacaatccgccggcgcaaccctcgcacgacaactcgggaaacagcacttctcagacaagggagcatgggaccgccaccagcagcgatttgacgaattgctcctgcagccgctttcggggatcgaaccggccttgcggtggggtttgacgttgattgctgataacgccaaggaactggattgggtccggctcaccgatgaactgtccgcatgggagcgggaaggcacccgcctcaagtggtccagcgaattcctcaacctaacctgatgacaaccctacaagaaggagagaccaatgctgatcgaaatccacgccattcaaaaccacagcccagccaacctcaaccgcgacgacctgggggcaccgaaaacctgctacttcggcggggtgatgcgttcgcgcatttccagccagtgcatcaagagaagcatccgcaccagcgaacagttcaaactcctctgcggaggcatccgcacaaggcaactggccaagttgatcgccgacaagatcgacgggaaggccgacgtgaaaaagcgagctgtaaagatactcgataagtgcggcatcaagtccaaagacgacaacaagagcgacatgctcgtctacactacacaggacgccataagcgccatcgccaaactgatccaggacaacgatggcaagggagacgcaatcgccgatcaatgcggagccctcatagccaaactcgtggccgtgcccgatatggccctttgcggcaggatgctggaaaccggggtgctggcgaacacaaccgtggatgctgcactgcaaacggcccacgcgatctcgacccacgaggcccggcccgaaatcgactactacgttgccgccgacgacatcccgggcgatgacgccggcgcggggttcgtcagcgaagccatgttcgcctccgcctgcttctacaaatacttctcgattcactgggagcagttgctcgaaaacctcgtcggattccagggcaacagggaacaccttgccgcgcataccgtcggagcattcctgcggggcgctgcgatgacaaatcccacgggcaagcagaacagcttcgccgcgcacaatccgcccgacggaatacttgtcgaaataaaggacagccccatcagttacgcaaatgccttcgccaggcccgttgcctccatgggccctcgcgacattgtgtcccagtccatagcagacctcggacagtatgcccacgacatcgacacaggttatggcagacccaggaaccgcttctggttctcgccgaatcttcgacatcctctgacgttcgtgaaagacaagcaggaatgcccactcgccgacgaaaacctggaatcgctcgacgctctggttaaaagcgtcgtgcgcgctgtcgggttcgactgggccgaagtccaatccgtcaccatcaactaaaggagggcgagaagatgaaccccaacacccttcttcttcgcctcgaaggccccctccagtcgtggggtaacaacgagtcgaagttcgtcattcgaagatccggccgggcaccgacgaaatcgggaatcgccgggatgctctgtgccgccatggggatacccagggccgccgcccgcgaacggttatccgagttcaacgccttgaaagtgggtgttcgtatcgaccgtccgggcgtccgttggtgggactaccataccgtcggcgcacgcatggtcatgccaaccgccgagggcaagagaaagcccggcgcgatgctcactcgacgcgaatacctttgcgatgccagtttccttgtcgcccttcaaggcgattcgcaactgctggccgaggcgaggcaagcattacttcatccggtctggcccgtgtttctcgggcgaaagagttgcccgccgtcgctgccgctgctcggccgtggcgacgagccggacaccgacgactttccagacctactgtccgcgctgcggtcggtcaagtggcggccgcgtctcagaggcgaccaccggcccgaggatgtccagtgcattcttgaatggtcgccatctgaccaacagcccgaggccccgccagatgccgaggtatggcacgacgtgccgaggtccttcgacgtgcccggccacgatgcgaggttcgtactccgtagtcgattgacggttggcgacggaaaggacgtgctcgtgggttcgccacgccagaaaaacgcccccgcgccgccccggccgcaagccaactaccgtaacagcgagtaccgcaaagcacgccaggaacgcctcgacgcggaccacggcttgtgcgtgttctgcaagtctccgggcgggaccgttcagcacattacctatcgccgcgccggcggcgacgagaagcccgaagacctgcgctgcctgtgccgactctgccatgacgccgtgaccatgatcgagtacggcctgggaatgggaatggaccgtatcaacccggaagagccccgatggcgcgacaagataatcgccaagcgggctgaaatcgtcgcgttccgatccctggaaacccgccgaaggcggcttgctccagaggaggtcgagtaatgtatctttcatcgcttctgatagacaccggtcgaaatcccgatcgcccacgcccaggtcgcctgtggctgcgtaatctctaccgcgtccatcaacgactgtgcatggcgtttccgtcgaaggaactgacggaccggcaatcgtctgattacgatccaaacttcctcaagccatacaagcccgagcattttccagaggaccgccagcaggccgagatgaagcttgactcggaggccgacaaaacccagaaggaaatccttgcccacgttcacgccaaacgagacgccaagtccggcttcctgtttcgagtcgatcccaaacccgctggccgcgcggtcgttctcgttgtctcggccattgagccgaactgggactacgcttttcacaacgcgaggcatttcctggccgccccggccgattggaagcagtaccgggtggacacgaaacgcgggcagcgtatgcgctttcgcctgcaggccaacccgacaaaaaaagttcacgcactgcccgaagggtcctgtcgcacaacgcccctgaccaagaacggacgccgcgttcccgtacccgccaccgacgacgcgctgatcggctggctggagcggcatgccggtctggcgggttttcgagtcgaaggcaagcccgagatgcagcccggctacgtctacgtcaacaaggccggaaaagctggccaagggcatcggcttcgctcggtcgattacgacggcatcctcgaagtgaccgacgccgacatattcgccgaagccctcgcctccggcatcggctcggccaaggccttcgggttcggcctgctttcggttagtagtgtgcccatgggctagtagtgtgcccgtaagggcatatcttcgttcgtagtgtgcccgtaagggcatatcttcgttcgtagtgtgcccgtaagggcatatcttcgtttgtagtgtcgccgtcaggcgatatccttgtgctcacgcctgacgacgcgagcacacaccaggatatgctcttacgagcacactacaagcagggatgcacccttacagacccactacaaacgcgcgcattcgataataacatgtacaattaccgcaaactgacacccgcccagaagaagcgagtcacggccgaccgcaagacccaacgccacccgtggcacgggccaccgcatttcaccggcgggccagccgggacgaatgtctacatgatctcagccgcttgcttcgagcacaaacacatcatggccacgccacggcgcagaagcgagttcacacaagccttgctggatggc

SEQ ID NO: 752 - DNA, 7029 bp, Artificial Sequence
  Synthetic Oligonucleotide
tttggagcccgaaggtcccagaacgattggccgacggggacatcgaccttcctgacgctggcgtcgagcgaggcacgagcatggacgccagcaacatctcctgtagtccatactcgcaagctcgctgcactccaggctcaccaacgttggaaggcaaattcacaaattcacaaccggtaaatatggcttgtgaatttgcaacctgctgatagacgggtaattatgaggctaattcacaaaaaaggggtctcttatacatccgcggaagccgattgtaaacaggatatgatgtatccacgctaccagtctataatacatatagaaatagtatatataatatataatagtattatatattattatatattgatattatatcatctctaccttcccttcatctcttgtttgcggcatgagccactgcaaaccggcattctcccctggtccggctggatataagagataagcgtattttgtgaatttgtcccccaactcactgtgccacaataacacacggattcacaagccatatttaccggttgtgaatttgtgaatctgaccttgccggccttaaggaagtttgaaattagagccctattttggacttgacaaattattccttggtaaatttggtgtataatagctatggggcataatgatgttagcctgtggaacggcctctgtaaaggatcaacaagctatcaaccctccccatgcgacaggagcttcaatgtattataatttgacagacaaaccctggatcagtgtgctacagcttgacgggcattctgccaggctcggcctggctgaggtcctgcgaaaagcacacacactgcgtttggcttacggcaatccgatggaccgcatgtccgttttccgtttcctcctcgccctgggctattggtgttttgccaatacaaaacaagcgccggtatcagataagccactgcctcaggcatggacggactggcttgaacaaaaccaagaatatttcgaattgttcggtgatggccccagattctaccaatccccaggaacatccagaatacgccccagcacggaccttatccacgagcttcccacggcaaacaatttctggcacttccgccatgtgaccgatttcatcgatggcatttgcccagcttgctgcgttaccggtctgctgcgcctgccactctttaccaccgtaggcggcagcggaatcggagccggcatcaacagaactcctcccttctatgccatctggcagggtgatagtctgtcggaatcgatattcctgaattgggaacccacttcccggttgggtgttcctgcctggctgaacccgtttggatcccaaaacgagaaggatgtagccttgctgactggcctcacctggctgccccgcaaggtattcctgcttggcccggtgtcagacggagcaaaatgcagcgcctgcggagaagagcatgagcctctggtctatgcctgcaacaatgaggcggtgaaagtgcctccgaaccttgtctggaacgaccctcacgcgatttaccgggatgacaataatggcctgactgcccaggtggctctgatgtccggggacaaatacactttcgctaacagggattggcataaacccctggtcggcttcttacgggcgaaaggcatgtctcggaccgccacgctgtttttagtgggcttcacaagcgttcaagccaaatgtgtggacgtttgggaaaagaccattgccctatccggaaaaacaagctccgaggaactgctggaccagatatccgaaagagcctactccctgcacaggatgaggaaacaagaccgccggggcgattacaaggaatccgtgggaatcaccgccgtggcggacatcatcccgcacgtagagcatcgggttgacgtccattcgggcgagatggtggaaaacagcggcaatgtctggcaggaagcggatgaagattacggattcttcatgaagcgttttgccgtttctctagtgccggaaattacggttgccgccaagcttgaacgagaacaactggctcggcgcaagccctggcccctaaaaccaaaatcaattaaaaaaccttcatccggaggcgataatgaatgagagcaccgtgaaatttgttcggagcctgggcgaactcaaagagggcgacctgggcttgctcagaaagctcaggggtcgccgtctggatgaatccctgccgggtttcgacctgttttccggcctgtggtggccactccgcagtataagccccaaaacccccaggcggaaggtggtctggctagtcaccaagcttttcgcggaattccgctttgagcaaaagaaaggcgccagcctgccttggctcatgggcagaatatgccgtggacttaaagaagaaaaagagttcccacgtgttttagccaggttcgaccgcttgctcacgctcgagttgaaccaactggaggaaccgctggcgcaagtgctcgcgattttaaaaagacatgacattgccagtctggactgggttgccctcatcgatgacctctccgcttgggaacgggaatcaaacagagcgatatggtcagacacatttatttcagcatttaataatcagcaaggaggaatcaaatgttgattgaaatacacatgatccaaaaccacagcccggccaacctgaaccgggacgacctgggcgcgcccaagacctgttatttcggtggggtgttgcggtcccgcatctccagccagtgcctaaagcggagcatcaggatgagcgatgaattcaaaaacttgctcgggggtatccgtacccgtcggttggccgagttgattacaaaagctacaggacaggactgcaggaatcaggcagaggaagttctgaacaaagccggtttgaaacacgaaaacggacatagtaagatgctggtgttcatgacccggaacaagatcgatgcccttgctcaaattgtcaccagcgaaggcctgagtgttgcagagaaagccaagaaagcggcagatgtaatatcgggggcaatacattcccctgacatcgctctgtgcggaagaatgctcgagcccgataccaaggacaagaacacagacaaggtcaagtgggaaaataccactgttgaagcagccctgcaggtgtcgcacgccatttcaacccacatcgcccgcccagaaatagattactatgtagcagctgatgacgagcctggcgacgacacaggtgctggattcatagacgaggcgatgtttgcttcggcctgtttctacaaatattactcaattgattggaataccttgataatcaacctccagggtaatgaaaagttggcagctcatactgtcggagcctttatccaggccgctgcactcactaatcccagcggaaagcagaacagctttgccgcacataaccttcccgatggaatattggtagaaataaaagagacacctgtcagctatgcaaatgcctttgtgcgaccggtgggaatcgttaaggattctgacttggtagaacaaagcattggccaactggccaactatgtgaaggatataagtgccggtttcttccctggacagatgaaaggcaacgctctgtggttctcgcccaatggacgttatcccctaaagcctcaacagggcacgctggacataaagccagtttgcaacctgctagaacttgttcgcgaagcagttgagatgttgggttttgaatgggatgatgtaaaaaacgagaaagtagagagttgaaatgtcttctccgcctaataccctgttcctgagattggaggctccccttcaggcctggggaagcaatgaggccaaattcgccgtgcgcaggacagccgacgcgcccaccaaatccggagtggcaggcctgctctgcgctgccctgggaatcagccgggccgaagccggacagtattggctgggtgaaattgccaaattgcgcatgggggtgcggatagaccgcccgggcatccgctggtgggattaccatactgtgggagcggagcagaagctgcgcatttctgacctgaaaatgcccaacggcctagttctggttggcactgccctggccaaaaacctgggcgcggacaagatcaaatccaaacccggggctttgctctcccgacgcgagtatttggctgatgccagcttcctggttgcgctccagggtgaaccggatatcgtggcacaactggctgaagcgctgaaaaaaccagtctggacgctttatctggggcgaaaatcctgtcccccctcccgtccggtggatgaacacccgccagggttttatgccagtctgaaagaggctttgcggtcgatcccggcgcaactgagggaaaaaggcgaaccgatacctgacagtgttccctgtgtgctcgactgggttccggcccatgatgacgtgcacgctccgccgaacgccgaagcgcattacgacgtgccggtgtcctttgagcctccccaccacttgccccggctggtgatccgctgtaacctgccattggaccgcaacttcgaggcagagaccgtgctttccggcaaagcctggcaaccgccccgcaaccgggcaaattacgacaatcctgaatacaaaagggtccgcgctgagcgtttggtgatggacaatgccgcctgcatgttctgcaaggcacccgccactactgtgcagcacgtgaattaccgacgcgccggaggcagcgagaagccggaggacttgcgcgccctctgccgcctctgccacgatgcctgcaccatgctggaatatggcagcggcatgaccatggaccgcatagatccctgtgaccccgcctggcgtgagcgcatcttggccaaacgcgaggaaataatcaaattccgctcgctggagcagcgcaggcgcaaactcgatccgaaggaggagaacggatgatgtatctatcccaactgctcatcgacacaggcggcaaccctgaccggccaaggcccgggcgcttgtggctgaacaatatctataatgtccaccggcggctcagcatggctttccccatgcgcaagcgcaaggaaggagacccgaggtttctgcagccctttgaccccgcagattttgaaaagcgccagttcctctttcgggtggacaacaacaccgatggagaaaatcaaagggcgatggttttggtgcagtcgtccctgccgccggattgggactgggctttccagaatgccacgggatttttggcagcccctccccaggttaaggaatacgatccccagttctcagcaggtcagcggctgcgcttccgcatcctcgtgaatgccagtgtcaaacgcaaaatcgacgagttgcgggaaggacccggaggaaaggaaaaaacgggaagggttctgcacaaacgggtcgcccttacctgggacacaaattccaacccaaaggatgcggtggcgcaatggtttgccgccaaggctggcagactgggcttcacgcccggggagaccgaactggtaagcctgggctgggtatacggttccaaaccggagccccggggaaattcgccccggcgtgagaacgaataccgtcccctgagataccgttccgccctgctggaaggttatctgacagtggatgatgcctttctgttccgggaagccttggaaaaaggtatcggcagcgccaaaggaatgggcttcggcctcctttccgtggttccggcaagtgatgcgtaacagagaccttcacctaatgccaaaaatgcgggaccgcttcacctatctctatgtggagcatgccaaaatagacaaagaacaacaggcaatcgcctttcacgatgccatgggctccactcctgttccctgcgctggactggccctgctgatgctggggccaggcgtatccatcacccatgcggccatccttgttttagcagaatgcggctgtttggtggcttgggtgggggaacagggagtccgcttttactcatccgggacagggaccacccgtagttccgccaaccttatgcgtcaggctgccgcctggtcaaatcgagatacgcatctgcggatagttcgcagaatgtatgaattgaggttcaaggaaaaactggacccaaccctctctcttgaacagataaggggaaaagagggagcgagagtacgggatacctatttcagactttcaaaagaattcgatgtgcccatgagtgcgaggaattacgacaggagcaactggaataaaaccgaccccatcaacagagccctgtccgttgccaattcctgtctctatggcatctgccacgccgcgatagtggccgctggctattcacctgccctgggtttcgttcatactggcaaacaactgtcatttgtttatgacattgccgatctttataaaatggaaacctccgtgcccgcggctttcatagccacagccgcaggggtcgataacctggacagaaggacacgcattgcctgccgtgaccagttctatcaatttggtctgctaaagaagatagtggccgacattcacgcccttttcggtattctggaaacttcggacgatgagccagaccttgctgatgtcgatccagccgtgccaggcgggctttggaacccagatgataaagtgagccccggcggcttgtcatggggtctggatgatcctggaggccatgatgatggttctggtgcttgaaaaagttccctctggcctgagaggagaaattacacgctggctcctcgaaatcaaggctggagtatttgtcggtcaggtatcggccatgataagggaaaagctgtgggacaaggccaggtctggttgtgccggtggaacttgtatcatgatttacagcaagcattgcgaacaaggctttggaattgagttttggggtgccgcggaaaggatagtgacagaatgggaaggattgaaattgatgaccaagcatccgtgatccatacttgaagcctgttcaatggcctcaaagcgtctactttcgaagtgtgttccccacctgcgtgggggtgaaccgtccaaaacacaggcggttagagacgcaaaactg

SEQ ID NO: 753 - DNA, 7028 bp, Artificial Sequence
  Synthetic Oligonucleotide
aataaagtatccaaacatacgtccttgcgtggcatccgagggcctcctgccttttctaaacctttagaaacaaccatagaaaagcgtaggcaggccctccatccaagacaaggccccaaaaaagtggggatgagtcagtatcatttctgcttgacgtccaatgagattagtgatatagtgttaaaccaagtacgggtggaaccgagctccgaccggtcggcgaccggccatctccctccgaagcccaattggatcgtggtgcgttttgaagaggcgtcatcatgaggatgcaaagcgatgggaaacgcaattcctgaagctggacaatattcaaatcctgaagcggctggcaaaagttttttcaaccggtatgaccatacctgtcatacccctgtgcgatactgaaaatagattgatggaggacggctatgaactataatctctgcgatgagaattggattccagtactctaccgaaacggccaattcaaggaagtcgggattttgcaggcattgcaggaggcggggcagatttcgcagattgccgcgtccaatccgatggatcgggttgccttgctccgtttcctgctggcgattgtctactggtgtcaaggcaatccaccggcagaagatgagaaggagcggattctggccgacggccaattcccgaaaaactggtttgggaagctggaacaaaagaaggagttgtttaacctgttaggagacgggcagagattccttcaagatatttccgcccaaagaaaacgtcccattaccgatctcatccacgaggttcctgctggaaataacttctggcacttcaatcacgccattgattaccaccacggactttgcccggcatgttgtgcacgaggattgcttcgcctacccttgttccacgtcagtgggttgccggatttgaagtcgggaatcaacggcgtaccgcccatctacgttatgccgcttgggaagactctcttggagaccctgcgtctcaactggcgacagcacggcggcgacttaggcgtccccgcatgggaggattgccgcatgacgccgccgacggatgctcccgttccattgttgacgggactgacggttctctcccgacgagtgtacctccatgatccctcggagtcggacgagtgttgcatcggttgtggaaagcgggttggagagttgattctatcctgcgaatttcaatcggcgggttcgctggagaaccggcattggaaagatcctcacgtcgtttattcctcttcggacaaggcggtgaaggctcctaacttggaggacgagcttatagccgatagaccgtggtgccagttgttctccgaagtgtcgttccccgacgagagccgaggcctgacgctgtttattacggggttttccacgagcaaagccaagtacgtggacgtctgggagcgaacatgtaagattggggcaaccaaccccgattccgtgcgacagtggaaggaaaccgtcgacaatctccggcggcttaagccgaaagactgggatgcaatggagccgaagggccgcaagtacaccgggattcgggccggtgtcaccgcaatgaccccgcatgtcgagactcaggtctcccgccgaattcccgaactgacggcgaatgatggcgagacagactttcaagaggggctgcaggagtaccgtaaggcgattggcattctggcctcctctctatatccgaacgccacttcggagcatctggatcggcaacgacaactccaggaggccgtaagattggctaggccgcgaaagtcgcttgccaagaaagaaaggaaggaacgatgaccgcgacgcatgattttctggagaacatccgatcactgaagaccggggaccgaggaagattaagggcactggctaacaagccgctggatcgctcgctgaacggctttgatctcttcgccggactgtggtggcccctgcgtcagaaaagccaatttgccccacgacgggaagtcgcatggctggtggccaagcttttcagcttttgtccactggatcaggagaatggcgcaaccgtggcgcgtcaactcggtcgactatcggataacgcccggcttcgacagcaatttgacgatctgctcgggctgcccctgtcgcagctcgaagttcctttgcaacagtttctccgcatgctggcccgccggtcactgtcggtggattggatccgcctcaccgatgacctttcacaatgggaaaaccgggagacccgcctccagtgggcgaaggagtttctcgaacggaattcacagtgttaactttttgtaggagacatcgtatgttgatcgacattcacatcatccagaaccacagcccgtcaaatctcaaccgggacgacctgggcgcgcccaagacatgctatttcggcggcgtcctgcggaaccgcatttccagccagtgcctcaagcgaagtatccgccagagcgagcagttcagccgattactcggcagcattcggacccgcaggctggcggagatcatcagtggaaaagtgaatgggaacaaggacgccaagaaacgcgcgtcagaggtcctcaagaagtgcggctttgacgccaaggacgacggcaccactgatatggccatctatgtttcgcagagcgccattgacaagatggcgaaccttctgaaaacgcacaacggtgacgcggacgctctcgcccaggaattcgccaaactgatcgcgacggaagtggctgttcccgatatggccttgacggggcgaatgctggagacgaaggaactggctaagtacgatacgaccgtggaagcggcgttgcaggccgcgcatgccatctccactcattcggcgactccagaagtcgattatttcgtcgctgccgatgatcttcccggagatgatgccggagccgcctacctcgatgaagcgatgtttgcatccgcctgcttctacaaatatttttccatcgactgggaccagcttgtcagcaatctcaagggcaacaaggagctggccgcccacaccgtcggagccttcctgcggggcgcggctctggcaaaccccaccggcaaacaaaatagctttgccgcccataatccgcccgatggaatcgtcgttgagatcaaggatacgcccatcagctatgccaacgccttcgccgcccccgttcccctcaccggtccgcgggatatggtcactcagagcattgcccaactcggacagtacatccacgacatggacaccgggtttggcggcccgaagaaacgattctggttctcgcccaatcttcgctacaagctccaactcgacggggcccagggggcgagcggcgaatctgtggaatcgctggacaagctagtcggaagactcctgcatgaaatgggctttgactggcagaaggttcagacggtcaccatcaactaagggagattgttccgatggataccacgacagacaactgccccaataccctattccttcgtctcgaaggtccgctccaagcctggggccaacatgaatcgaagttcgccatccgacggacggcggaggccccgaccaagtcggggatcatcggcctactgtgtgcggcgatgggaatttcgcgggatgccttcccggagcatcggaaaagattcgactccttgcgtctggccgtccgaatcgattccccaggcgttcgctggtgggattatcacactgtcggagccgggatgcagatgccgatctcggaaggacctggaaaagcaagggaagggccgctactcagtcggcgagagtacctgtgcgatgctcgcttcctggtcgccctgcaaggtccggtggacctgatcggcgaactggccgcagcggttcagaagccgaaatggtcgttgtacctgggccgtaagtgctgcccgccgtcactgcccgtgtgggtggccgatccgagccgtcaggaaagcgttctttccgccattgtatccgtgccttatcaaaagcgattccgggacgatgaggttccgcctgttgtggactgcctgatggattggcagtccgacgacaatcacacggaggctccgtcggacgccgaggtgtggtacgatgttccggtgggtttcagtccacccgcccaccagccgcggttcgtgatccggcggcaactgacagtcggaccagacggtgacgtgaaagtggctcaagagcccctcctgaatcgaacgccggggccgaaaagaattcgcgcggactacaccaatacggaataccgaagacgccgggaacagcgtctagatgcggaccatggtctttgcgtcttctgcaaggctccggcgaccacggttcagcatatcacctatcgtcgtgccggaggcaatgaggcgcaggaagacttgcgttccctctgccgtctttgtcacgacgcggtaaccatgatcgaatacggcttgggcatgggcctggaccgaatcaaccccgaagacccgcaatggcgggatcagatcattgccaaacgccgagagattgtcgaatttcggtccctggagactcgtcgaaggcgcttgcagcccgaggaggtggaatgatgtatctatcgacgctgctcatcaacgtgggcgacaatccggaccggccccgccccggtcggctctggctgcggaacctctaccgcgtccatcagcgattgtgcatggcgtttccttcgaaggcacgtctggagaaggataaattctttcttcgtccgtatgatcctcaggaatttgcccaagggcatgtccacgtcaaccggacgcaggaaaccgggtttcttttccgcgttgatcctcaaccgggcgggaatgtggtgattcttgtgctctcggctattgagccgaactgggcatacgctttccataatgcggagcatctcctggcccactccccgcaggtcaaggaattcaacccatccttcacggaagggcagcacttcaggttcctgctgtccgcaaaccccacaagaagatgttcgaagaactccaaggatatccggggcaatcctctagacggcaaatggataggcaagcgtattcccgttccgttcgagaaactcaaggactggctggtcacccgtggcaagaagggcggttttggtatcgacgacgtggcaatccaatccggctacgtctacgttgacaaacgcgatggcatcctcgaaagcaagcgactgctgtcggtccgattcgagggcatcctgaccgttaccgaccccgaagcattccgcaagactcttatctccggcatcggaccggccaaggcctttggctttgggctgctttcactggcgaagtttgatcggccttaggccgtaagattcgggggggactgtaaaatcgttctttgacaaaggaataacacgtgcgactcaaaaacctccaggagattccgaagttcgccgacaagctcagctacctctacgtggaacatgcggtggtggatcgccatgaaaaagccatcgccctgcatcaggcggatgggacgacgcccgttccatccgccgcgttgggtgtgctcgtcctgggaccgggcaccacgatcacccacgccgccgttcaaacgctggccgacaataattgcctggtcatctggtccggcgaacagggcgttcggttctacgcccagggactcggcggctcgcgtcacagccgtaatatgatccatcaggcccgactcgtcagcaacgacctcacgcggctgcaagtggtcgtgcgaatgtactgcctccggttccgtgaacccgtggatatgaatctgacgcttcagcagcttcgcggcatggaaggtatccgcgttcgccagtcctacgccgacgccgcccgcgaagcgggcgtcacgtggcaaggccgatcttataaccgcgaaaagtgggactacagcgacccggtcaatcgcgcactgtcggcggcaaactcctgcctgtacggactggttcacgccgcaatcctctccgccgggtattccccggccctggggttcattcataccggtaaacaactgtccttcgtctacgatatcgccgatctgtataaggccgatctgaccattcccatggcattcaaactcgccgccgcgaacccgccgaacctggaacgcgaggtccgaatcgcctgccgcgaccgcttcaaggaaagccgtctgatggaaaaaattattccggatattgccaaggtgctggacgtcgatatcaaggcgttggaggcccagcccgacgaattcgccgacgacgcggctctgcccgccgagtggtggacgccccagagcattcccgcttccgtgccgattggaaagatactcaaactctgccccaaccccgacccgatagcaaaggaggaaaaagaccatgaccatcctgattctggaacgagtccaggcgtcactgcggggtgaactcacccgctggctgattcagccaaagacgggcgtcttcgtcggccatgtctccgcccgcgttcgacaactgctgtggttcaaagtcattcgctcggtcaaggacggagccgccctcctgatccattccgataacagcgaacagggcttcgccatccagagctacggcgataccagcaaggtcattacagacttcgaaggcattttgcttccaaaaaccccgaaatcagcgtaatatccagtatattccccacgcacgtgggggtgaaccgaaagcccatgaaaatatccgcaattgggcaaaatattccccacgcacgtgggggtgaaccgtccgcccccggatccgaagacggcattgccgaatattccccacgcacgtgggggtgaaccgtacgctccaatctggcggcggcgatgatattgatattccccacgcacgtgggggtgaaccggccactccctatttcattccctcccccctagcatattccccacgcacgtgggggtgaaccggggaggccccggcggaaaccttgacgcttggcatattccccacgcacgtgggggtgaaccgatccttgaggttgcagggtcgggaaacgtaccatattccccacgcacgtgggggtgaaccggcc

SEQ ID NO: 754 - DNA, 7028 bp, Artificial Sequence
  Synthetic Oligonucleotide
aataaagtatccaaacatacgtccttgcgtggcatccgagggcctcctgccttttctaaacctttagaaacaaccatagaaaagcgtaggcaggccctccatccaagacaaggccccaaaaaagtggggatgagtcagtatcatttctgcttgacgtccaatgagattagtgatatagtgttaaaccaagtacgggtggaaccgagctccgaccggtcggcgaccggccatctccctccgaagcccaattggatcgtggtgcgttttgaagaggcgtcatcatgaggatgcaaagcgatgggaaacgcaattcctgaagctggacaatattcaaatcctgaagcggctggcaaaagttttttcaaccggtatgaccatacctgtcatacccctgtgcgatactgaaaatagattgatggaggacggctatgaactataatctctgcgatgagaattggattccagtactctaccgaaacggccaattcaaggaagtcgggattttgcaggcattgcaggaggcggggcagatttcgcagattgccgcgtccaatccgatggatcgggttgccttgctccgtttcctgctggcgattgtctactggtgtcaaggcaatccaccggcagaagatgagaaggagcggattctggccgacggccaattcccgaaaaactggtttgggaagctggaacaaaagaaggagttgtttaacctgttaggagacgggcagagattccttcaagatatttccgcccaaagaaaacgtcccattaccgatctcatccacgaggttcctgctggaaataacttctggcacttcaatcacgccattgattaccaccacggactttgcccggcatgttgtgcacgaggattgcttcgcctacccttgttccacgtcagtgggttgccggatttgaagtcgggaatcaacggcgtaccgcccatctacgttatgccgcttgggaagactctcttggagaccctgcgtctcaactggcgacagcacggcggcgacttaggcgtccccgcatgggaggattgccgcatgacgccgccgacggatgctcccgttccattgttgacgggactgacggttctctcccgacgagtgtacctccatgatccctcggagtcggacgagtgttgcatcggttgtggaaagcgggttggagagttgattctatcctgcgaatttcaatcggcgggttcgctggagaaccggcattggaaagatcctcacgtcgtttattcctcttcggacaaggcggtgaaggctcctaacttggaggacgagcttatagccgatagaccgtggtgccagttgttctccgaagtgtcgttccccgacgagagccgaggcctgacgctgtttattacggggttttccacgagcaaagccaagtacgtggacgtctgggagcgaacatgtaagattggggcaaccaaccccgattccgtgcgacagtggaaggaaaccgtcgacaatctccggcggcttaagccgaaagactgggatgcaatggagccgaagggccgcaagtacaccgggattcgggccggtgtcaccgcaatgaccccgcatgtcgagactcaggtctcccgccgaattcccgaactgacggcgaatgatggcgagacagactttcaagaggggctgcaggagtaccgtaaggcgattggcattctggcctcctctctatatccgaacgccacttcggagcatctggatcggcaacgacaactccaggaggccgtaagattggctaggccgcgaaagtcgcttgccaagaaagaaaggaaggaacgatgaccgcgacgcatgattttctggagaacatccgatcactgaagaccggggaccgaggaagattaagggcactggctaacaagccgctggatcgctcgctgaacggctttgatctcttcgccggactgtggtggcccctgcgtcagaaaagccaatttgccccacgacgggaagtcgcatggctggtggccaagcttttcagcttttgtccactggatcaggagaatggcgcaaccgtggcgcgtcaactcggtcgactatcggataacgcccggcttcgacagcaatttgacgatctgctcgggctgcccctgtcgcagctcgaagttcctttgcaacagtttctccgcatgctggcccgccggtcactgtcggtggattggatccgcctcaccgatgacctttcacaatgggaaaaccgggagacccgcctccagtgggcgaaggagtttctcgaacggaattcacagtgttaactttttgtaggagacatcgtatgttgatcgacattcacatcatccagaaccacagcccgtcaaatctcaaccgggacgacctgggcgcgcccaagacatgctatttcggcggcgtcctgcggaaccgcatttccagccagtgcctcaagcgaagtatccgccagagcgagcagttcagccgattactcggcagcattcggacccgcaggctggcggagatcatcagtggaaaagtgaatgggaacaaggacgccaagaaacgcgcgtcagaggtcctcaagaagtgcggctttgacgccaaggacgacggcaccactgatatggccatctatgtttcgcagagcgccattgacaagatggcgaaccttctgaaaacgcacaacggtgacgcggacgctctcgcccaggaattcgccaaactgatcgcgacggaagtggctgttcccgatatggccttgacggggcgaatgctggagacgaaggaactggctaagtacgatacgaccgtggaagcggcgttgcaggccgcgcatgccatctccactcattcggcgactccagaagtcgattatttcgtcgctgccgatgatcttcccggagatgatgccggagccgcctacctcgatgaagcgatgtttgcatccgcctgcttctacaaatatttttccatcgactgggaccagcttgtcagcaatctcaagggcaacaaggagctggccgcccacaccgtcggagccttcctgcggggcgcggctctggcaaaccccaccggcaaacaaaatagctttgccgcccataatccgcccgatggaatcgtcgttgagatcaaggatacgcccatcagctatgccaacgccttcgccgcccccgttcccctcaccggtccgcgggatatggtcactcagagcattgcccaactcggacagtacatccacgacatggacaccgggtttggcggcccgaagaaacgattctggttctcgcccaatcttcgctacaagctccaactcgacggggcccagggggcgagcggcgaatctgtggaatcgctggacaagctagtcggaagactcctgcatgaaatgggctttgactggcagaaggttcagacggtcaccatcaactaagggagattgttccgatggataccacgacagacaactgccccaataccctattccttcgtctcgaaggtccgctccaagcctggggccaacatgaatcgaagttcgccatccgacggacggcggaggccccgaccaagtcggggatcatcggcctactgtgtgcggcgatgggaatttcgcgggatgccttcccggagcatcggaaaagattcgactccttgcgtctggccgtccgaatcgattccccaggcgttcgctggtgggattatcacactgtcggagccgggatgcagatgccgatctcggaaggacctggaaaagcaagggaagggccgctactcagtcggcgagagtacctgtgcgatgctcgcttcctggtcgccctgcaaggtccggtggacctgatcggcgaactggccgcagcggttcagaagccgaaatggtcgttgtacctgggccgtaagtgctgcccgccgtcactgcccgtgtgggtggccgatccgagccgtcaggaaagcgttctttccgccattgtatccgtgccttatcaaaagcgattccgggacgatgaggttccgcctgttgtggactgcctgatggattggcagtccgacgacaatcacacggaggctccgtcggacgccgaggtgtggtacgatgttccggtgggtttcagtccacccgcccaccagccgcggttcgtgatccggcggcaactgacagtcggaccagacggtgacgtgaaagtggctcaagagcccctcctgaatcgaacgccggggccgaaaagaattcgcgcggactacaccaatacggaataccgaagacgccgggaacagcgtctagatgcggaccatggtctttgcgtcttctgcaaggctccggcgaccacggttcagcatatcacctatcgtcgtgccggaggcaatgaggcgcaggaagacttgcgttccctctgccgtctttgtcacgacgcggtaaccatgatcgaatacggcttgggcatgggcctggaccgaatcaaccccgaagacccgcaatggcgggatcagatcattgccaaacgccgagagattgtcgaatttcggtccctggagactcgtcgaaggcgcttgcagcccgaggaggtggaatgatgtatctatcgacgctgctcatcaacgtgggcgacaatccggaccggccccgccccggtcggctctggctgcggaacctctaccgcgtccatcagcgattgtgcatggcgtttccttcgaaggcacgtctggagaaggataaattctttcttcgtccgtatgatcctcaggaatttgcccaagggcatgtccacgtcaaccggacgcaggaaaccgggtttcttttccgcgttgatcctcaaccgggcgggaatgtggtgattcttgtgctctcggctattgagccgaactgggcatacgctttccataatgcggagcatctcctggcccactccccgcaggtcaaggaattcaacccatccttcacggaagggcagcacttcaggttcctgctgtccgcaaaccccacaagaagatgttcgaagaactccaaggatatccggggcaatcctctagacggcaaatggataggcaagcgtattcccgttccgttcgagaaactcaaggactggctggtcacccgtggcaagaagggcggttttggtatcgacgacgtggcaatccaatccggctacgtctacgttgacaaacgcgatggcatcctcgaaagcaagcgactgctgtcggtccgattcgagggcatcctgaccgttaccgaccccgaagcattccgcaagactcttatctccggcatcggaccggccaaggcctttggctttgggctgctttcactggcgaagtttgatcggccttaggccgtaagattcgggggggactgtaaaatcgttctttgacaaaggaataacacgtgcgactcaaaaacctccaggagattccgaagttcgccgacaagctcagctacctctacgtggaacatgcggtggtggatcgccatgaaaaagccatcgccctgcatcaggcggatgggacgacgcccgttccatccgccgcgttgggtgtgctcgtcctgggaccgggcaccacgatcacccacgccgccgttcaaacgctggccgacaataattgcctggtcatctggtccggcgaacagggcgttcggttctacgcccagggactcggcggctcgcgtcacagccgtaatatgatccatcaggcccgactcgtcagcaacgacctcacgcggctgcaagtggtcgtgcgaatgtactgcctccggttccgtgaacccgtggatatgaatctgacgcttcagcagcttcgcggcatggaaggtatccgcgttcgccagtcctacgccgacgccgcccgcgaagcgggcgtcacgtggcaaggccgatcttataaccgcgaaaagtgggactacagcgacccggtcaatcgcgcactgtcggcggcaaactcctgcctgtacggactggttcacgccgcaatcctctccgccgggtattccccggccctggggttcattcataccggtaaacaactgtccttcgtctacgatatcgccgatctgtataaggccgatctgaccattcccatggcattcaaactcgccgccgcgaacccgccgaacctggaacgcgaggtccgaatcgcctgccgcgaccgcttcaaggaaagccgtctgatggaaaaaattattccggatattgccaaggtgctggacgtcgatatcaaggcgttggaggcccagcccgacgaattcgccgacgacgcggctctgcccgccgagtggtggacgccccagagcattcccgcttccgtgccgattggaaagatactcaaactctgccccaaccccgacccgatagcaaaggaggaaaaagaccatgaccatcctgattctggaacgagtccaggcgtcactgcggggtgaactcacccgctggctgattcagccaaagacgggcgtcttcgtcggccatgtctccgcccgcgttcgacaactgctgtggttcaaagtcattcgctcggtcaaggacggagccgccctcctgatccattccgataacagcgaacagggcttcgccatccagagctacggcgataccagcaaggtcattacagacttcgaaggcattttgcttccaaaaaccccgaaatcagcgtaatatccagtatattccccacgcacgtgggggtgaaccgaaagcccatgaaaatatccgcaattgggcataatattccccacgcacgtgggggtgaaccgtccgcccccggatccgaagacggcattgccgaatattccccacgcacgtgggggtgaaccgtacgctccaatctggcggcggcgatgatattgatattccccacgcacgtgggggtgaaccggccactccctatttcattccctcccccctagcatattccccacgcacgtgggggtgaaccggggaggccccggcggaaaccttgacgcttggcatattccccacgcacgtgggggtgaaccgatccttgaggttgcagggtcgggaaacgtaccatattccccacgcacgtgggggtgaaccggcc

SEQ ID NO: 755 - DNA, 7019 bp, Artificial Sequence
  Synthetic Oligonucleotide
ttctccatgtcattaaccagcttcggttcacccccacgcaggtggggaacacacttcgaaagtagacgctttgaggccattgaacaggcttcaagtatggatcacggatgcttggtcatcaatttcaatccttcccattctgtcactatcctttccgcggcaccccaaaactcaattccaaagccttgttcgcaatgcttgctgtaaatcatgatacaagttccaccggcacaaccagacctggccttgtcccacagcttttcccttatcatggccgatacctgaccgacaaatactccagccttgatttcgaggagccagcgtgtaatttctcctctcaggccagagggaactttttcaagcaccagaaccatcatcatggcctccaggatcatccagaccccatgacaagccgccggggctcactttatcatctgggttccaaagcccgcctggcacggctggatcgacatcagcaaggtctggctcatcgtccgaagtttccagaataccgaaaagggcgtgaatgtcggccactatcttctttagcagaccaaattgatagaactggtcacggcaggcaatgcgtgtccttctgtccaggttatcgacccctgcggctgtggctatgaaagccgcgggcacggaggtttccattttataaagatcggcaatgtcataaacaaatgacagttgtttgccagtatgaacgaaacccagggcaggtgaatagccagcggccactatcgcggcgtggcagatgccatagagacaggaattggcaacggacagggctctgttgatggggtcggttttattccagttgctcctgtcgtaattcctcgcactcatgggcacatcgaattcttttgaaagtctgaaataggtatcccgtactctcgctccctcttttccccttatctgttcaagagagagggttgggtccagtttttccttgaacctcaattcatacattctgcgaactatccgcagatgcgtatctcgatttgaccaggcggcagcctgacgcataaggttggcggaactacgggtggtccctgtcccggatgagtaaaagcggactccctgttcccccacccaagccaccaaacagccgcattctgctaaaacaaggatggccgcatgggtgatggatacgcctggccccagcatcagcagggccagtccagcgcagggaacaggagtggagcccatggcatcgtgaaaggcgattgcctgttgttctttgtctattttggcatgctccacatagagataggtgaagcggtcccgcatttttggcattaggtgaaggtctctgttacgcatcacttgccggaaccacggaaaggaggccgaagcccattcctttggcgctgccgatacctttttccaaggcttcccggaacagaaaggcatcatccactgtcagataaccttccagcagggcggaacggtatctcaggggacggtattcgttctcacgccggggcgaatttccccggggctccggtttggaaccgtatacccagcccaggcttaccagttcggtctccccgggcgtgaagcccagtctgccagccttggcggcaaaccattgcgccaccgcatcctttgggttggaatttgtgtcccaggtaagggcgacccgtttgtgcagaacccttcccgttttttcctttcctccgggtccttcccgcaactcgtcgattttgcgtttgacactggcattcacgaggatgcggaagcgcagccgctgacctgctgagaactggggatcgtattccttaacctggggaggggctgccaaaaatcccgtggcattctggaaagcccagtcccaatccggcggcagggacgactgcaccaaaaccatcgccctttgattttctccatcggtgttgttgtccacccgaaagaggaactggcgcttttcaaaatctgcggggtcaaagggctgcagaaacctcgggtctccttccttgcgcttgcgcatggggaaagccatgctgagccgccggtggacattatagatattgttcagccacaagcgcccgggccttggccggtcagggttgccgcctgtgtcgatgagcagttgggatagatacatcatccgttctcctccttcggatcgagtttgcgcctgcgctgctccagcgagcggaatttgattatttcctcgcgtttggccaagatgcgctcacgccaggcggggtcacagggatctatgcggtccatggtcatgccgctgccatattccagcatggtgcaggcatcgtggcagaggcggcagagggcgcgcaagtcctccggcttctcgctgcctccggcgcgtcggtaattcacgtgctgcacagtagtggcgggtgccttgcagaacatgcaggcggcattgtccatcaccaaacgctcagcgcggacccttttgtattcaggattgtcgtaatttgcccggttgcggggcggttgccaggctttgccggaaagcacggtctctgcctcgaagttgcggtccaatggcaggttacagcggatcaccagccggggcaagtggtggggaggctcaaaggacaccggcacgtcgtaatgcgcttcggcgttcggcggagcgtgcacgtcatcatgggccggaacccagtcgagcacacagggaacactgtcaggtatcggttcgcctttttccctcagttgcgccgggatcgaccgcaaagcctctttcagactggcataaaaccctggcgggtgttcatccaccggacgggaggggggacaggattttcgccccagataaagcgtccagactggttttttcagcgcttcagccagttgtgccacgatatccggttcaccctggagcgcaaccaggaagctggcatcagccaaatactcgcgtcgggagagcaaagccccgggtttggatttgatcttgtccgcgcccaggtttttggccagggcagtgccaaccagaactaggccgttgggcattttcaggtcagaaatgcgcagcttctgctccgctcccacagtatggtaatcccaccagcggatgcccgggcggtctatccgcacccccatgcgcaatttggcaatttcacccagccaatactgtccggcttcggcccggctgattcccagggcagcgcagagcaggcctgccactccggatttggtgggcgcgtcggctgtcctgcgcacggcgaatttggcctcattgcttccccaggcctgaaggggagcctccaatctcaggaacagggtattaggcggagaagacatttcaactctctactttctcgttttttacatcatcccattcaaaacccaacatctcaactgcttcgcgaacaagttctagcaggttgcaaactggctttatgtccagcgtgccctgttgaggctttaggggataacgtccattgggcgagaaccacagagcgttgcctttcatctgtccagggaagaaaccggcacttatatccttcacatagttggccagttggccaatgctttgttctaccaagtcagaatccttaacgattcccaccggtcgcacaaaggcatttgcatagctgacaggtgtctcttttatttctaccaatattccatcgggaaggttatgtgcggcaaagctgttctgctttccgctgggattagtgagtgcagcggcctggataaaggctccgacagtatgagctgccaacttttcattaccctggaggttgattatcaaggtattccaatcaattgagtaatatttgtagaaacaggccgaagcaaacatcgcctcgtctatgaatccagcacctgtgtcgtcgccaggctcgtcatcagctgctacatagtaatctatttctgggcgggcgatgtgggttgaaatggcgtgcgacacctgcagggctgcttcaacagtggtattttcccacttgaccttgtctgtgttcttgtccttggtatcgggctcgagcattcttccgcacagagcgatgtcaggggaatgtattgcccccgatattacatctgccgctttcttggctttctctgcaacactcaggccttcgctggtgacaatttgagcaagggcatcgatcttgttccgggtcatgaacaccagcatcttactatgtccgttttcgtgtttcaaaccggctttgttcagaacttcctctgcctgattcctgcagtcctgtcctgtagcttttgtaatcaactcggccaaccgacgggtacggatacccccgagcaagtttttgaattcatcgctcatcctgatgctccgctttaggcactggctggagatgcgggaccgcaacaccccaccgaaataacaggtcttgggcgcgcccaggtcgtcccggttcaggttggccgggctgtggttttggatcatgtgtatttcaatcaacatttgattcctccttgctgattattaaatgctgaaataaatgtgtctgaccatatcgctctgtttgattcccgttcccaagcggagaggtcatcgatgagggcaacccagtccagactggcaatgtcatgtctttttaaaatcgcgagcacttgcgccagcggttcctccagttggttcaactcgagcgtgagcaagcggtcgaacctggctaaaacacgtgggaactctttttcttctttaagtccacggcatattctgcccatgagccaaggcaggctggcgcctttcttttgctcaaagcggaattccgcgaaaagcttggtgactagccagaccaccttccgcctgggggttttggggcttatactgcggagtggccaccacaggccggaaaacaggtcgaaacccggcagggattcatccagacggcgacccctgagctttctgagcaagcccaggtcgccctctttgagttcgcccaggctccgaacaaatttcacggtgctctcattcattatcgcctccggatgaaggttttttaattgattttggttttaggggccagggcttgcgccgagccagttgttctcgttcaagcttggcggcaaccgtaatttccggcactagagaaacggcaaaacgcttcatgaagaatccgtaatcttcatccgcttcctgccagacattgccgctgttttccaccatctcgcccgaatggacgtcaacccgatgctctacgtgcgggatgatgtccgccacggcggtgattcccacggattccttgtaatcgccccggcggtcttgtttcctcatcctgtgcagggagtaggctctttcggatatctggtccagcagttcctcggagcttgtttttccggatagggcaatggtcttttcccaaacgtccacacatttggcttgaacgcttgtgaagcccactaaaaacagcgtggcggtccgagacatgcctttcgcccgtaagaagccgaccaggggtttatgccaatccctgttagcgaaagtgtatttgtccccggacatcagagccacctgggcagtcaggccattattgtcatcccggtaaatcgcgtgagggtcgttccagacaaggttcggaggcactttcaccgcctcattgttgcaggcatagaccagaggctcatgctcttctccgcaggcgctgcattttgctccgtctgacaccgggccaagcaggaataccttgcggggcagccaggtgaggccagtcagcaaggctacatccttctcgttttgggatccaaacgggttcagccaggcaggaacacccaaccgggaagtgggttcccaattcaggaatatcgattccgacagactatcaccctgccagatggcatagaagggaggagttctgttgatgccggctccgattccgctgccgcctacggtggtaaagagtggcaggcgcagcagaccggtaacgcagcaagctgggcaaatgccatcgatgaaatcggtcacatggcggaagtgccagaaattgtttgccgtgggaagctcgtggataaggtccgtgctggggcgtattctggatgttcctggggattggtagaatctggggccatcaccgaacaattcgaaatattcttggttttgttcaagccagtccgtccatgcctgaggcagtggcttatctgataccggcgcttgttttgtattggcaaaacaccaatagcccagggcgaggaggaaacggaaaacggacatgcggtccatcggattgccgtaagccaaacgcagtgtgtgtgcttttcgcaggacctcagccaggccgagcctggcagaatgcccgtcaagctgtagcacactgatccagggtttgtctgtcaaattataatacattgaagctcctgtcgcatggggagggttgatagcttgttgatcctttacagaggccgttccacaggctaacatcattatgccccatagctattatacaccaaatttaccaaggaataatttgtcaagtccaaaatagggctctaatttcaaacttccttaaggccggcaaggtcagattcacaaattcacaaccggtaaatatggcttgtgaatccgtgtgttattgtggcacagtgagttgggggacaaattcacaaaatacgcttatctcttatatccagccggaccaggggagaatgccggtttgcagtggctcatgccgcaaacaagagatgaagggaaggtagagatgatataatatcaatatataataatatataatactattatatattatatatactatttctatatgtattatagactggtagcgtggatacatcatatcctgtttacaatcggcttccgcggatgtataagagaccccttttttgtgaattagcctcataattacccgtctatcagcaggttgcaaattcacaagccatatttaccggttgtgaatttgtgaatttgccttccaacgttggtgagcctggagtgcagcgagcttgcgagtatggactacaggagatgttgctggcgtccatgctcgtgcctcgctcgacgccagcgtcaggaaggtcgatgtccccgtcggccaatcgttctgggaccttcgggctccaaa

SEQ ID NO: 756 - DNA, 7016 bp, Artificial Sequence
  Synthetic Oligonucleotide
tcccgcccataatggcaatacggttcacccccacgcaggtggggaacacacttcgaaagtagacgctttgaggccattgaacaggcttcaagtatggatcacggatgcttggtcatcaatttcaatccttcccattctgtcactatcctttccgcggcaccccaaaactcaattccaaagccttgttcgcaatgcttgctgtaaatcatgatacaagttccaccggcacaaccagacctggccttgtcccacagcttttcccttatcatggccgatacctgaccgacaaatactccagccttgatttcgaggagccagcgtgtaatttctcctctcaggccagagggaactttttcaagcaccagaaccatcatcatggcctccaggatcatccagaccccatgacaagccgccggggctcactttatcatctgggttccaaagcccgcctggcacggctggatcgacatcagcaaggtctggctcatcgtccgaagtttccagaataccgaaaagggcgtgaatgtcggccactatcttctttagcagaccaaattgatagaactggtcacggcaggcaatgcgtgtccttctgtccaggttatcgacccctgcggctgtggctatgaaagccgcgggcacggaggtttccattttataaagatcggcaatgtcataaacaaatgacagttgtttgccagtatgaacgaaacccagggcaggtgaatagccagcggccactatcgcggcgtggcagatgccatagagacaggaattggcaacggacagggctctgttgatggggtcggttttattccagttgctcctgtcgtaattcctcgcactcatgggcacatcgaattcttttgaaagtctgaaataggtatcccgtactctcgctccctcttttccccttatctgttcaagagagagggttgggtccagtttttccttgaacctcaattcatacattctgcgaactatccgcagatgcgtatctcgatttgaccaggcggcagcctgacgcataaggttggcggaactacgggtggtccctgtcccggatgagtaaaagcggactccctgttcccccacccaagccaccaaacagccgcattctgctaaaacaaggatggccgcatgggtgatggatacgcctggccccagcatcagcagggccagtccagcgcagggaacaggagtggagcccatggcatcgtgaaaggcgattgcctgttgttctttgtctattttggcatgctccacatagagataggtgaagcggtcccgcatttttggcattaggtgaaggtctctgttacgcatcacttgccggaaccacggaaaggaggccgaagcccattcctttggcgctgccgatacctttttccaaggcttcccggaacagaaaggcatcatccactgtcagataaccttccagcagggcggaacggtatctcaggggacggtattcgttctcacgccggggcgaatttccccggggctccggtttggaaccgtatacccagcccaggcttaccagttcggtctccccgggcgtgaagcccagtctgccagccttggcggcaaaccattgcgccaccgcatcctttgggttggaatttgtgtcccaggtaagggcgacccgtttgtgcagaacccttcccgttttttcctttcctccgggtccttcccgcaactcgtcgattttgcgtttgacactggcattcacgaggatgcggaagcgcagccgctgacctgctgagaactggggatcgtattccttaacctggggaggggctgccaaaaatcccgtggcattctggaaagcccagtcccaatccggcggcagggacgactgcaccaaaaccatcgccctttgattttctccatcggtgttgttgtccacccgaaagaggaactggcgcttttcaaaatctgcggggtcaaagggctgcagaaacctcgggtctccttccttgcgcttgcgcatggggaaagccatgctgagccgccggtggacattatagatattgttcagccacaagcgcccgggccttggccggtcagggttgccgcctgtgtcgatgagcagttgggatagatacatcatccgttctcctccttcggatcgagtttgcgcctgcgctgctccagcgagcggaatttgattatttcctcgcgtttggccaagatgcgctcacgccaggcggggtcacagggatctatgcggtccatggtcatgccgctgccatattccagcatggtgcaggcatcgtggcagaggcggcagagggcgcgcaagtcctccggcttctcgctgcctccggcgcgtcggtaattcacgtgctgcacagtagtggcgggtgccttgcagaacatgcaggcggcattgtccatcaccaaacgctcagcgcggacccttttgtattcaggattgtcgtaatttgcccggttgcggggcggttgccaggctttgccggaaagcacggtctctgcctcgaagttgcggtccaatggcaggttacagcggatcaccagccggggcaagtggtggggaggctcaaaggacaccggcacgtcgtaatgcgcttcggcgttcggcggagcgtgcacgtcatcatgggccggaacccagtcgagcacacagggaacactgtcaggtatcggttcgcctttttccctcagttgcgccgggatcgaccgcaaagcctctttcagactggcataaaaccctggcgggtgttcatccaccggacgggaggggggacaggattttcgccccagataaagcgtccagactggttttttcagcgcttcagccagttgtgccacgatatccggttcaccctggagcgcaaccaggaagctggcatcagccaaatactcgcgtcgggagagcaaagccccgggtttggatttgatcttgtccgcgcccaggtttttggccagggcagtgccaaccagaactaggccgttgggcattttcaggtcagaaatgcgcagcttctgctccgctcccacagtatggtaatcccaccagcggatgcccgggcggtctatccgcacccccatgcgcaatttggcaatttcacccagccaatactgtccggcttcggcccggctgattcccagggcagcgcagagcaggcctgccactccggatttggtgggcgcgtcggctgtcctgcgcacggcgaatttggcctcattgcttccccaggcctgaaggggagcctccaatctcaggaacagggtattaggcggagaagacatttcaactctctactttctcgttttttacatcatcccattcaaaacccaacatctcaactgcttcgcgaacaagttctagcaggttgcaaactggctttatgtccagcgtgccctgttgaggctttaggggataacgtccattgggcgagaaccacagagcgttgcctttcatctgtccagggaagaaaccggcacttatatccttcacatagttggccagttggccaatgctttgttctaccaagtcagaatccttaacgattcccaccggtcgcacaaaggcatttgcatagctgacaggtgtctcttttatttctaccaatattccatcgggaaggttatgtgcggcaaagctgttctgctttccgctgggattagtgagtgcagcggcctggataaaggctccgacagtatgagctgccaacttttcattaccctggaggttgattatcaaggtattccaatcaattgagtaatatttgtagaaacaggccgaagcaaacatcgcctcgtctatgaatccagcacctgtgtcgtcgccaggctcgtcatcagctgctacatagtaatctatttctgggcgggcgatgtgggttgaaatggcgtgcgacacctgcagggctgcttcaacagtggtattttcccacttgaccttgtctgtgttcttgtccttggtatcgggctcgagcattcttccgcacagagcgatgtcaggggaatgtattgcccccgatattacatctgccgctttcttggctttctctgcaacactcaggccttcgctggtgacaatttgagcaagggcatcgatcttgttccgggtcatgaacaccagcatcttactatgtccgttttcgtgtttcaaaccggctttgttcagaacttcctctgcctgattcctgcagtcctgtcctgtagcttttgtaatcaactcggccaaccgacgggtacggatacccccgagcaagtttttgaattcatcgctcatcctgatgctccgctttaggcactggctggagatgcgggaccgcaacaccccaccgaaataacaggtcttgggcgcgcccaggtcgtcccggttcaggttggccgggctgtggttttggatcatgtgtatttcaatcaacatttgattcctccttgctgattattaaatgctgaaataaatgtgtctgaccatatcgctctgtttgattcccgttcccaagcggagaggtcatcgatgagggcaacccagtccagactggcaatgtcatgtctttttaaaatcgcgagcacttgcgccagcggttcctccagttggttcaactcgagcgtgagcaagcggtcgaacctggctaaaacacgtgggaactctttttcttctttaagtccacggcatattctgcccatgagccaaggcaggctggcgcctttcttttgctcaaagcggaattccgcgaaaagcttggtgactagccagaccaccttccgcctgggggttttggggcttatactgcggagtggccaccacaggccggaaaacaggtcgaaacccggcagggattcatccagacggcgacccctgagctttctgagcaagcccaggtcgccctctttgagttcgcccaggctccgaacaaatttcacggtgctctcattcattatcgcctccggatgaaggttttttaattgattttggttttaggggccagggcttgcgccgagccagttgttctcgttcaagcttggcggcaaccgtaatttccggcactagagaaacggcaaaacgcttcatgaagaatccgtaatcttcatccgcttcctgccagacattgccgctgttttccaccatctcgcccgaatggacgtcaacccgatgctctacgtgcgggatgatgtccgccacggcggtgattcccacggattccttgtaatcgccccggcggtcttgtttcctcatcctgtgcagggagtaggctctttcggatatctggtccagcagttcctcggagcttgtttttccggatagggcaatggtcttttcccaaacgtccacacatttggcttgaacgcttgtgaagcccactaaaaacagcgtggcggtccgagacatgcctttcgcccgtaagaagccgaccaggggtttatgccaatccctgttagcgaaagtgtatttgtccccggacatcagagccacctgggcagtcaggccattattgtcatcccggtaaatcgcgtgagggtcgttccagacaaggttcggaggcactttcaccgcctcattgttgcaggcatagaccagaggctcatgctcttctccgcaggcgctgcattttgctccgtctgacaccgggccaagcaggaataccttgcggggcagccaggtgaggccagtcagcaaggctacatccttctcgttttgggatccaaacgggttcagccaggcaggaacacccaaccgggaagtgggttcccaattcaggaatatcgattccgacagactatcaccctgccagatggcatagaagggaggagttctgttgatgccggctccgattccgctgccgcctacggtggtaaagagtggcaggcgcagcagaccggtaacgcagcaagctgggcaaatgccatcgatgaaatcggtcacatggcggaagtgccagaaattgtttgccgtgggaagctcgtggataaggtccgtgctggggcgtattctggatgttcctggggattggtagaatctggggccatcaccgaacaattcgaaatattcttggttttgttcaagccagtccgtccatgcctgaggcagtggcttatctgataccggcgcttgttttgtattggcaaaacaccaatagcccagggcgaggaggaaacggaaaacggacatgcggtccatcggattgccgtaagccaaacgcagtgtgtgtgcttttcgcaggacctcagccaggccgagcctggcagaatgcccgtcaagctgtagcacactgatccagggtttgtctgtcaaattataatacattgaagctcctgtcgcatggggagggttgatagcttgttgatcctttacagaggccgttccacaggctaacatcattatgccccatagctattatacaccaaatttaccaaggaataatttgtcaagtccaaaatagggctctaatttcaaacttccttaaggccggcaaggtcagattcacaaattcacaaccggtaaatatggcttgtgaatccgtgtgttattgtggcacagtgagttgggggacaaattcacaaaatacgcttatctcttatatccagccggaccaggggagaatgccggtttgcagtggctcatgccgcaaacaagagatgaagggaaggtagagatgatataatatcaatatataataatatataatactattatatattatatatactatttctatatgtattatagactggtagcgtggatacatcatatcctgtttacaatcggcttccgcggatgtataagagaccccttttttgtgaattagcctcataattacccgtctatcagcaggttgcaaattcacaagccatatttaccggttgtgaatttgtgaatttgccttccaacgttggtgagcctggagtgcagcgagcttgcgagtatggactacaggagatgttgctggcgtccatgctcgtgcctcgctcgacgccagcgtcaggaaggtcgatgtccccgtcggccaatcgttctgggaccttcgggctccaaa

SEQ ID NO: 757 - DNA, 7010 bp, Artificial Sequence
  Synthetic Oligonucleotide
tttggagcccgaaggtcccagaacgattggccgacggggacatcgaccttcctgacgctggcgtcgagcgaggcacgagcatggacgccagcaacatctcctgtagtccatactcgcaagctcgctgcactccaggctcaccaacgttggaaggcaaattcacaaattcacaaccggtaaatatggcttgtgaatttgcaacctgctgatagacgggtaattatgaggctaattcacaaaaaaggggtctcttatacatccgcggaagccgattgtaaacaggatatgatgtatccacgctaccagtctataatacatatagaaatagtatatataatatataatagtattatatattattatatattgatattatatcatctctaccttcccttcatctcttgtttgcggcatgagccactgcaaaccggcattctcccctggtccggctggatataagagataagcgtattttgtgaatttgtcccccaactcactgtgccacaataacacacggattcacaagccatatttaccggttgtgaatttgtgaatctgaccttgccggccttaaggaagtttgaaattagagccctattttggacttgacaaattattccttggtaaatttggtgtataatagctatggggcataatgatgttagcctgtggaacggcctctgtaaaggatcaacaagctatcaaccctccccatgcgacaggagcttcaatgtattataatttgacagacaaaccctggatcagtgtgctacagcttgacgggcattctgccaggctcggcctggctgaggtcctgcgaaaagcacacacactgcgtttggcttacggcaatccgatggaccgcatgtccgttttccgtttcctcctcgccctgggctattggtgttttgccaatacaaaacaagcgccggtatcagataagccactgcctcaggcatggacggactggcttgaacaaaaccaagaatatttcgaattgttcggtgatggccccagattctaccaatccccaggaacatccagaatacgccccagcacggaccttatccacgagcttcccacggcaaacaatttctggcacttccgccatgtgaccgatttcatcgatggcatttgcccagcttgctgcgttaccggtctgctgcgcctgccactctttaccaccgtaggcggcagcggaatcggagccggcatcaacagaactcctcccttctatgccatctggcagggtgatagtctgtcggaatcgatattcctgaattgggaacccacttcccggttgggtgttcctgcctggctgaacccgtttggatcccaaaacgagaaggatgtagccttgctgactggcctcacctggctgccccgcaaggtattcctgcttggcccggtgtcagacggagcaaaatgcagcgcctgcggagaagagcatgagcctctggtctatgcctgcaacaatgaggcggtgaaagtgcctccgaaccttgtctggaacgaccctcacgcgatttaccgggatgacaataatggcctgactgcccaggtggctctgatgtccggggacaaatacactttcgctaacagggattggcataaacccctggtcggcttcttacgggcgaaaggcatgtctcggaccgccacgctgtttttagtgggcttcacaagcgttcaagccaaatgtgtggacgtttgggaaaagaccattgccctatccggaaaaacaagctccgaggaactgctggaccagatatccgaaagagcctactccctgcacaggatgaggaaacaagaccgccggggcgattacaaggaatccgtgggaatcaccgccgtggcggacatcatcccgcacgtagagcatcgggttgacgtccattcgggcgagatggtggaaaacagcggcaatgtctggcaggaagcggatgaagattacggattcttcatgaagcgttttgccgtttctctagtgccggaaattacggttgccgccaagcttgaacgagaacaactggctcggcgcaagccctggcccctaaaaccaaaatcaattaaaaaaccttcatccggaggcgataatgaatgagagcaccgtgaaatttgttcggagcctgggcgaactcaaagagggcgacctgggcttgctcagaaagctcaggggtcgccgtctggatgaatccctgccgggtttcgacctgttttccggcctgtggtggccactccgcagtataagccccaaaacccccaggcggaaggtggtctggctagtcaccaagcttttcgcggaattccgctttgagcaaaagaaaggcgccagcctgccttggctcatgggcagaatatgccgtggacttaaagaagaaaaagagttcccacgtgttttagccaggttcgaccgcttgctcacgctcgagttgaaccaactggaggaaccgctggcgcaagtgctcgcgattttaaaaagacatgacattgccagtctggactgggttgccctcatcgatgacctctccgcttgggaacgggaatcaaacagagcgatatggtcagacacatttatttcagcatttaataatcagcaaggaggaatcaaatgttgattgaaatacacatgatccaaaaccacagcccggccaacctgaaccgggacgacctgggcgcgcccaagacctgttatttcggtggggtgttgcggtcccgcatctccagccagtgcctaaagcggagcatcaggatgagcgatgaattcaaaaacttgctcgggggtatccgtacccgtcggttggccgagttgattacaaaagctacaggacaggactgcaggaatcaggcagaggaagttctgaacaaagccggtttgaaacacgaaaacggacatagtaagatgctggtgttcatgacccggaacaagatcgatgcccttgctcaaattgtcaccagcgaaggcctgagtgttgcagagaaagccaagaaagcggcagatgtaatatcgggggcaatacattcccctgacatcgctctgtgcggaagaatgctcgagcccgataccaaggacaagaacacagacaaggtcaagtgggaaaataccactgttgaagcagccctgcaggtgtcgcacgccatttcaacccacatcgcccgcccagaaatagattactatgtagcagctgatgacgagcctggcgacgacacaggtgctggattcatagacgaggcgatgtttgcttcggcctgtttctacaaatattactcaattgattggaataccttgataatcaacctccagggtaatgaaaagttggcagctcatactgtcggagcctttatccaggccgctgcactcactaatcccagcggaaagcagaacagctttgccgcacataaccttcccgatggaatattggtagaaataaaagagacacctgtcagctatgcaaatgcctttgtgcgaccggtgggaatcgttaaggattctgacttggtagaacaaagcattggccaactggccaactatgtgaaggatataagtgccggtttcttccctggacagatgaaaggcaacgctctgtggttctcgcccaatggacgttatcccctaaagcctcaacagggcacgctggacataaagccagtttgcaacctgctagaacttgttcgcgaagcagttgagatgttgggttttgaatgggatgatgtaaaaaacgagaaagtagagagttgaaatgtcttctccgcctaataccctgttcctgagattggaggctccccttcaggcctggggaagcaatgaggccaaattcgccgtgcgcaggacagccgacgcgcccaccaaatccggagtggcaggcctgctctgcgctgccctgggaatcagccgggccgaagccggacagtattggctgggtgaaattgccaaattgcgcatgggggtgcggatagaccgcccgggcatccgctggtgggattaccatactgtgggagcggagcagaagctgcgcatttctgacctgaaaatgcccaacggcctagttctggttggcactgccctggccaaaaacctgggcgcggacaagatcaaatccaaacccggggctttgctctcccgacgcgagtatttggctgatgccagcttcctggttgcgctccagggtgaaccggatatcgtggcacaactggctgaagcgctgaaaaaaccagtctggacgctttatctggggcgaaaatcctgtcccccctcccgtccggtggatgaacacccgccagggttttatgccagtctgaaagaggctttgcggtcgatcccggcgcaactgagggaaaaaggcgaaccgatacctgacagtgttccctgtgtgctcgactgggttccggcccatgatgacgtgcacgctccgccgaacgccgaagcgcattacgacgtgccggtgtcctttgagcctccccaccacttgccccggctggtgatccgctgtaacctgccattggaccgcaacttcgaggcagagaccgtgctttccggcaaagcctggcaaccgccccgcaaccgggcaaattacgacaatcctgaatacaaaagggtccgcgctgagcgtttggtgatggacaatgccgcctgcatgttctgcaaggcacccgccactactgtgcagcacgtgaattaccgacgcgccggaggcagcgagaagccggaggacttgcgcgccctctgccgcctctgccacgatgcctgcaccatgctggaatatggcagcggcatgaccatggaccgcatagatccctgtgaccccgcctggcgtgagcgcatcttggccaaacgcgaggaaataatcaaattccgctcgctggagcagcgcaggcgcaaactcgatccgaaggaggagaacggatgatgtatctatcccaactgctcatcgacacaggcggcaaccctgaccggccaaggcccgggcgcttgtggctgaacaatatctataatgtccaccggcggctcagcatggctttccccatgcgcaagcgcaaggaaggagacccgaggtttctgcagccctttgaccccgcagattttgaaaagcgccagttcctctttcgggtggacaacaacaccgatggagaaaatcaaagggcgatggttttggtgcagtcgtccctgccgccggattgggactgggctttccagaatgccacgggatttttggcagcccctccccaggttaaggaatacgatccccagttctcagcaggtcagcggctgcgcttccgcatcctcgtgaatgccagtgtcaaacgcaaaatcgacgagttgcgggaaggacccggaggaaaggaaaaaacgggaagggttctgcacaaacgggtcgcccttacctgggacacaaattccaacccaaaggatgcggtggcgcaatggtttgccgccaaggctggcagactgggcttcacgcccggggagaccgaactggtaagcctgggctgggtatacggttccaaaccggagccccggggaaattcgccccggcgtgagaacgaataccgtcccctgagataccgttccgccctgctggaaggttatctgacagtggatgatgcctttctgttccgggaagccttggaaaaaggtatcggcagcgccaaaggaatgggcttcggcctcctttccgtggttccggcaagtgatgcgtaacagagaccttcacctaatgccaaaaatgcgggaccgcttcacctatctctatgtggagcatgccaaaatagacaaagaacaacaggcaatcgcctttcacgatgccatgggctccactcctgttccctgcgctggactggccctgctgatgctggggccaggcgtatccatcacccatgcggccatccttgttttagcagaatgcggctgtttggtggcttgggtgggggaacagggagtccgcttttactcatccgggacagggaccacccgtagttccgccaaccttatgcgtcaggctgccgcctggtcaaatcgagatacgcatctgcggatagttcgcagaatgtatgaattgaggttcaaggaaaaactggacccaaccctctctcttgaacagataaggggaaaagagggagcgagagtacgggatacctatttcagactttcaaaagaattcgatgtgcccatgagtgcgaggaattacgacaggagcaactggaataaaaccgaccccatcaacagagccctgtccgttgccaattcctgtctctatggcatctgccacgccgcgatagtggccgctggctattcacctgccctgggtttcgttcatactggcaaacaactgtcatttgtttatgacattgccgatctttataaaatggaaacctccgtgcccgcggctttcatagccacagccgcaggggtcgataacctggacagaaggacacgcattgcctgccgtgaccagttctatcaatttggtctgctaaagaagatagtggccgacattcacgcccttttcggtattctggaaacttcggacgatgagccagaccttgctgatgtcgatccagccgtgccaggcgggctttggaacccagatgataaagtgagccccggcggcttgtcatggggtctggatgatcctggaggccatgatgatggttctggtgcttgaaaaagttccctctggcctgagaggagaaattacacgctggctcctcgaaatcaaggctggagtatttgtcggtcaggtatcggccatgataagggaaaagctgtgggacaaggccaggtctggttgtgccggtggaacttgtatcatgatttacagcaagcattgcgaacaaggctttggaattgagttttggggtgccgcggaaaggatagtgacagaatgggaaggattgaaattgatgaccaagcatccgtgatccatacttgaagcctgttcaatggcctcaaagcgtctactttcgaagtgtgttccccacctgcgtgggggtgaaccgacggcagtccccta

SEQ ID NO: 758 - DNA, 7004 bp, Artificial Sequence
  Synthetic Oligonucleotide
caagcttacggttcacccccacgcaggtggggaacacacttcgaaagtagacgctttgaggccattgaacaggcttcaagtatggatcacggatgcttggtcatcaatttcaatccttcccattctgtcactatcctttccgcggcaccccaaaactcaattccaaagccttgttcgcaatgcttgctgtaaatcatgatacaagttccaccggcacaaccagacctggccttgtcccacagcttttcccttatcatggccgatacctgaccgacaaatactccagccttgatttcgaggagccagcgtgtaatttctcctctcaggccagagggaactttttcaagcaccagaaccatcatcatggcctccaggatcatccagaccccatgacaagccgccggggctcactttatcatctgggttccaaagcccgcctggcacggctggatcgacatcagcaaggtctggctcatcgtccgaagtttccagaataccgaaaagggcgtgaatgtcggccactatcttctttagcagaccaaattgatagaactggtcacggcaggcaatgcgtgtccttctgtccaggttatcgacccctgcggctgtggctatgaaagccgcgggcacggaggtttccattttataaagatcggcaatgtcataaacaaatgacagttgtttgccagtatgaacgaaacccagggcaggtgaatagccagcggccactatcgcggcgtggcagatgccatagagacaggaattggcaacggacagggctctgttgatggggtcggttttattccagttgctcctgtcgtaattcctcgcactcatgggcacatcgaattcttttgaaagtctgaaataggtatcccgtactctcgctccctcttttccccttatctgttcaagagagagggttgggtccagtttttccttgaacctcaattcatacattctgcgaactatccgcagatgcgtatctcgatttgaccaggcggcagcctgacgcataaggttggcggaactacgggtggtccctgtcccggatgagtaaaagcggactccctgttcccccacccaagccaccaaacagccgcattctgctaaaacaaggatggccgcatgggtgatggatacgcctggccccagcatcagcagggccagtccagcgcagggaacaggagtggagcccatggcatcgtgaaaggcgattgcctgttgttctttgtctattttggcatgctccacatagagataggtgaagcggtcccgcatttttggcattaggtgaaggtctctgttacgcatcacttgccggaaccacggaaaggaggccgaagcccattcctttggcgctgccgatacctttttccaaggcttcccggaacagaaaggcatcatccactgtcagataaccttccagcagggcggaacggtatctcaggggacggtattcgttctcacgccggggcgaatttccccggggctccggtttggaaccgtatacccagcccaggcttaccagttcggtctccccgggcgtgaagcccagtctgccagccttggcggcaaaccattgcgccaccgcatcctttgggttggaatttgtgtcccaggtaagggcgacccgtttgtgcagaacccttcccgttttttcctttcctccgggtccttcccgcaactcgtcgattttgcgtttgacactggcattcacgaggatgcggaagcgcagccgctgacctgctgagaactggggatcgtattccttaacctggggaggggctgccaaaaatcccgtggcattctggaaagcccagtcccaatccggcggcagggacgactgcaccaaaaccatcgccctttgattttctccatcggtgttgttgtccacccgaaagaggaactggcgcttttcaaaatctgcggggtcaaagggctgcagaaacctcgggtctccttccttgcgcttgcgcatggggaaagccatgctgagccgccggtggacattatagatattgttcagccacaagcgcccgggccttggccggtcagggttgccgcctgtgtcgatgagcagttgggatagatacatcatccgttctcctccttcggatcgagtttgcgcctgcgctgctccagcgagcggaatttgattatttcctcgcgtttggccaagatgcgctcacgccaggcggggtcacagggatctatgcggtccatggtcatgccgctgccatattccagcatggtgcaggcatcgtggcagaggcggcagagggcgcgcaagtcctccggcttctcgctgcctccggcgcgtcggtaattcacgtgctgcacagtagtggcgggtgccttgcagaacatgcaggcggcattgtccatcaccaaacgctcagcgcggacccttttgtattcaggattgtcgtaatttgcccggttgcggggcggttgccaggctttgccggaaagcacggtctctgcctcgaagttgcggtccaatggcaggttacagcggatcaccagccggggcaagtggtggggaggctcaaaggacaccggcacgtcgtaatgcgcttcggcgttcggcggagcgtgcacgtcatcatgggccggaacccagtcgagcacacagggaacactgtcaggtatcggttcgcctttttccctcagttgcgccgggatcgaccgcaaagcctctttcagactggcataaaaccctggcgggtgttcatccaccggacgggaggggggacaggattttcgccccagataaagcgtccagactggttttttcagcgcttcagccagttgtgccacgatatccggttcaccctggagcgcaaccaggaagctggcatcagccaaatactcgcgtcgggagagcaaagccccgggtttggatttgatcttgtccgcgcccaggtttttggccagggcagtgccaaccagaactaggccgttgggcattttcaggtcagaaatgcgcagcttctgctccgctcccacagtatggtaatcccaccagcggatgcccgggcggtctatccgcacccccatgcgcaatttggcaatttcacccagccaatactgtccggcttcggcccggctgattcccagggcagcgcagagcaggcctgccactccggatttggtgggcgcgtcggctgtcctgcgcacggcgaatttggcctcattgcttccccaggcctgaaggggagcctccaatctcaggaacagggtattaggcggagaagacatttcaactctctactttctcgttttttacatcatcccattcaaaacccaacatctcaactgcttcgcgaacaagttctagcaggttgcaaactggctttatgtccagcgtgccctgttgaggctttaggggataacgtccattgggcgagaaccacagagcgttgcctttcatctgtccagggaagaaaccggcacttatatccttcacatagttggccagttggccaatgctttgttctaccaagtcagaatccttaacgattcccaccggtcgcacaaaggcatttgcatagctgacaggtgtctcttttatttctaccaatattccatcgggaaggttatgtgcggcaaagctgttctgctttccgctgggattagtgagtgcagcggcctggataaaggctccgacagtatgagctgccaacttttcattaccctggaggttgattatcaaggtattccaatcaattgagtaatatttgtagaaacaggccgaagcaaacatcgcctcgtctatgaatccagcacctgtgtcgtcgccaggctcgtcatcagctgctacatagtaatctatttctgggcgggcgatgtgggttgaaatggcgtgcgacacctgcagggctgcttcaacagtggtattttcccacttgaccttgtctgtgttcttgtccttggtatcgggctcgagcattcttccgcacagagcgatgtcaggggaatgtattgcccccgatattacatctgccgctttcttggctttctctgcaacactcaggccttcgctggtgacaatttgagcaagggcatcgatcttgttccgggtcatgaacaccagcatcttactatgtccgttttcgtgtttcaaaccggctttgttcagaacttcctctgcctgattcctgcagtcctgtcctgtagcttttgtaatcaactcggccaaccgacgggtacggatacccccgagcaagtttttgaattcatcgctcatcctgatgctccgctttaggcactggctggagatgcgggaccgcaacaccccaccgaaataacaggtcttgggcgcgcccaggtcgtcccggttcaggttggccgggctgtggttttggatcatgtgtatttcaatcaacatttgattcctccttgctgattattaaatgctgaaataaatgtgtctgaccatatcgctctgtttgattcccgttcccaagcggagaggtcatcgatgagggcaacccagtccagactggcaatgtcatgtctttttaaaatcgcgagcacttgcgccagcggttcctccagttggttcaactcgagcgtgagcaagcggtcgaacctggctaaaacacgtgggaactctttttcttctttaagtccacggcatattctgcccatgagccaaggcaggctggcgcctttcttttgctcaaagcggaattccgcgaaaagcttggtgactagccagaccaccttccgcctgggggttttggggcttatactgcggagtggccaccacaggccggaaaacaggtcgaaacccggcagggattcatccagacggcgacccctgagctttctgagcaagcccaggtcgccctctttgagttcgcccaggctccgaacaaatttcacggtgctctcattcattatcgcctccggatgaaggttttttaattgattttggttttaggggccagggcttgcgccgagccagttgttctcgttcaagcttggcggcaaccgtaatttccggcactagagaaacggcaaaacgcttcatgaagaatccgtaatcttcatccgcttcctgccagacattgccgctgttttccaccatctcgcccgaatggacgtcaacccgatgctctacgtgcgggatgatgtccgccacggcggtgattcccacggattccttgtaatcgccccggcggtcttgtttcctcatcctgtgcagggagtaggctctttcggatatctggtccagcagttcctcggagcttgtttttccggatagggcaatggtcttttcccaaacgtccacacatttggcttgaacgcttgtgaagcccactaaaaacagcgtggcggtccgagacatgcctttcgcccgtaagaagccgaccaggggtttatgccaatccctgttagcgaaagtgtatttgtccccggacatcagagccacctgggcagtcaggccattattgtcatcccggtaaatcgcgtgagggtcgttccagacaaggttcggaggcactttcaccgcctcattgttgcaggcatagaccagaggctcatgctcttctccgcaggcgctgcattttgctccgtctgacaccgggccaagcaggaataccttgcggggcagccaggtgaggccagtcagcaaggctacatccttctcgttttgggatccaaacgggttcagccaggcaggaacacccaaccgggaagtgggttcccaattcaggaatatcgattccgacagactatcaccctgccagatggcatagaagggaggagttctgttgatgccggctccgattccgctgccgcctacggtggtaaagagtggcaggcgcagcagaccggtaacgcagcaagctgggcaaatgccatcgatgaaatcggtcacatggcggaagtgccagaaattgtttgccgtgggaagctcgtggataaggtccgtgctggggcgtattctggatgttcctggggattggtagaatctggggccatcaccgaacaattcgaaatattcttggttttgttcaagccagtccgtccatgcctgaggcagtggcttatctgataccggcgcttgttttgtattggcaaaacaccaatagcccagggcgaggaggaaacggaaaacggacatgcggtccatcggattgccgtaagccaaacgcagtgtgtgtgcttttcgcaggacctcagccaggccgagcctggcagaatgcccgtcaagctgtagcacactgatccagggtttgtctgtcaaattataatacattgaagctcctgtcgcatggggagggttgatagcttgttgatcctttacagaggccgttccacaggctaacatcattatgccccatagctattatacaccaaatttaccaaggaataatttgtcaagtccaaaatagggctctaatttcaaacttccttaaggccggcaaggtcagattcacaaattcacaaccggtaaatatggcttgtgaatccgtgtgttattgtggcacagtgagttgggggacaaattcacaaaatacgcttatctcttatatccagccggaccaggggagaatgccggtttgcagtggctcatgccgcaaacaagagatgaagggaaggtagagatgatataatatcaatatataataatatataatactattatatattatatatactatttctatatgtattatagactggtagcgtggatacatcatatcctgtttacaatcggcttccgcggatgtataagagaccccttttttgtgaattagcctcataattacccgtctatcagcaggttgcaaattcacaagccatatttaccggttgtgaatttgtgaatttgccttccaacgttggtgagcctggagtgcagcgagcttgcgagtatggactacaggagatgttgctggcgtccatgctcgtgcctcgctcgacgccagcgtcaggaaggtcgatgtccccgtcggccaatcgttctgggaccttcgggctccaaa

SEQ ID NO: 759 - DNA, 6999 bp, Artificial Sequence
  Synthetic Oligonucleotide
aagatcccgtccgccgatgcgccggtcatcgactactaccccgagatgatggacgtggccgagggcgaggggccaaagccggggcggtttgcgcgggagaaggatcgggcgatcaccttccggcagctcatctgtaatacctcgggctacatgaagccgggcgagactcccggcacggtcttccactaccagaccttcggcatgaacatcctcacgcacgccatcgccaagcagtacggctactacgacagcgacgcccccgagggcctgccgggctttgggaggctcatggaggagaagatccgcgatcccatcggcgccacctggacgtgccgctacatgaacttcaaacatccgccggaggcgaagctcggaatcttcggctactatcacggcatcagcgccacggcacgcgacatggcccggctcggatggctgtggctgaacggcggcaggtggggcgagacccaggtcatccccgaggactggctgcggcaggcgacgcagacgggtccggacatcaaggagcactgcccggaggaggaatggaagtacgggcacggcttctgggtgaacgaccacgggaagctgtggcccgacctggcccgcgacgccttcgctgcacgaggcgccggcgggcagcacatctgcgtgttccccgggttgagccttgtggtcgtcatgagcctgtgtgaggagagcgatgggctactgccgcgcattatcgaagcctgcactggataaagcggcgcctcgtactcagaacctcgctggcgccaccgggcgggctgtccttgccgcctcgacggcggccagacacgcggcgacgttgcgggcgccctcgcggacgtccacgatgggcctggtgtcggtctgcaggcactccaggaagtggtccacctcggcccagaatgagtctttgagctcgggcaggggcggctcgcgccattggccgccctcgtcggcgtccgtgaacagcttcccgtccatgacggtgcctttgctgccatagacagtgatcttcatgctccccgcgccggacggtaggatcgcgccgtaggcgacgacgacccggccgatggcgccattgctcaggcgatacagcgcaacggtgaagtcgtcgtcgggaaactcctcgtacgccatgtggttgccgtagccgaaggcctcctcgacctcgcccccgagccatcgcaccatgtccaccgcgtggatgccagtgccgagcagcgctgcgcgaggatgctcgcggctggcgtaccacggcgagcgggcgaactggcggcgcttgtcggccaggtggtcggtgaccacgtggaacacggtgccgagcgtgccgtcctcaatgagctgtttggtgagcgcgggaatcggcgtgcgccggtagttctggcccaccatgagctgcatcccgctcttctcgacctcgtccacgagggttgccgcgtcgtggaggctggtgaccatgggcttctcaaggagcacgtggcactcgtggcgcagcgccgcgaggcactgctcgaggtgcagccagtcgggcgtggccacatcgacgatgtcgagcttctcggccctcagcatctcctcgtagtcggagtacccatttgctccggggtgctcctcgagcacggctttgaccttgtccccgtcaacgtcgcaaagggcgcagacctgcgccgcctcgttctgcgcgaatcccgccgcccgccgccgtccgagtccgagtccgatgatgccgacgcgtagtgtgctcatgatggtgtgcttgttcgaggaggcagcgcaggattcctcggttgggggagggaatggacaaggaatgccacagagatcgcagagcacacagagatgggggacggggcgaggtggagtgagctcggagtctcgtaaggtgtcgccggaacccgcttagcacgtcccccaagaacttcacagtgtaggtgtgcccccgggttgccagttctagaggagatgcaatgcaccgcgccgaatggcgcggcgacggcgggtgcgccgggagaccgcgccgcgcaaatccaggatgcgtcttcgtggggccaaggagggagaccggtgtgagctacaacctgcttgaagaacgctggattccggttctggggaccgatggcaaggcgggtcgcgagggcatcaaggccgcgctgacgcaggcgggcacgatccgccagatcgccgcgtcgaacccgatggacaatgtcagtctgctccgcctgctgctggcggtgctccagtggtgtaagcccaaggtgaggaaggaggaactggacacgctgcgcggtggcgggagcgggggtgtgccacaggactggctgaagaagctggagcgcaacaggggccggttcgagttgcttggcgacggcccgcggttctatcaggctgcctctgaagccaaggaacggccgaggtgggaggtgtccgtgctcttcgctgatctcccgggcggtacggagatcgagcattttcggcacgtgtacgaccgcgccgtcgcactgtgccccgcgtgctgtgcactggggctggcgggccttcccgcgtcagcgacggcgggcggctccggcctatcgccctccatcaacaacgcaccgcccatctacttcgtaccggcaggcgagacgctgctgcagaccctggtgctgaactggcccatgcaaagacaacccaacgatcacccggcatgggaggggggggagggctcagggacaacgatcggcgtcctcgaaggcctcacctggcagccacgtgccgtctggcttggaacgcccaccgacaggccggaacagacctgcgcccgctgtcgggccaccggattcctggtctccggtatggtgttcaagaagggtcgcaaacgcgcagacgacacccgcgactggcgcgacccccacgtcgcatgggacgatggtctggacagggacgacaaggctctgcggcctcctaacccgctcaggtactcaaggcgcgccgccatcttctggcgggacgaggcccgcgccattcttgagtcactgaatccgccgagtgacggtcccccggttgcggccgttgcgcacgcgatccaccgtctgcctgagcgctcgcccttgcgcatttgctgcttcaagccagccacgaagccgggtcagaagaaatggttcgatgaagacggggagacgtggcgcatctctcatggcctcctacgaaacacggagctgagggcccgggcgttggcggaactggagtgggtcggccgcctggacgtgcggtggatgcttcagagggcgctcccccgggaggccgaccaggtcaacgccgcgctaaccaacgccgccgccgggaccgaacagctcttgcgcaaacgcttcgagcaactcctggcggcattgggcgaggccgacgggcatgacgaagcccgccggtgcacacaggattggcgggagcgcgttgagagcgtgctccgagacgagctagacgaggcgtgtgccgttgtcgcggtgggctccccgctgcggcgacgcgaagccgccagacgggcgcagtgggcgctgggccaggcgatgaagaggctggcggcagacgaggccgagccttcgagcggggacgcccccggcaagtccaggaggcgccaggaaaagggaggcgagtcgtgacccagaccgaggcattcatccagcgattgcagtccctccaggccggtgagcagtcgcggctgcgccgtctcgccggccaaccgctggacgagacgctgccgggattcgacctcttcaccggcctgtggtggccgctgcggcagaggagcccggcggtgccgcgccgggagccgagttggctggttgccaaggtctttggggctttcccattgcccgacgcgccggcggcccggctggccagcgtgctcggccggtgtgagccacgggatgagctgggccgggaccgcttccgcgcccgcttcgactcgctgctgcagacgccgtcgtcgcgcctggagcggccgctgctatgggccctttcggtggcggcggatgtcgtcgctgctggccgagccaggggcatcgcctgggcacaactgctcgacgacctctccatctgggagcggggcgagcagcaccggcgcaggcgcgacgtgcgtgatgactgggctgagcagtatctcaaggctgtgtaccagccggaaaggagctgaccatgctgattgagatccacatgatccagaaccacagtccctcgaacctgaatcgggacgacctgggcgcgccgaagacgtgcctgttcggtggcgtgacccgcgcccgcatctccagccagtgcctgaaacgatcgattcgccgcagcccggagttcgagacagtgcttgagagcgaggggggcgtgcgcacgcggcgactcatcaccgttctcgcggagcgagtgcatggcgacccggacccgccaagcgaattgattgagttcatcgccaaggcgttcgagaaaggcggcgtcaaacggaccaagaggggtgaagagccggacaacaccaatatcttgttgttcgtccccgagtcatccatcgacagcatggcggataaggtaaggcaggagcaagctcagaagaaacctgatcatgaggcgcttgcgcaagccatcgccgagattcttggggcgtcggcctcggtacctgatatcgccctctccggacgcatgaccgagctggatacggcaggcctcttcgccagactcgacttgcgggtggaggcatcgctctccgcggcgcatgccatctcgacacacgcggtcatcaacgaggtagattacttcactgccgttgacgatctgggtacgggtgccggagccgggcacgtggacgaggccatgttcaactccgcctgcttctacaagtacttctgcctcgactgggaccagcttgtgcagaacctcgccgggccggagcccgaccaggacaaggcggatgaagcgaggcgtctggccgccgcgactctggggcacttcctccgcgccgccgccctcactacgcccaccggcaagcagaacagcttcgccgcccacaacccgcccgacggcatcctcgttgagatcaagaagaacggcaagacccccatgagctacgccaacgccttcgccgatccggtagacccggggtcgcaacgcggactggtgggccagagcctggcgcagttgggccaatacgtgcatgacatggccgacggctacggcattgaggcagagcgattctggttctccccctccgggcggcatccgctcatctgggtggaccgggacgccaaggccccggaggccgagaagcccaccgtgacgcccgaggaccgcaatctcaagtcgctcgacaagctggtcgaagtcgtggtcaaggccgcgaccggtgcgccatggtcccacgtcaaggacgccggaagggcccagtcggaggtgacctgacatgagcgcctccgcagccaacaccgtgttcctgcgcctcgagggtccgctccaggcgtggggggatgcgtcgaagttcgtgatgcggcgcaccgctgaggcccccaccaagtcgggcgtgctgggtctcatctgctgtgccatgggcctcccgcggcacgcggcgggcgagcgcctgcgggagctcaacgagctccgcatgggcgtacgcatcgaccggcccggcacccgctggtgggactatcacaccgtgggcgcccgctacgggctggtaaccgccgagggcaagatcaagagaacggcaagcaccggggagtacgaaacgctggtgagccggcgcgagtatctctgcgatgcgagcttcctcgtagcgcttcagggcgatgccgagcggatcgaggacattcgcgatgccttgcagaatccgaagtggccggtttttctgggccggaagtcgtgtccgccggccatgccgatcgccgcaggacaagaccattaccccgacctgttggcggcgttggcagatcaaccttggcggccacgctctcggaatgaggagcgacccgaagacgtgccttgcctgatcgaatggcgaccatcgcaagacgagtcaactgcccccgaggacgcggaggtgtggtacgacgcgccgaaatccttcgacccgcccgtccacgaggcgcgtctggtccagcgcatgcgagtcaaggtggatgtgggtgacccgatccagcgccgtactccgcccccgccccgggcccgggcggactacggcaacacagagtaccggcgccgacgcgaagagcgcctcgcccacgaccaccgcctctgcatcttctgcaagtcgcccgccaccaccgtccagcacgtaacctaccgccgggccggcggcggcgaaaccttcgacgacctgcgctcgctctgccggctctgccacgatgcggtgaccatgatcgagtacggcctgggcatgggcctggaccgcatcaacccggaggacccgcggtggcgcgaccggatcattgagaagcgcgacgagatcgtccagttccgttccctggcgacccgccggcggcgcctcagtgccgaggaggtggagtagacatgtacctgtcctgcctgttgatcgacgtcggtacgaaccccgaccggccgcgtccggcccgatcgtggctccggaaccgctaccgggtgcatcagcgcttgtgcatggcgtttccgtcggcgtctcgccggtccgaggatccgcagttcctcaaacccttcgatcctgaggacttcgcacggccggacgttcatgtcgctcgggcaaagaagggtggcttcctgttccgcatcgatccgcggtcgggcgcctccgtcccgatcctcgtacagtcggcaagcaagccggattgggactatgcgttccacaacgcgcggcacatgctccggtgtttcgatgttcgctccttctcaccggcgtatgctggcgccgacatgctgcggttccggctgcttgcgaatcccacgaagcgcctccgggcggactccatcggccctgatgggggaccgattgagaagcaatgggtcggc

SEQ ID NO: 760 - DNA, 6989 bp, Artificial Sequence
  Synthetic Oligonucleotide
gaacggcagtttcgaggctaccggttcacccccacgcaggtggggaacacacttcgaaagtagacgctttgaggccattgaacaggcttcaagtatggatcacggatgcttggtcatcaatttcaatccttcccattctgtcactatcctttccgcggcaccccaaaactcaattccaaagccttgttcgcaatgcttgctgtaaatcatgatacaagttccaccggcacaaccagacctggccttgtcccacagcttttcccttatcatggccgatacctgaccgacaaatactccagccttgatttcgaggagccagcgtgtaatttctcctctcaggccagagggaactttttcaagcaccagaaccatcatcatggcctccaggatcatccagaccccatgacaagccgccggggctcactttatcatctgggttccaaagcccgcctggcacggctggatcgacatcagcaaggtctggctcatcgtccgaagtttccagaataccgaaaagggcgtgaatgtcggccactatcttctttagcagaccaaattgatagaactggtcacggcaggcaatgcgtgtccttctgtccaggttatcgacccctgcggctgtggctatgaaagccgcgggcacggaggtttccattttataaagatcggcaatgtcataaacaaatgacagttgtttgccagtatgaacgaaacccagggcaggtgaatagccagcggccactatcgcggcgtggcagatgccatagagacaggaattggcaacggacagggctctgttgatggggtcggttttattccagttgctcctgtcgtaattcctcgcactcatgggcacatcgaattcttttgaaagtctgaaataggtatcccgtactctcgctccctcttttccccttatctgttcaagagagagggttgggtccagtttttccttgaacctcaattcatacattctgcgaactatccgcagatgcgtatctcgatttgaccaggcggcagcctgacgcataaggttggcggaactacgggtggtccctgtcccggatgagtaaaagcggactccctgttcccccacccaagccaccaaacagccgcattctgctaaaacaaggatggccgcatgggtgatggatacgcctggccccagcatcagcagggccagtccagcgcagggaacaggagtggagcccatggcatcgtgaaaggcgattgcctgttgttctttgtctattttggcatgctccacatagagataggtgaagcggtcccgcatttttggcattaggtgaaggtctctgttacgcatcacttgccggaaccacggaaaggaggccgaagcccattcctttggcgctgccgatacctttttccaaggcttcccggaacagaaaggcatcatccactgtcagataaccttccagcagggcggaacggtatctcaggggacggtattcgttctcacgccggggcgaatttccccggggctccggtttggaaccgtatacccagcccaggcttaccagttcggtctccccgggcgtgaagcccagtctgccagccttggcggcaaaccattgcgccaccgcatcctttgggttggaatttgtgtcccaggtaagggcgacccgtttgtgcagaacccttcccgttttttcctttcctccgggtccttcccgcaactcgtcgattttgcgtttgacactggcattcacgaggatgcggaagcgcagccgctgacctgctgagaactggggatcgtattccttaacctggggaggggctgccaaaaatcccgtggcattctggaaagcccagtcccaatccggcggcagggacgactgcaccaaaaccatcgccctttgattttctccatcggtgttgttgtccacccgaaagaggaactggcgcttttcaaaatctgcggggtcaaagggctgcagaaacctcgggtctccttccttgcgcttgcgcatggggaaagccatgctgagccgccggtggacattatagatattgttcagccacaagcgcccgggccttggccggtcagggttgccgcctgtgtcgatgagcagttgggatagatacatcatccgttctcctccttcggatcgagtttgcgcctgcgctgctccagcgagcggaatttgattatttcctcgcgtttggccaagatgcgctcacgccaggcggggtcacagggatctatgcggtccatggtcatgccgctgccatattccagcatggtgcaggcatcgtggcagaggcggcagagggcgcgcaagtcctccggcttctcgctgcctccggcgcgtcggtaattcacgtgctgcacagtagtggcgggtgccttgcagaacatgcaggcggcattgtccatcaccaaacgctcagcgcggacccttttgtattcaggattgtcgtaatttgcccggttgcggggcggttgccaggctttgccggaaagcacggtctctgcctcgaagttgcggtccaatggcaggttacagcggatcaccagccggggcaagtggtggggaggctcaaaggacaccggcacgtcgtaatgcgcttcggcgttcggcggagcgtgcacgtcatcatgggccggaacccagtcgagcacacagggaacactgtcaggtatcggttcgcctttttccctcagttgcgccgggatcgaccgcaaagcctctttcagactggcataaaaccctggcgggtgttcatccaccggacgggaggggggacaggattttcgccccagataaagcgtccagactggttttttcagcgcttcagccagttgtgccacgatatccggttcaccctggagcgcaaccaggaagctggcatcagccaaatactcgcgtcgggagagcaaagccccgggtttggatttgatcttgtccgcgcccaggtttttggccagggcagtgccaaccagaactaggccgttgggcattttcaggtcagaaatgcgcagcttctgctccgctcccacagtatggtaatcccaccagcggatgcccgggcggtctatccgcacccccatgcgcaatttggcaatttcacccagccaatactgtccggcttcggcccggctgattcccagggcagcgcagagcaggcctgccactccggatttggtgggcgcgtcggctgtcctgcgcacggcgaatttggcctcattgcttccccaggcctgaaggggagcctccaatctcaggaacagggtattaggcggagaagacatttcaactctctactttctcgttttttacatcatcccattcaaaacccaacatctcaactgcttcgcgaacaagttctagcaggttgcaaactggctttatgtccagcgtgccctgttgaggctttaggggataacgtccattgggcgagaaccacagagcgttgcctttcatctgtccagggaagaaaccggcacttatatccttcacatagttggccagttggccaatgctttgttctaccaagtcagaatccttaacgattcccaccggtcgcacaaaggcatttgcatagctgacaggtgtctcttttatttctaccaatattccatcgggaaggttatgtgcggcaaagctgttctgctttccgctgggattagtgagtgcagcggcctggataaaggctccgacagtatgagctgccaacttttcattaccctggaggttgattatcaaggtattccaatcaattgagtaatatttgtagaaacaggccgaagcaaacatcgcctcgtctatgaatccagcacctgtgtcgtcgccaggctcgtcatcagctgctacatagtaatctatttctgggcgggcgatgtgggttgaaatggcgtgcgacacctgcagggctgcttcaacagtggtattttcccacttgaccttgtctgtgttcttgtccttggtatcgggctcgagcattcttccgcacagagcgatgtcaggggaatgtattgcccccgatattacatctgccgctttcttggctttctctgcaacactcaggccttcgctggtgacaatttgagcaagggcatcgatcttgttccgggtcatgaacaccagcatcttactatgtccgttttcgtgtttcaaaccggctttgttcagaacttcctctgcctgattcctgcagtcctgtcctgtagcttttgtaatcaactcggccaaccgacgggtacggatacccccgagcaagtttttgaattcatcgctcatcctgatgctccgctttaggcactggctggagatgcgggaccgcaacaccccaccgaaataacaggtcttgggcgcgcccaggtcgtcccggttcaggttggccgggctgtggttttggatcatgtgtatttcaatcaacatttgattcctccttgctgattattaaatgctgaaataaatgtgtctgaccatatcgctctgtttgattcccgttcccaagcggagaggtcatcgatgagggcaacccagtccagactggcaatgtcatgtctttttaaaatcgcgagcacttgcgccagcggttcctccagttggttcaactcgagcgtgagcaagcggtcgaacctggctaaaacacgtgggaactctttttcttctttaagtccacggcatattctgcccatgagccaaggcaggctggcgcctttcttttgctcaaagcggaattccgcgaaaagcttggtgactagccagaccaccttccgcctgggggttttggggcttatactgcggagtggccaccacaggccggaaaacaggtcgaaacccggcagggattcatccagacggcgacccctgagctttctgagcaagcccaggtcgccctctttgagttcgcccaggctccgaacaaatttcacggtgctctcattcattatcgcctccggatgaaggttttttaattgattttggttttaggggccagggcttgcgccgagccagttgttctcgttcaagcttggcggcaaccgtaatttccggcactagagaaacggcaaaacgcttcatgaagaatccgtaatcttcatccgcttcctgccagacattgccgctgttttccaccatctcgcccgaatggacgtcaacccgatgctctacgtgcgggatgatgtccgccacggcggtgattcccacggattccttgtaatcgccccggcggtcttgtttcctcatcctgtgcagggagtaggctctttcggatatctggtccagcagttcctcggagcttgtttttccggatagggcaatggtcttttcccaaacgtccacacatttggcttgaacgcttgtgaagcccactaaaaacagcgtggcggtccgagacatgcctttcgcccgtaagaagccgaccaggggtttatgccaatccctgttagcgaaagtgtatttgtccccggacatcagagccacctgggcagtcaggccattattgtcatcccggtaaatcgcgtgagggtcgttccagacaaggttcggaggcactttcaccgcctcattgttgcaggcatagaccagaggctcatgctcttctccgcaggcgctgcattttgctccgtctgacaccgggccaagcaggaataccttgcggggcagccaggtgaggccagtcagcaaggctacatccttctcgttttgggatccaaacgggttcagccaggcaggaacacccaaccgggaagtgggttcccaattcaggaatatcgattccgacagactatcaccctgccagatggcatagaagggaggagttctgttgatgccggctccgattccgctgccgcctacggtggtaaagagtggcaggcgcagcagaccggtaacgcagcaagctgggcaaatgccatcgatgaaatcggtcacatggcggaagtgccagaaattgtttgccgtgggaagctcgtggataaggtccgtgctggggcgtattctggatgttcctggggattggtagaatctggggccatcaccgaacaattcgaaatattcttggttttgttcaagccagtccgtccatgcctgaggcagtggcttatctgataccggcgcttgttttgtattggcaaaacaccaatagcccagggcgaggaggaaacggaaaacggacatgcggtccatcggattgccgtaagccaaacgcagtgtgtgtgcttttcgcaggacctcagccaggccgagcctggcagaatgcccgtcaagctgtagcacactgatccagggtttgtctgtcaaattataatacattgaagctcctgtcgcatggggagggttgatagcttgttgatcctttacagaggccgttccacaggctaacatcattatgccccatagctattatacaccaaatttaccaaggaataatttgtcaagtccaaaatagggctctaatttcaaacttccttaaggccggcaaggtcagattcacaaattcacaaccggtaaatatggcttgtgaatccgtgtgttattgtggcacagtgagttgggggacaaattcacaaaatacgcttatctcttatatccagccggaccaggggagaatgccggtttgcagtggctcatgccgcaaacaagagatgaagggaaggtagagatgatataatatcaatatataataatatataatactattatatattatatatactatttctatatgtattatagactggtagcgtggatacatcatatcctgtttacaatcggcttccgcggatgtataagagaccccttttttgtgaattagcctcataattacccgtctatcagcaggttgcaaattcacaagccatatttaccggttgtgaatttgtgaatttgccttccaacgttggtgagcctggagtgcagcgagcttgcgagtatggactacaggagatgttgctggcgtccatgctcgtgcctcgctcgacgccagcgtcaggaaggtcgatgtccccgtcggcc

SEQ ID NO: 761 - DNA, 6987 bp, Artificial Sequence
  Synthetic Oligonucleotide
  misc_feature (1840)..(1849): n is a, c, g, or t
tgcatggggaagactctttctggccgatgaacgagaacgctgggaagcggttcagccccatgtgcatggggaagacgatgtttttctggttttgctactgctactcgaacggttcagccccatgtgcatggggaagacgcaatggtggctcgatcgaggccggcaatgccgtcggttcagccccatgtgcatggggaagactttttcacggtcaagccgccgctcccataagtcggttcagccccatgtgcatggggaagccatcaacatcttgtatgtgaatgggtctaggccactagggatagcccctcgataacgatcatctttcgggaagtgtcgccgtgggtgcggattgtgaatccttgctcgcacggcgagctccatgcttggaggcaacttccgccgcgacagccggcgacggctttttcccaaagtttgtcacggaggcgggctgtcatacggccgaggaatatcccggccttcggttcgatcatccaacggctcaggtcgcccctgaggcccggcgggacgcgctccagaatcatcacgaccatataaaatctcctcgatgtcgggaagtattttttccagcagacgtgtatcgtggaacaggtcgcggctgcccatgcgtgcccgctgttccacgctgttttcgctataggcgacgacctcaaacgccattggcacgatcaagtcaactttgtacaaatcggcgatgtcgtagacgaacgagagggctttgccggtgtggataaagccaatggcgggggagtagccggcggtgacgatggcggcatgaacgatgccgtgcaagcaggcgttggcggccgacagggcacgattgagtggatcggctttgtcccagttgtttgggtcatagttgcgtccttcccattttaggttgaacttctcggccgcctggcggtaggcgttgcggacacgatggccttctcgcccgcgaatctgctccaatgtcaggccgggttcgaggggttgtccgaatcgtttttcatacattcttcggaccactagggcacgggtgcgaagattgcaatacaactcggcttggcgcaggagtttcgcggagtgatacgtgccgccgcggccgaagctgtagaagcgcgtgccctcgtcgccgcaccatgccaccagacagttgcagtcggccagattgcggatggcggcgtgggtgatgctggtgcccggtccgagcatcaacaaggccaggttcgccgccgggatgggcacggtttccttttcggtaacgtaggcgacggaggtttgatgctgctcgatgcggcatttttcgagataaagataggtaatccgatcctcgaagcgggccagttcgtggagattattcattgcttcaccctgcctagactgagcaatccgaaaccgaaggccttggccggcccgacgccttggatcagcgttttgcggaattggttgcaatcagtcacggtcaacaggccgtcgtatcgcgcggcaaagaggcgttgtccgccgccggtggcgtttttgctggcatggaggggatttttgttgacatagacatagcccgtttgtaccacgacagagttttcaacggggcagaacccagagggaacattttttttgggagtccattgcgcaagccattcacagagtttgtcagggaaaacggggactcgttttcccacccacctttcggcaacgggttgaccatctcttccgagcgatttctcgtgcaagcgtcgcgtcggattggcaaccagtcggaatcgcagacgttcgcccgcagtaaaaataggatcaaaatgcttgatctcgggagcagcggcgagaaaatgtcgcgcannnnnnnnnngtcgcgcattgtggaaggcgtaatcccagtccggctcgacggccgactggacgataatcatcaccctgccggcatgtttcgggtcgatgcggaaaagaaagccctgctgctcgctgcgctccaaatgaatttcgtcaagcacggccttgtcaatggcagcggccagctttgctgtagggttttgttcctctggcaagggcgtatctgaaacgttgttcttattctcaagctccttgtaccgcttcccattgcgctccagccggtcggcaagatggcgctgcaagggaaagtattgcggttgatatggggctaggaactgagggtcgttatgtttgtgttccgctacgggaaaggccatgcaaagccgctggtgaacgcggtagaggttgcgcagccagaggcgccccggtcgcggacggtcgggattggttcctacgtcgatcattaaacaagagagatacatggctattcgacctcctcgggactgagccggcggcggcgggtttctagtgaacgggagcggacgatttcatcgcgcttggcgataatgcggtcgcgccattgcgggtcttggggattgatgcgatccagccccatgcccaggccgtattcgatcatcgtcacggcgtcgtggcagaggcggcaaagggaacgtaggtcgttcggttcttccttgccgccggcccggcggtaggtaacatgctggacggtggttgccggcaacttgcagaagacgcacagcccccaatcggcctgtagccgctcggcgcggcgacgcttgtactccgcattgttgtagtttgcccggggacgcggcggcggcggagtccggttctgcgccggctggtctgccacatgaacctggccgccattgccgacatcgagttgcttctgaattacaaatcgcgggcggtgcgaaggcggctcgaacgtcaagggcacgtcgtaccagacctgcgcatcgagcggcgcttccggctgctcggcggtcggcgtccagtcgatcaggcaatccaaacactttggtttgggatcgtccttgaaccgcggctgccaagggagcgacgtcaacgccgaagccacatcggaaaatgtcgccggcggatgttcccacagcggccggcagggcgggcaacatttgcggcccaggtagggcgtccagcgtggattcttcactgcctcggccagggtgtcgataagagccggctcaccttgcagagccaccaggaaaccggcgtcggcaaggtattcacggcgggtgataagcgtgccttgcggtcctgtcttcaatttgcccgcggccgtcatcaggccgatgccggcgccaacggtgtgatagtcccaccagcgcgtgccgggtcggtcaatgcggacgcccatttgcagctcggcaagccttggcaaccagatttcggcggcttcggcccgcggaatgcccatcgccgcgcagagcatgccgaatacgccggactttgtcggcgcgggcatggtgcgacgcataacaaacttcgacgtatcgccccaagcctgaaggggaccttccaggcgcaggaaaagggtgttggcgtccatcatttagactcctcattcacgacgacccgttgcacatcttgccagtcgaaaccaatggacttgataacggagacaaccagatcgtctagcgaattgtgcctctgggcgtcgatctcgacttcctctaccttgtcgccctccccaatgacttctttcttaacgtaagtaagtgagtgtcggttattgggcgagaaccaaaaacgtttttcgcgagcgggggcgccaaatcccacgtcaagatcgtgaatgtactgcccaagctgggcgatgctctgcgcgacgatgtcgcggtcgccattcgcggccggtttggcaaaggcattggcgtaactggtcgggctgttcttgatttccaccaggatgccgtcgggcggattgtgtgccgcaaagctgttctgcttgccggtgggagtcgccaaagccgcaccgcgtagaaaagcaccgacggtgtgggcggccaactctttgtggccatctccgaagcctttgaggttctgaaccagcttttcccagtgaatggaaaaatacttgtagaagcaggccgatgcatacatggcctcggctacatatccggccccggcatcctcgccaggaatgtcgtctgcggcaacatagtagtccacatccatgcgggcttcatgggtggaaatggcatgagcgacttgcaatgccgcctcgacggtggtatttaggttgttccagacatccttagcgtccttgtgtggctccaacatgcggcccgataaggccacatctggcgccacagtagaattggcaataatttccgcaactttttttgcgatattcttgttactctccttagagttcttctcactcccattagatttcttcagaatcgtggctatgctttcaatgccctcgcgcgccatatacacaagcatcttgctcctatcctccgattgctcggtggtttgatcatcatcagatttggcattcttggcttccttagacttgaaaccacaaagattaagaatctcctcgacccatttgcgcatggtgtcaccgccgtcaatcttctcggcaattagcctggccaattgcctggtgcgaatgccaccgagcagttttctgaactcctcgctcatgcggatactgcgtttgatgcactggctggagatgcgcgaacgcagcacgccgccaaaatagcaggtcttcggtgcgcccaggtcgtcgcggttcagattggccgggctgtggttctggatcatatggatttcgattaacatggcaaagctccttattgtgaaaggttggtgttgttcagatatacttccgcccaaatgtcccgaatgtcacgtttcaggcgatgctcggacccgcggtcccagatggaaagatcatcggtcaacgttacccagtcgaatccggacaggcaaccggagttgacttcctcctgcacaacagatagcccccaacgcaagtgcggttcgattgccgaaagcggcgcacacaacagggcatcgaaccgccggcggtatcgcgggcgaccgtgctcgtcgcgcggctcgcggcggccaagaacggccggcaaccgagcgttttcctgatccacctgtggcaaggggaatttcgcgtagagcttggctacaagccatgccacttcgcgtcgcggggcctttggacttttttgccgcagcggccaccaaaggccggcaaacagatcgaagccgggcactgattcgtccaggccgcgcccggcaagcgtccgcagcctagcccgctcgccggggccgaatagccggtcgttttccagtcgctcgatgaaagagatggtgctcatgaatcggtctcctggcgtgactttctggtagtgcgtttctttttgcccgtggacgccggggcgtcggcggcattggcttgggcttgattttgtattgctcgctcgatggctcggtttagcgccgctttgcccttaagcagtgcctcgcgcctccgcagcggcgagccgacagtggtcgaggccataatcgactcgaccatcggttcatagatgtcgcgtaagaactgtttgtcgtcggcgccgtcggtcgggttgttcagtgccgcgcgaatccgcgcctcggcatttggtctatgcgttatcgcagccgttgtgatttcaggatgtttaaggtcgggatttgggagcacccgtatcagccggttgggcaattgactgctgcaatcactggaaagattggcccgcgttatggcggaggcatcgggaagttcgatggacacggcgtcttgaaacgtgaacttgttgaccacaggaccaatcgctaccaccttgccggcttgttcggaacgcaagcacaaagcttcccgccagaattgtgaagagtgcaatgcaatattcgttttcaagagcggaagtgatattggttcctcgtctttcaacagatgaggatcggaattccagaacttcttcttgctgtcttccggttttgacgttttccagccacctccgttgtacagactcgtaatcagaacacttttacaaccgcagtaggcgcagaggcttttttctattgggtcattgagccacatacttcgtggtcgccatgcaagtctggctatgacgcacggtgatttaggctctttatccgataaccacggaacatcttctgattcaatacctgcttccgttagataactcttgagtgtcagaaaaagattgccaacttgaacaaacgcataggccgcagacccagggttgaccgatgcgggataggacccgttggtcgacgcccagaccgacaaccgcagaattcccattgcacagcacgccgggcataatccataagagccatcatgtatgacatgccgcatgtggttcactgaatccgcgccgggaaactccaccagtaggtccgcgattggccggactttcttgttctccaacgatttgtcctgatagaaccgctttccttctcccagcaagttgaagcaatccttgtggtcgtctagtatctggaaccattccggcgggaaccggccttgaggcatgttgttgggcgggttgcctcggcaccaatagagaatcgccagcaggaatcgcagcaaggcgatgttgtccatcggattgctagccgcgatttggcggataagatgggcgtcttccaacgccttacgaatgcctacgcggcaccaattcccatcggcataaagaaccggaatccagttttctacaacaaggttgaactccgtgaccatgtgaatgccctcggaataaatctgtattacgaaccccccattaggcagtaagttattgtagttgaaaagtaatattgccagaagtatccccgtcccaaaaagttctttatgtacagcggtgagaaaatcttgggatgccacccacatttcgcttgagcttttcgtagacccgaggtaactgtctgtcggctggcatcgcgatggccgcgatgctgaacgaaaacccaagatgaaagggaacgacagatggctaccacgaagaccaccgcgaagaaggccgcaaagccgaacgccgcaaaggcggccaagaaggacgctccgaagcccaaggccaagaaggacgtcccgca

SEQ ID NO: 762 - DNA, 6972 bp, Artificial Sequence
  Synthetic Oligonucleotide
cgtcaaacctccttctcatggctcccaatcaaagcctccttgtcatccccccgccgctttctacatcaacaaggtcggctttcccaccttaactcactgtccagttttcggggtccattatattgtctcggttcacccccacgtgtgtggggacaattttttgtattttcttgaaaaaccccccccattcggttcacccccacgtgtgtggggacaatcagaagggagtgataagagagattactcttaccggttcacccccacgtgtgtggggacaataagccggttctacaaacggccttggctctattcggttcacccccacgtgtgtggggacaattcgacaagggggatattaagaagctgagaacccggttcacccccacgtgtgtggggacaatcttttcttccttcggagcgtggacaggtcttccggttcacccccacgtgtgtggggacaatttgctcccccactgagagaaggaaccttcccacggttcacccccacgtgtgtggggacaatccgagagcaaaatccctatcgtcagctccggacggttcacccccacgtgtgtggggacaatgggatagactgaccgcatggcggcactttcggcggttcacccccacgtgtgtggggacaatagggacgggagggtctggattcccattcttttcggttcacccccacgtgtgtggggacaatatctaacaacacgatctttttcaaatcgagttcggttcacccccacgtgtgtggggacaattcccggtcatacagaatgggaagaacttctggcggttcacccccacgtgtgtggggacaatatgatatctctgtttggtaagctcctcccagccggttcacccccacgtgtgtggggacaatactgaccaaacccgcatcactgcgggactcgtattaacgataacccgtcgaagtctacaacctcccggctgggctcacccgatatccttatagagaagccctgctccgtgttgtcgctgtggatcatcaggcacgagcctcctttcgatccatcgcacagcttctgccacaaccgctctcgcaccattcctgagacgctcccgacgaagatacccgtcttcggctcgagcatccatcgcgtcagctcgcctctcagccccctcggaaccttttcaaggatcaccataatcatcttcatctcctgcttccggctcgtcggagaagttcctgccgcccggatcatcgtcgcccgacgggttccacaagttgccgggcagcgcgggatcggcatcaaagtcaatgtcttccggtttggtccggcctctggtctgaagatccagagcggattgaatgtccgcaacgatggtcttcagaagtcttgtctccctcagcttatctcggacagccttccgaacgcggctttcgatgtgttcctcgccctccgcggcagcgtggaaagctatcgggatcgagacttgagttttgtacagatcagctatgtcatagacgaatgacagcatcttgcccgtatggatgaacccgagcgcgggcgacaggcccagagccagaatccccgcgtggctgaccccgtacaagcaactgttggcagcggacagggctcggttgaccggatccgcgttgctccaattgccccgatcgtatgagcgcccgtgccacggcacgccggtttcacggcccgcttgagcgtatgcctcccgcacccgtatgccttccttaccgcggatctgttgcagggttaacgattcatccagaggcgcgtcgaacctcatgacgtacatctttttgaccaccagcagccgcagctcggcatccgcccacaaatgggcttgacgaagcagattatgggcgtgccttgtcttcccatggccataagcgtagaagcgcacgccttcctcaccgcaccaacagacgaggcaaccgttgtccgccagcgcggtgaccgcggcatgggtgatgctggtccccgggccgagcatcagcagacagagcgttgcgcacggcacggaagtcttgcccgcggcgtcgaacacggcaatggatttgctttcctgttcgatcttgcaatgctcgacatacaggtagctccacccatctcgaaacttcggcagaacgtgcagatcctggattctcatggcgcctccgcggcgcgtcaggtgttgaccggcgctatggaaagcaaaccgaacccaaaagccttgcctgggccgatgccgcactcgataagctgcttaagaacggctggttctcccacccgaaaaacgccttcaaacagtacagaccaccactgcatactttgaccgggttggggctcatattttgtccgccatccgtaggcccagcctgggacgaaggtttcgatacaaataggagaaccggctgcgccgacaagttttctggcgagccagtccgcgtgatcatctagcgtggggctgacccgcttccgtttgccgttgcgggacccatcctgtattttccgagtcggattggcccggagccggaatcggactaagtcacccgagcggatgggtatggaacagttctggttcggactgttcaggagaagcgtgtcgccgtcaagattgatggagacgggcatggtttgtggtggcgctgcgagcagataccccgcgttaccaatgggcctgccctggtcatctagcgagtcttccgtcaagccaaaggcgtagtcccaatccggtcgcctaaaggagtttgattgcacgatgatggcgggcatgcgtccaccaactctaggattaactgggtagtcaatacggaagaggaatcctgattctccgtcgcgttcctgaagtacatcgccactgctattctccgtcggtaagtcgcgttgcagcgggaagcccttgtcatcaaacggcctgcagtacgccgctgtgcgctggtcatctgccgggttcgctgacggaaatgccatacagagacgctggtgcacgcggtacagattacgaagccagcgacggcaaatacgccagtccgggcggtcgggattgtccccgacgttgaccagcaaatgcgaatggtacattgatcaaacctcctcttcgaggatttcgcgacggacggattcagaagctttgcgaagcgagcgacgccgcccttcctcgcttcgccacttgcggatttcgtcgcgtttgcggatgatctgatcgcgccagcacgagtcctcagggttaatgcgatccagtcccatgcccagtccgtactcgatcatagtcacagcgtcgtggcagagcctgcagagcgaacgcagatcctccggttcctcattgcctccggcacgccggtacgtaatgtgctggactgtagtagcgggggacttgcaaaagacacagagcccgtggtcggatttcatccgttgctcgcggcgtttccgaaattcctgattcttgtactcggcgcgaggtctgggaggcggcggtgtggcatgctgaaggggcctgccgactgatacttcgatggctgtccggactaagagccgcggttggtgcaccggcggatcaaagaagaccggcgtatcgtaccaaacctcggcatcggaaggggcgatggcgccattgtgaggctgccattcgatgaggcaatccaaatggactgccttcagtcgccccaatttttcgtccgtggggatatcccgttcagtcctaggcatccaatgcctggaggtcaacgctgactcgagactttcgaagcggtccgtgtccgcctcaaggctgttatgatcgcgtttccatcctaccggaaccgcaggggggcacgacttaagacctaggtaaagtggccacttgggttgccgaacattgtcagccacctcctgaatcaatttctcgtcacctcgaagggcaactaagaagctggcatccgccagatactcccgacgggtgatcaacgtctcgatggggcctttcgatccccccgtgcgcttgatcccacctttcgccattaacaatccaaccttggcgcctacggtgtgataatcccaccagcgagtacccgcccggtctacgcgtacgcccatagccaacttgtttagttccggcagatgctctgcagcctcctttcgcgacagccccttcgcgcaacagatgagtcctaggaccccggattttgtgggagcctccatggttcggcgcacgaccaacttcgagttgccactccacgcctgaagcggcccttccaggcgaagaaagacagtgtttggttcctccttcacggtcagacctcctcagcagaagccttgccgacgtcgcagacctcatcccatttgaacccgctgacttcctctacgaccgcagcaatcaaccctgtaggcttgttgtcgcccttgtgctcaccacagagcacttcgtaacgttcatcagtcacgtgcttggcttctttcttcttcccatcctcagtacgttcccagtactgaagagggtatcgccagagcttggggctgtaccagtgaagcgaggactcaatgccgtatgccttgcgaatgctgtgtacatggtcagccaagcaggcaacgcttctcccttcccagctcttctcgtctgccgcgtcgtcgtccggtttaccgatccgctccacgggctctgcgaaagcgtttgcgtagctggtggccacttttccgttcttcttaatttctaccaagataccgcagggctcgcagtgcgacgcgaagctgttctgtttgccgctgggactggtcagcgctgcggagcgtatgaagtggccgagggtcgctgcggctaactggttagcccttggcttgacttcttccgtccaagtctggtgcgcttccctccaacgcttcatctcctggctgtcgtcgtctttgtctttcggcttctgcggctccggtccgagattgtacagaagttgatcccaatccaggcaaaaatacttgtagaagcacgcggaattaaacatggcttcatccacgtggccagcgcctccaccggccttgcccaaatcgtctaccgcggtgaaatagtccacctcgttcacgatagcgtgcgtagaaatcgcatgcgccgcctgcatggcggcttccacatcctgaaaggcatcggatgtcgtcatgcgtccgaatagggctatgtccacggagcggcgctggtaagcttgtgaaagttcacgcaaataactagccaacgccttgtctttgagctctccatcaatccatttcttgtagctggatttccaatttgccgactgccgcatatccgccaactttgtgacaaactccttcgcttccgaacgctccaggaaaacgagctgcgggagtctcgggcggtcatcgagctccaattcttcagccgattcgcccgacttgttttcttctttttttgcgatgttggtgcaggccttaatgattctttcccattcagtgtctggtatgcccgaggattccaattccttgccaacgagatcaggaaagaacttggttcggcgtcctaggtactcccccatggcctcaaagaaaatgcctggttttcggttgtgcacgtcatcgggattgccggggttgcggatgctgcgtttgatacactggctggagatacgagcccggggaacgcctccgaagatggatgtcttgggcgctccaaggtcgtcccggttgaggttggacgggctgtgattctggatcatgtggatttcaatcagcatgctcaactcctcctttcagattgataaactgcattcagatagtcgttcgcccagatgttgcggacgtcctgctcacggcgcttcggatcttcgtcttgtttgtcgggattgcgatcccatagcctgagatcgtccagcagtcgcacccaatcgaggcctgcagcctgttttcgattcacagcttcattgacagtgtgcagggcccaccgaagatgaggctccaatcccagcagagctgcttgaagcagggcgtcaaagcgtgcacggaatcgttggcgatcaaattcgtttcttaaagccctttcgcggagtcccagtacaagagcgagttccgctccagcctgccgcacctgcgggactgggtaagcggcatagagccttgccaccagccaagcgctccgccgctcgggtgcacgaggactttgctcccgtagaggccaccatatcccggtgaacaaatcgaagcctttgagcgtctcgtccaaatccttgccaagcagccagcgcaactgagagcgttcgccatctttcaatgctgccagctgtcgaataagcttctcagtctgcgtcattcctcacctctcttccgcgtttcactttttagtttgtcagcaggtttgctgtcctggatcgcgataagccgcaccgcctcccgaatcgcgtcatcaactctcatcattgcttcttgtcgtcggagcggcgagcctggcgttgaaagaactacagccgctctcaactcattagcgaggacgtccacgacccctcgccgccagactttgcacgcactctcgaattcggcggggggcgaacaattgatagcttgtaaaaaacccaagaacttttcttggagttgtttctccgcctgtggtctgaactgacacattgaagagcgaaggtcgtgcttcttgcggtttgacaggcttgttttcttaagaaaggtggcgtcgcgcagtttcttgatcggctttttccacgaccttgttcttgcgtctatggtcctttcgatcagggcagccagccaatgtatctcctgtcgcacgcccaacgcttttgtcgcatccccaacgagctttccgaggatacggaaggaatgcctccacacgtcgaagtacttcgccttaccgtcggtagagaacccgacagcctcgccttcggtgaccccactgttgattttcacattatcctgacttccttttcctgattattttggacttccggtcggactttcagattgtattgaccgggccggagagtggtaatccgacccggcgggtggtcgatcagaa

SEQ ID NO: 763 - DNA, 6967 bp, Artificial Sequence
  Synthetic Oligonucleotide
cccacgtgcgtggggacgctcacgggcttgtccacgcccattcgcccgcgccgggttcacccccacgtgcgtggggacgctgcgggtggtttaatgcgactcaaagcgcccgccggttcacccccacgtgcgtggggacgctactgaataaacctgaatttacggcaccctgacgagaaatagcccctcgaagtcttcgaccgaccgcgccgattttccccaactccgaatccgaaaaccctgctcattgtcgctcgaatacatcatcacacaaccgcccctcctggcattcccgcaggctttttcccagagtttatcgcgcaccatggctgaaaccctccccacaaaaactcctgtcttcggttccagaaaccaccgtgtcaattcaccccgtaacccaggcggcacacgctcaagaatcagaaccaccatcgttggcctccgtttcatcagtttccaacggataggtgcacccgccctctacttctcccgtcaaggggtcccacaaagcgcctggggcggcggcgtcctggccgaatgggtcatcacttgtcgcgcctttctttggcaacatcagcgctttttggatgtcaggaatgatcctctccagaagccttgttgacacaaacaggtcacggcacgagatgcgcacatgtcgttccagcctggcctgctcttgcgctgctgcgcgaaatgccgctgggatagaaatttccgccttgtaaagatcggcgacatcataaacgaaggacagcattttgccggtatggatgaagccgagcgcgggcgagaatcccgccgaagtaacagccgcatggcaaatgccgtaaagacacgaattggccgccgacaaggccctgttcaccgggtccgcatgggcccacttgtcacgccggtagctgcggcccgcccaaggcacgccggtttccctggcggcccgggcataggcatcccggacacggacgccttccattccgcggatctggcgcagggtcagcttcggatcgaacgtctcggcaaaccgcaactggtacaaacggtgcaccaccttcaaacgaagatccgcatccgcccaagcccgcgcctgatgcaggaagttcgccgcgctccgcgtctcgcccatgcccgccgcatagaaccggactccctcttcgccgcaccagatgaccaggcaaccatggtccgccaacacggaaatggcggcatgcgtaatcgatacgcccggccccagcatgagcagcgccagattcgcacaggggacaggcaccttgccggatgcatcgtggatggcaatggcccggacttcctggtcgacgcggcaatgctcgacgtagagatagctccagccgtccctgaacttgggcagaatctgcaggtcccggactctcatgtcgcctcgtccgagcccgcagtattggccggcgcgatcgaaagcaggccgaacccgaaggatttgccggaaccgatgccgcggataagggtctgccgaaaggcatccgggtccgtgacctggaggaggccttcgaaaagaaccgaacgcagacgctgccccttgccgtttttgttcatatagacgaaccccggctgaagggtcgtggcgtcttcctcgatatggaatcctgccgattcggcccggcgggcaagccagtcgacaagccggttggtcggaacgggaacgcgctttccgatagattcttcttttgcatccggtgaatgcttgcacagacgtctggtcggatttgccgcgaggcggaaccgaaggcaccggccttccgagaagcgtgggtcgaatggtttcacctcagggggcgctgccagcagataatccgcattgtgaaaggcatagcaccagtcgggctctatggcagactgcacgatgattaccgccctgccgccgcggagaggttcgatgaggaaaagaaatcccgagcccacggcacgcttcacatggacttggcctttaccaaactcatccggtttgaacggttggaggaagtccctatcttcggccttccgggacgcggacggaaaggccatacaaaggcgctggtggacatgatagcggttcctcagccacgaccgcccgggccgaggccggtcggggttgccgcctacgtcgatcaatagacaggaccggtacatggctattccacctcctcggcggcaagacgccgacggcgggtctccagcgagcgaaattcaacgatctcggcccgcttttgaatgatcggcttgcgccagcggggctcctcaggattgatgcggtccagccccatgccgaggccgtattcgagcatggtgacggcgtcatggcacaggcggcaaagcgaacgcaggtcctccagggtttcgtctccgccggcccttcggtaggtgatgtgctggacggtgtttgccggggctttacagaagacacagaggccgtggtcacgctgaaggcggcgcggcctcatgcctttgggaaccttgcgagacggatcggcggggtcggcaatcagggtctcgcttttccattcagcgttgttgtagttcgcgtgcggacgggggggacgcggcacacgctcttgcgtggcaccgtcggtggacacaccgttcgctccgctggtgagttcggtgcgcgtgactaaacgcggatgatgtaccggaggatcgaacgcgacgggcgcgtcgtaccagacttcggcatcattgggggcttccggctcggtgtccgtcgcccgccattcgaggatacaggcgagcttatcaggcttcttgtcaggctcaaagttgggcaggcgcggttgccagggaacacacttgagggcatcaagcagggacctgcccgtttcgatatgcggctcgcaggtgccgtcctcgcgctttcgcgtcacgaggatcggcacgctcggcgggcaggacttgcggccgaggaaaaccggccacttcggcgacgcaatcgccgcggcaaggtcatggatcaacttcgcatcaccctggagcgccacgagaaagctcgcgtcggccaggtactcccggcgcgtgatgagcgtgccctgggcgccggtcttcacttcgttcccagcggttgtcatgccgattcccgctcctaccgtctgataatcccaccaccgtgtgccgtgccggtcgatgcgcacacccatcgcaagcccgttcaactccggcaggcgttcccgcgccttctcacgcgacaggcccatggcgcagcagagcaggcccagcaccccggacttggtcggggcatccatggtccgccggatgacgaacttcgacgtgtcgccccaggcctggagggggccttccaggcggaggaagattgtgttggcgtcggtcatttcgccgcctccgcaggcgccccggttgccccgagcttgtccatgaccttatggatgaactgatcgaactcgccgaactcgtcggaaccgaccacggattgttcttgctcgtgttccttctggcttttgtcgatccaggtcaggcgatggcgcagattcggcgagaaccagaaacgatcggcctcgatgccgtaacctgcaacgagatcttgggcgtactggccgagcctggcgatgctttcgccgatcaaaccgcgttcggacttttccggcaccggatcggcgaaggcgttggcgtagctgacgggcgtagctgacttggttttaacctcgaccagaactgcgtcgggcggattaaatgccgcgaaggcgtgctgtttgccggaggggttggccttggcggccgcttcaaggaagcaccttattgtcttgcgggcgaggtcggcatcgtccgccaggttcttcttcaactgctcgaagtcaatgacgaagtgtttgtagaagcaggccgagttgaacatggcctcgttgacgtgggccgcgccggcgtcctggccgggcacgtcgtcggcagcggtgaagtagtccacctcgttcacgaccgcgtgagtcgagatggcgtgtgccgcggacaacgcggcttcgacggtgaacttacccttcagatccttaaacgggcctttggcatcgaactccgtcatgcggccacaaagtgcgatgtcgggtgtcttgacgaactcgccgatgatctcggcgaagttcttgcccaggtcgccgtttcccgtccgcacagcctggcccatttcgttgacggcggattgaggcagaaagaagagtatatcgaaagtgtcctcatccttcaggccgaccccccccttcttgaattccttccggatggcctcgcgatgtcgctcttcctgtggattgccttcgcccgccgccgcctttgcgatcagttcgatcagccgccgtgtacgcacaccgccgtccttctccaaagcaaccgcgaactccgggctgcgccggatgctgcgtttgagacactggctggagatgcgcgcccgggtgacgccgccgaagatgcaggtcttgggcgcgccaagatcgtcccggttcaggttcgccgggctgtgattctggatcatgtggatttcgatgagcatgtttatgccctcctttcgagtaatttcgtagcgttgagatacgtctcggcccagatgtcgcgaacatcgcgtccgcggcggtgctcctcgccccggtcccagatggagagatcgtcaaggagttgcacccagtcgatgcccgtcacatcccgcgcctgcggcacgtgcccggcgacagccttggcgacttcccccagcgcccagcgcagatgcggctccacagacgacagggacgagcaaagcagagcgtcgaatcgagttcggaagcgcttgcggtcatcctcgtcgcgcggttcgcagcggcccaggacttcaggcaaagaaggccccgcgcctgaatcgggccggatgtgtgggacgcggaacgcgccgaaaagcttggcgacgagccatgacggctcccggcgcggggtcgccggactcttcgcccgcagtggccaccagagacccgtgaagaggtcgaaaccctggagcgttgcgtcgagcggccgtccggccagacggcgcagccgcgagcgctcgccttcctgcaaggctgaaagccgcttgatgtattcagcggtctggctcattttgagcctcccttcttgcggccacgtttcggtttgccaggcacggctgcaggcgtacctgcgttcgacagatgatccggcttctcaaccagctctttgatctttttgttcagcagggctttggcgtgctctttcgccgcgcggcggcgcaatggcgagcccttggtggtggatgcgacaatttgttcgacgaccggctcgaagatttcacgcagaaaattcttgtccgcttcggcgtcggtttgcgcccttgctgggggctgttcaagcgcggtccgaacgcgggcctcagcgtcggccgtcaacagcacaactgcggcgtcgatttcgtggtgatcgtacttgcccgtcttctggttgggcgtggtgtacttgacaagtccgcgcagcccgtcgcgaatgcttgcggagcgttcgacgcgctgattagccgcctcattcggaacggacacgcttgtcgcgtcttgaaacgtgaatttgtttacgacgggaccgatggcggatactttgccttggcgttgaccgcgaagacgaaaggcgtcgcgccagaaccgagaagagtgtgcggccacatccgccgccaatccgggcagggatataggctcaccctttttcttcaacagatggggatcagtgtcccagaactttttgacctgcgtgtcactcccgctcagatgcggcgattcctgttcggttgccttcttagtcagttcctcgatcgcccgctgattgtccgcagtgaaaagctggtgaaagacgcgggcgattttctgttcgtcgggttcaggatttggcgcagcggcggcgggggtgtcggccgcaccaagcgcttccattctgcatttgcggatgagctgcgcgaccctgactactttgtcggccagcttgaactcgtctgttttttttgacccgtaagcattgttgattttctggaactcggccaagacgtcctttccgaaccgttggccgtcggtgacgggagtggaccagccatacttgttgtacaggcgtttgaccaacactccgttgcttccgcagtaggcgcatgtgccccgatggtccgcgaacttcaaccacagtttgcgcggacgccacgtcaggcgggcaacgtcgtcaggcgcggtagggggattagtgagcagccacggaggaggttgcggcggggcagaggcgccttgggtttgcggcagattggcgcacagagtttgaagcaggttcttcccttcaataaatgcgtaggccgcagagcccgggttgactgatgcgggataatacttgttggccggagaccagaccgagagccgcaagattcccatcgcgcaacacgcggggcagaacccgtaggggtcgtcatgcacaacgtggcgcatgtgattcaccgaatccgctccagggaactcgacgagcagatcgctgatgggccgagatttcttgtccttcgacgaatcgtcatccttcaacgaatcgttgcccttcaacgaatcgttgcccttcaacgaatcgtcgtccttcaacgaatcgtcgtccttcaacgaatcgttgcccttcaacgaatccttgcccttcaacgattcgtcctgatagaaccttttaccgtcgcccagcagattgaacgcggccctgttttcctccagtttagccagccagttcttcggtatgccggcgctcttctcgtccagcgccgcgagggaagacttcgcgtcctctttgcaccacatgagcacggccaacagaaagcgcaggagcgccaccctgtccatgggattgctggcggctatctgccggattttatgggcatctttcagcgccttgcagattccaacacgctccgtcttcccatctccgtaaagaacaggtatccacttctcttcaagcaggttgtaagccccctgtgtta

SEQ ID NO: 764 - DNA, 6953 bp, Artificial Sequence
  Synthetic Oligonucleotide
ccggttcacccccacatgcatggggaatacacttgatcaatagaggtctaagaggtcattgaactccttcaagccttagtttaaggatgcttggtcataagtttgataccctcccattccgtaacgactcttgatgcggcaccccagaattcgatatcaaaaccttgctcggtctgactactccagatcatcaggcaagttccaccgctgcaattgcttctaaccttatcccacagtttatctctaaccattgctgagactttacccacaaacaccccggcttttacttccagcagccaacgtgtgatcttacccctcagggagcttggcacattttccaatactaaaaccaccatcaatcttcctttggcagatcatcctgcccgtaagatatgccgcctggggaaacttctccatctggagaccagagtcctccaggcaaggctggttcttcggcaaaacagtcatccgggctatcctctggcataatatcaccgaagagagaactaatatccgcgacaatgcgtttgagtagattctgcctgtggaattcatcacggcaggcaagcctgactctgcggtcgagttcgccgatcccttcagcggtcgcccggaatgcggcgggagcagccatttccattttgtatagatccgcgatatcatagacaaatgacagttgcttgccagtgtggacaaagcccaatccgggagagaatcctgcagcaacaatggcagcgtgcgatatgccgtagaggcaggagtttgccacagataatgcccggtttatgggatccgctttattccagttgtctctttgatagtttctgccctgcatgggcacaccatacttttgggagagttggaaatatgtatcgcgcacccgggcaccttccttgcccctgatctggttcaaagttaaatcaggagaaagctcatcctggaacctcaactgatacatggagcgcacaacccgtaaatgcaaaaccgggtctgcccagtactttgcctgtttcataagattgacggcgctacgggttgtacctgtgcctgcggcatagaacctgacgccatgttcccccacccaggctaccagacagccacaggcagccagtgaaagtattgccgcatgggtgatggttatgcccggtcccagcatcagcatagccaagccggcacaaggaaccggggtttctcccagggcatcgtgaatggcgatggcttgcccgttctgatcaattttggcatgctccacatagagatagctaagccgatctctgatccgggggatagagtgcaggtctttattcatcattcctgattggcagaacggacagcaggccaaagccgaagcttttcgcttttccaatgccgcttctaagcgtttccaggaacagtttcgggtcatccactttgagaattccctccagtagagccgaacggaagcgcagaggattgtatgtgtgttcacgccagtagccctgtccctgttcctttgctttgacatttttaggttcaggcttggagccataaacccaacccagttgaagaagctcacagcgctgaagggtgaagcccagctttgggcttttggcagccagccagtcggcaagggcctgatccggggtggaagagggatcccaggtgagagaaacccttttgtgcaggatgttgccagtttctatggtttgaccgtcctgttgcaccttctcaggaatatgacggcgtacgctggcgtttacccgcagcctgaaccggagcagttgtcccgcttgaaactctggattatactcctttgtttccggtggcgctgccaggaaatcaagcgcgttttggaagcaataatcccaatccggctcaagaacggactggacgataataatcgcccttttatcgtttccgtcgatgttgttatcgacccggaaaaggaagggagttttttggaagtcgtttggcgaaaagggcttcaggaaatgcggatcctgctcccggcgcaaacctgaagggaacgccatggaaaggcggcggtggacgttatagatattgtccagccactttctgccggggcggggacggtctggattgcctccagtatcgatcaatagcttggacaagtagatcatccgttttcctcctctggcttcattttgcggaaacgctgcccgcgcgaacggaactcgactatatctttgcgctttgccagtattcgctcccgccatatggggtcgcaggggtcgatgcggtcggtggtcatgccggaaccgtattccagcatggtgcaggcgtcgtggcagaggcggcacagcgcccgcaggtcttccggtatttccttgcctcccgccctgcggtaattcacgtgttgaacagtcgtggcgggagctttgcataccatgcacgcggcatggtccatcacaagccgctccgccctgaccttcttatactcggaattgttataatccgcccgggttcctttgggcctccaaacgctggttccggtttccctgctcacttgcacatcctctcccacaaccagctcacgcctgatcacgaagcgcggcaaatggcggggcggctgaaaagaaaccggcagatcgtaatgaatctccgcgtcatcaggcgcatgttctccgtcctggctggggatccagtccatgacgcaaggcagtatttgcggcaggggttcattgtgccagcgcttttgcaggggaaccgcggacagcgcctcctccaaagtgttataaaagcccggagcatgctcgcccacgggacgtgaagggggacaggatttgcgccccagataaattgcccagaccggcttggccagagcggcggagagcttttccacaagttccggctcaccctgcaaggcgaccagaaaactggcgtcggcaagatattcgcggcgtgagagcaaggtctctgccctggtttttactttgcttggtgtcagggtatcagccagggcagctccaaccatggaaggttttttgggtgccttcagctctgccatgcgcattctttgtcccgctccaacagtatggaagtcccaccagcgtatgccggggcggtctatccgcacgcccatgcgcaggttggcgagttttgggagccatgaatcagcagcctccgcgcgcccaattcccatggccgcgcaaagcagccccaggacacctgattttgtgggagcgtcggtagtcctgcgcaaagcaaacttagcctcgttgctgccccaagactgcaaagcccctccaagcgcaagaataaggtgttgggtggcgcactcatgtcagccgccaacataagccttgcttttctgaacttcttcccacttgaagccgccaatataatccaacacagcgcctacaagctcattgaggttgccaatgtttctggaagccagtttggaatgctcattgccaagggaatagcgattgtttggagaaaaccagaagctgataactggggattgctcatcataatagccaagcctgatgtcgttcacgtagttggaaagctggccgatgctttgttccaccaggtccgattccttgaccacggaaactggcctgacgaatgcgttggcgtagctaataggggaattcttgaactcaacaaggatgccatcgggatagttatgagcggcgaagctgttctgtttgccactggggttggttttggctgcggcgaggagaaaggcacccacggtgtgggctgccagattcgtgtcccctttcaggttcttgaccaactgttcccaatcaatggagaagtatttgtagaaacaggctgaggcaaacatggattcgccaatatgacccgctccggcgtcttcaccgggaacatcatcggccgccacaaaatagtctatctcaggtctggcaatgtgggtggagatcgcatgtgcaacctgtagggcgccttcaacgccagtgtttttaagctctttggtctccagcatcctgccgcaaagtgctatatccggagaatggacgcagtttgtgagcagatctttgaactgcagcagtttttcgctttcacttagtttggagtcggaaagcagctttgccatttggcgcagggcatcataagtggtaaaaaccagcatgtcagatgtatcagccgcctgctgctcatcctgatcttcatcggcttccgcgggtatcttttcggacttttttgcagctttcttggaagatttggttttgattccgcaggcttcaagaaacttggcaaccagcttcttatctttgttttccagcatttcctcgagtttctctgccagacgccttgttcggatacctcctctaaggtccgcgaattccggggcaaaacggatgctgcgcttgatgcactggctggagatgcgagaacgtaatactccaccgaaataacaggtcttgggggcgcccaagtcgtcccggttaagatttgccgggctgtgattctgaatcatatgaatttcaatcaacatctgaatcctccttgttgatcttgtatgctttaataaatgaatccgaccattctcttttgacaggttcctgctcccaaaatgacagaacatcagtaagccctacccagtccaggcagacctgctggtgcttgcgcaaaatacccatgatgaccgacagcggctcttccatctgcataatgtcaagcgatgcgagttgatcaaagcgtgccaatacccggggtaattcctttttgggttccaacttccggcagatgcctcccataagaatgggcaatgtggctccctcgcgctgttcaaagcggaattcagcaaaaagtttggcgatcaaccaagccacttcacgcttgggagcgcgttgattcttttgccgcaaaggccaccatagggcggaaaacaggtcaaatccgggaagcttttcatcaagccgggctcccctgagttttctaagaatgcccaaatcgccttctttgaggttctccaggcttgcaatgaagtcaacggttcctctattcattctggtcctcctctgcgggttttgttttggattctggtataactggccagggcttgcgggaaatgaatttacctctcttgagcctggcgtccactgtttgagccggctccaaagagcatgcaaccttggtgagcagttctccgtattcagtatcggcatcctgccaggaatagcccctgttctcagtcattttacccgcattgatggcaattctgctttcggcgtgggggataatgtcagcaatctggggagtgcccactgactttttgaaatcacctctgagaggcttcttgcgcatggcattaagggcagtagccctgtttgccaattgagccagtagctcatcatttgtatcagttccctcaagctcgatgatcttgtcccagatgtctatgctttttgctttatcgctggcaaatccaaccaaccatagttttccttgtctggagtttccttccgcgtgcaaatagctgaacaacgggctataccaatcccggtccgcgaaagtgtatctatcattggacatcagtttgattttggactggagactttttccctgatcggtgtaaacaccatgagggtctttccatttaaggccttccggcactggttcaggttttatgctgcaggaatagacgagagctttggagggtaagccgcaggaacaacatgctgcctgacctgagacaggatcatgcagatgcaccttgcgcggcagccaggtcattccggcaagtaagcccactttcctgctttctttttgaaaagaacccaaccatgccggaatccccatattatcccagggttgccaattttgaaccagcatgccagcgaggtcatttgcatgccagagcaggtaaaatggaggagtgttgttgattcccgcgcctatccctctgccaccgacagtggtaaagacaggtaatctcagcagtcccttgatgcagcaagcttcgcagagcccatcgatatagtcggtgacatgattgaaatggcataggttgtgagctgttggtatctcatgaataaggtcggtaatggctctgatcctggaactgggatcggcttggaaaaatctctgtccatccccaaaaagctcgaaataccccttgttttcttccagccaggatatccaggaggtcggaagcggcttatcaggttcaggctccccgttggtgttggcgaaacaccagtagccaagagcaagcaggaatctgaaaacagcgaaccggtccataggattgctgtatgccagttgcagacagtgtgcgtcttcaagagtttgaactaaagatattctatctggtttgcccgaaagatagaccacgtttacccaattatcacaaagaagattgtacataacatgctccttttgttcgataggaaccttatatttaagccaaagatcattgtcaagaaatttgctttgcggattttgggttaggaaagatcaatttggggcggtatcttgttactttcaaggtgttccatgcggcggcttccactcccattttacggagccccaccagcggctttttcagcgcagttttcccgctgctgatacttggcttgttggaaagaaccgccgtgtgtaatgcgcggcggttcaagttaattatcggacttggaagggcggctgtccgtcacttcagcaatatcattttgcggctggcgctcgtctttccggtgctgaggcggtagatatagactccgcttgccagttgggcgccgttggagtcggtgccgtcccagttcaggctgtgttttccggctcccatctctttgtccagtagggtgctttacatgaaaactcccgggaaaaaagcgtaaaaaaacccctactggtgaaatgatgaccactagtgtaatatggaaagagcagagaacaacctgtgctgtctacaatgcgttatataagaatatagctttacattcgggcatatgcctaatggcaagtcccagctggtagtc

SEQ ID NO: 765 - DNA, 6948 bp, Artificial Sequence
  Synthetic Oligonucleotide
cggttcacccccacacgcgtggggacaatactgaaaaaaggctttgtttacggtatccggacgagaaaaagcccttcaaagtcttcgacagaacgagtcatatcgccccaactccgaaatttaaaaccctgttcgttgttacttgaataaatcatcgcgcaactgcctgatttcgcttgagaacatgatttttcccatagtttatcgcgcaccatggccgagattttcccaacgaagactccagcttttggttccattagccaacgcgttaattcgccccgcaaaccggatgatacgcgttcaagaatcagaaccaccattggtagcctccgtttcttcaactaccaacgaatagtcgcggccaccctcctctctttctgtaatattgtcccacaaagcacccggagctgcggaatcttggtcgaatgaggcgtcattagtcagagttttttctggcaacatcaacaccttcttgacgtccggaattattctctccaacaaccgggtcgaaacaaacaggtcgcggcaaaaaatccgtactcgtctttccaagctacctttctcttctgctgccgcacgaaatgccgctggaatcgtgatttccgctttgtaaagatccgcgacatcataaataaacgacaacatttttcccgtgtggatgaaaccaatagccgacgaaaatcccgctgagacgatagccgcatggcagatgccgtaaagacacgaattggccgcagataaagccctgttcaccggatcagcaacagtccatttgtcgcgccggtaactgcggcctgaccacggcactccggtctccgcggcagctttagcgtatgcttctctgacacgaacgccttccattccgcgaatctgacgaagggttaggtctggatctagtttctcagcaaatctcaactggtataaccgatatacaaccatcaaacggaggtttatatctgcccagactcgcgcctgatgtagaaagttcgcggcactccgagtctcgcccatgcctactgcgtagaaccggacaccttcttcgccgcaccaggcaacgaggcagccatgatccgccagaaccgaaatcgcggcatgcgtaattgagacaccgggtccaagcatgagaagagccaaattggcgcaggggacaggtaccttacctgattcatcgtggatggcaacggcccaggcttcctgatcgatgcgacaatgctcgacataaagataactccatccgtcgctgaactttggcagaacgtgcaggtcctttactcgcacgtcctccccccttcacccgatgcattggcaggagcaaccgaaagcaagccaaatccaaaagctttgccggatccgatgccgcgaattagcgtttccttgaagagctccggattgtccactgtgagaatcccctcgtaacgcgccgagtggaggcgcttcccttggcctttgccttccttattgatatagacgtaacccggctgaacgatggtgaaattcggatcgatggcaaaccctgcagaatcgattgtccgcccgtttcgcatcagccgccaattcgccaaccattcgtggagtttctcatgaacaaacgttcgggggtcttccccctggtgttttccgcgccagtcatcgatttcctggctactcgggactggcacacgtttcccgtgccgcgttttctctttgttctgttcctcttgcgacatcgtgttccagcgccgtttcggcaacgtcgcctttttttgagtcggattcgccaggaggcggaatcgaagacgctggcctttcgagaagacggggtcaaacgatttcacctcaggcggcgcagccagaagataatccgcattgtgaaaggcatagtcccagtcgggctctatggcagactgcacgatgatcatcactcggccgttacagagaggatcgatgcgaaaaagaaagccggcttcgtcgttgcgcggggagtggacttgtttcagggcatcgtactcaacttcgttcttcttccggtcagccaagtgtcgttgctcgggaaaatcgtcctgatcgtaaggtataaggaattcaggatcgcgctttttccgtggatcggatggaaaggccatgcaaaggcgctgatggacatgataacggttcctgagccacaaccgtccaggccgatgccgatcgggatcgtcccctacgttgatcaagagacaggagaggtacatagctattccacctcttcggagacgaggcgtcggcgtcgggtttccagcgagcggtatttgagaatctcggctcgcttttgaatgattcggtcgcgccagcgtggttcctcaggattgatgcggtcaagttccatgccgaggccatattcaagcatggtgacggcatcatggcacagaccgcaaagcgaacgcaggtcctccagggtctcgttgccaccggctcttcggtaggtgacgtgctggacggtcatgcgcgggccgggcgacttgcagaagacgcacaacccggtgtcggctttaattcgttcttcgcgacgcttccgatattctgtattcttgtagtccgcgcgcggacgcggcggtgctggcgtggaagtctggatcggatcccccacttcaactgggactgtgccacgcaggacaaatcgcgcctcgtggaccggtggatcgaagcaaaccggcacgtcataccacacttccgcgtcgtcgggggcgacatcacaatccggggcggaccgccactccacaagcgtttccaccgccctgttcttcggcgcaacgtcagtcttgtaccgcgggtgccacggcatggcgcccagcgcggcgttcaggccgtcataaccggcgggattcgtccacaactcaccctcactgggccttgcaagcaccgggacggacggcgggcaggacttgcggccaaggaaaaccggccactttggcgacgcaatcgccgcggcaatatcatggatcaacttcgcatcaccctggagcgccacgagaaagctcgcgtcggccaggtactcccggcgcgtgataagggtttcaatctcgccggtggaaggcgtccgcttaattcccttcccgtcagctgttataatgccgattcccgctcctaccgtgtggtaatcccaccaccgcgtgccgggtcggtcgatgcgcacacccatcgcaagcctgttcagctccgacaggcgttcccgcgccgcctggcgcggcaggcccatggcgcagcagagcaggcctagcacgccggactttgtcggcgcatccattgtccgccggataacgaactttgacgtgtcgccccaggcctggagtgggccttcaaggcggaggaagagtgtgttggcctcggtcatttcgccgcctctgcaggcgtcccggttgtctccatcttgtccatgaccttatcgacgaactgatcgaactcaccgaactcgtcggaaccgaccacggattgttcttgctcgtgttccttcttgctcttgtcgatccaggtaagacgatggcgcagattcggcgagaaccagaaacgctcagcctcgatgctgtaacctacaacgagatcgtgggtatacttgccgagccgggcgatactttcgccgaccaatcctcgttcggacttttccggcaccggatcggcgaaggcgttggcgtagctgacgggcgtggccgacttggttttgacttcgaccagaactccgtctggcggattgaatgccgcgaaggcgtgctgtttgccggaggggttggccttggcggctgcttcaaggaagcacttcacggtggtccttgcaagtgcggtatcgttgttcagattcgcgtgcaactggctccagtcaatcacgaaatgtttgtaaaaacacgccgaattgaacatggcctcgttgacgtgggccgcgccggcgtcctggcctggcacatcgtcggcagcggtgaagtagtctacctcgttcacgattgcgtgagtcgagatggcgtgagcggcggagagcgcagcctcaacggtaaactggcctttgaggtcctgaaacggcccctttgcatcgaactccgtcatgcggccacaaagtgcgatgtcgggggtcttgacgaactcgccgatgatctcggcgaatttcctgcccaggtcgctgttttcgtcgcgcacagcctcgcccattttgttgatggcggattgaggcagaaagaagagtatttcaaaagtgttctcatccctcaggccgacccctccgtctgtaaagaccttccgaatggcttttaaatgttgctcattcggttgattaccctcgcccgccgccgcctttgcgatcaactcaatcagccgccgtgtacgaacgccgccatccttttctaaagcggctgcgaattccggactacgccggatgcttcgcttgagacactggctggagatgcgtgcccgggtaacaccgccgaagatgcaggtctttggcgcacccaagtcgtcccggttcaaattcgccggactgtggttctggatcatgtggatttcaatgatcattttaatatcctcctttcttttttgacagcgttgagatatgtttcggcccaaatgtcgcgaacatcgcgtccacggcagtgcacctcgccccgttcccagatggagagatcgtcgaggagttgttcccagtcgatgcccttcacatcccgcacgtgcggcacgtgtccggcgacgacctgggcgacctctcccagcgcccaacgtaggtttggctcaagggctgacaggggcgagcagagcaaggcatcaaaacgctttcggaaacgattgcgggacttgaactccggtgggtcgcagggttcgcagcggcccaaaattttgggcaaagacggccccgcacctgaatcgggcctgatgtgcgggacgcggaacgcgccgaaaagcttggcaacgagccatgacggctcccggcgcggagtcgccgggcttttcgcccgcagcggccaccagaggcccgtgaagaggtcgaaaccctggagcgttgcgtcgagcggccgtccggccagacggcgcagccgcgaacgctcaccttcctgcaagtctgaaagcctcttgatgtattcagcggtctggctcattttgtgcctctcttcttgcggccacgtttcggtttgctaggcatggccgcctccgatagcgcgtcaccatgttctgtcttattgagtgtcgactccagggccgatcttgcccgcgccaaggcctcccgccgttgcagcagcgagccagtaatagtggaacggacgacttgctcaatgacccggatgagaatctctttaaccgattgtcgccactccttaacgtcgtattgtaacaatagttccctgaagcaattctccatatcgacatgcgtttggctactgagcgcacacagactcgaacgtatctcgtgccccagggatttttgcccatgcaaactctcaacaatcgcatgccctttcggaggttccccccatactttctccttcgtcttccctttacctgtacgcgcgcttactgtggcccatgtcgctcggcgcgcccagtcgagttccgcacggacggcattcttgcgttcctggtcaagggcggccatgaaaagggaatgtgatgcgatgtgtttgtaaagcgcttgtacggctgcgacaaggactgtttcatacttcgttccattctgatccgttgtccggttcagaatcccctgcatgactgaactccaagtttccgcatggtgttccaacgcatcgttggggctcggccaagagggaacaatctgtttatcatgcacatccagtctgagtagatgtggatcgtcgcgccatggctcgctggaattgcgcttccagcctggtcggaagcgtatggtatatacgattcgatctgactgcttttcacaataagagcagcggccttcacgaagattgcgctctccgttttcagagggtggcgccagccggacacacctagagcgccatgtgaatgccttcaaagggccgattggagttttttcgtcagcgccatcccagacggggcggtctttttcgacaggcatcaacctttgcaattcgcgtctgagagtaatgaaaaggttcggtccagcatgaaacgtatacgaaggcgtgtttccattcaagctcgcagtcatgctctgtctggcaccagcggtccccgcgctcgcaaggaccgaccagcgcacgagtgccagagcgcaacatcctaaacacagcccgtcgctgtcgtcgcgtatgtgacgaaagtgagcgatcttagacccggaagggaactcgtgcattaagttggaggcaccgacatccggcgttgccgcattgagatcctgatagaacctcttaccatcccccaatagattgaacgcggccttgtgttccttcagtctacccagccagttctccggtatgccggagttcttctcgtccaacgccgcaagggaagacttcgcgtcctctttgcaccacatgagcacggccaacagaaagcgcaagagggccaccctgtccatgggattactggcggctatctgccggatttcgcatgcatcggtcagcacctggcagatcccgacgcgatccgtcttcccattactgtaaagaacaggtatccacttctcttcaagcaggttgtacgccccttgtgttactggaaggcccatatgattttcctccttggcatgttgctgtggatttcacgaacctgcaaaccgcgctctgcataaagggacagcacctggagggagtaatccaccgaacaggtaaccgcgatcaattgatagaatgtgccggtttcccaaagatgttgaagccactggatgctggcgtccacgatggaccggttgcactccggagcgagggccactccatggctgaaccattcctcatcccgcagttgaagaacctcatcaagcgtgtgccgtctggcatctcctcgataggtgaaggagatctcctc

SEQ ID NO: 766 - DNA, 6932 bp, Artificial Sequence
  Synthetic Oligonucleotide
atgggcgttggagcaagttgccagcaattgcgagaaactcgactgggtccaactcgcgaaagacctatcctcttgggaacgtgaaaccacccgccttgaatgggcggaacaatttcttggaaacgaatgaaaggggacaatcatgttgatcgaaatccacgtaattcagaaccacagtccggccaatctcaaccgggacgacctgggggcacccaagacctgttacttcggcggcgtcctccgctcgcggatctccagccagtgtatcaaacgcagcatccgaatgagcgaacagttcgcgttgctgtgcggtggtattcgcacccggcggctgccgcagtaccttgcggacaagatcaaagacagggatgtactcccgcttgccacggccgtcgtgcagaagtgtgggttattgcagggcgagaaacaaggcaagaagcagaagaaggatgtcatcgtatttctgtcaaagagagcggcgacgcgtatgttggatctacttcgcaacggacctgagaaaccgagcgagaagcaagtggaggagcttgctggccagtttgcggcactgatagcggaggaacgctacgcgccggatatggccctgtctgggcgcatgctggagccggccaagccgcctaagaagggcaggaaaggcgagcccgacgatacaagcgaatcagagggcgatgaagaggacgatgaagaagaggcaaagaacaagggcgtatggaaaggacttgacctgaagatcgaggccgcgcttcaggtagcccacgcgatttctacgcatgaggcccgtccggaagttgactactttgtggctgcggatgatatcaagggcgaggatgctggcggcgcgcatattggagaagctctcttcgcctcggcctgtttctacaagtacttctcgatcgactgggacaagctggtcgagaatctaaatgacaacaaagaactggccgcacacacggtgggtgccttcattcaaggagcggcgagagccaatccgacaggaaaacagaacagttgcgcagcgcacaatccgcctgacggaatcctggtcgagatcaaggacgcccggaccccgattagctatgctaacgcctttgccgcgcctgtgccgagtaagggcgagcgcgacatgatttcgcagagcatcgtgcaattggcccagtacgttcacgatctcgataccggatacggcaaaccgaaaacacgtttctggttctcacccaatctccgtcacaccttgggtgttgttgaggacaagaaggagatcgcgcttgcagaaaacaacatcaagtcgctggacgagttgatccccgctgttatcaaagccatcgacgaaaagcttgattgggccgaagtgaaaaaggtagtcgtcaactcagaggtggccccatgagcgccaacacccttttccttcgcctggaaggtcccatgcaggcgtggggtgatcaggaatccaaattcctcatccggcggacggccgaggccccgaccaaatcgggcgtgatcggaatcctctgcgcgggactcggcgtttcacgcgccgatgccgccgccgagtggcttccaagactcagcgatccgcgtaatctgcgcatgggtgtccgagttgatgctccgggggtccgatggtgggactaccacacggtcggcgcgggaatgcagatgcgtactgccgagggcaagcacaaagacggggcgatgctcacgcggcgcgagtacctctgcgacgccagctttctcgtcgcttttcagggcgaaccggctctgatcgaaaaactggccgcggcgatgcaaagccccaagtggacgctctatctggggcgcaagtcctgtccgcctgggattcccattcttgtgatgcggaaacgccatggcgatgaccacactgcggacaaatgggagcctctgacagagcaccaccccggcctcgagtcggcgctcacatcggagtcggttccctggcgtccgcgcctcaagggagatatcgttccggaaaccgtggattgtctgctcgactggattccgacgcccgagcagcgcgaagcccccgatgatgcgctcatctggtacgacgtgccattaacgttcgagccgccttcacatcgccccagattcgttattcggcgccagttacgtgtaggcgagggcggcgaggtaaacatagcggagagtcctgcgcagagccatactccacgcccgccgcgcccgcgcgccaactacggtaacagcgagtacaagaggaggcgagaagaacggcttgccagcgactatcgcctctgtgtcttctgcaagtcgcccgcgaccaccgttcagcatgtcacctaccgccatgcgggcggcgatgaacgcctggacgagttgcgctccctctgccgcctgtgccacgacgccgtcaccatgatcgaatacggcctgggcatgggcatggaccgcatcaaccccgaagaggaacgttggcgggaccggatcatcaagaagcgtgacgaaatcatccgcttccgttcgctggaaacgcgccggcgcaagctcgccgcagaggaggtcgagtaatgtacctatcccatcttctgatcgacgtcgggggtaaccctgaccggcctaggcccggcagacgctggttgggtaatatctaccacgttcaccagcgcctctgcatggcgtttccgtcggaggcgcgcgtacagcgtgatggcgactttcttcaaccgttcaaagaggaggacttcccacttctccgcaacccggacgccaagcccgaagacccgcgccacagtttcttgttccgtatcgacaacagcacgaaagagaactctccgcgggcgattatccttgtccagtcggctttcaagcccgattggcactatgctttccacaacgcgaacgcgtttctcgccgccccgccggagtgcaagccgtacgatcccacatttacggctaaacaggaactccgcttccgaatccgcatcaatctgagcaagaaaggcaagaccagcaaagatggtgccgaccttcgaacaccgcgaaacggaaccgacaagaaaggccgtccgaaggaccaaggcaagcgcgtttcgctaacgtgggacgaggatcaaggaccggacgaagcgatccaggattggtttgccgggaagggtgagcatcacggctttgccctgcgcgactttcatctgctgcaagtagggtgggtcacgggatatcgaccgggaaagaaaaccccatgcgacgaacacgacgatgggcatcccgaacgcaggatgaaattccgatccgcactgttggaggggacgctcaccgtcaccgatgccgcagcccttcaacaggtcattgcatcggggatagggtcggcgaaagcctttggcttcggactgatgagccttctcccactctcctaagacaaggggttgcaaccccttgtctaccgagtgatgtgcgcacaccggaggtccgccatgagaacgcaagacctgcatgaacttccgaagatccgggacaagatgacgtacctttacgtcgagcattgccgcgtcgaccaggaggagaaggccatcgccatccatgacgccgccggcctgacgcctgtgccctgcgcgtcgctcacgttgctcatgctcgggcccggcacgaacataacccatgccgccgttctcacccttgccgattgtggatgtctcacggcctggtgcggtgagcaaggcgtgcgcttctacgctgccgggatgggcgaaacccggaacgccggaaaccttcttcatcaggccagtctctgttcgcaccgcgcttcgcgcatcaaggtcgtgaggcgcatgtacgagatgcgattcaaggaagacctcgatcccgcacttaccctgcagcagatccgagggcgagaaggcgtgcgcgtgcgcgaagcctatgcctgcgcctcacgcgaaaccggggtcgagtggaaaggccgctcctacgaccgaaaccaatggaagtccgccgatcccgtcaaccgggccctctccgccgccaactcctgcctgtacggcgtatgccatgccgcaatcgtcgccgcaggatactcgcccgcgctcggcttcatacacacgggaaagcaactctcattcgtttacgacatcgccgacctgtacaagtgcgacctcactgtacctctcgcgtttcaggtcgccgcggaatgctccaaggacatcgagcgcgaagcccggctccgatgccgcgacgcattcgccgaacaaggcatactccaacgcattgtcgacgacattgccttcacccttgccattccaccggaagagcaggaagaggccgatttcgacgccgaccccgcgctgcccggtggactctgggaccccgatcagggcgcatgtcccggcggcgtgcaatacgctcccgaagaaccgcccaaggagtagaaaaccatggtgatcatgatacttgaaaccgtccccgcaagcctccgaggacaactcacccgatggatgatcgaacccaaagcaggcgtctttatcggcaacatctccgctatggtccgacaaaagctctgggacaaagcctgccaaggtctccgcgaaggcggcgcaattctgatccacagcgcgaagaacgaacaaggcttcacgatcgacttctggggaaaaacctccagatggatgacaaactgggagggacttcaactggtaacaaggcccattgatccctaaaacacatgtgtattccccacgcacgtggggatgaaccgaagctgcgatggattgccggggggaagccgtggtattccccacgcacgtggggatgaaccggtggtggagttttggccgacgggatcgcggccgtattccccacgcacgtggggatgaaccgaagttcagccggacggcgggaaagctttgccggtattccccacgcacgtggggatgaaccggtgcgggagttgagtctggcagcgattggtgggtattccccacgcacgtggggatgaaccgacgtttctgaaagcggcggtggcggtgacggcgtattccccacgcacgtggggatgaaccgcggacggagattcatccggatggcacgacgtagtattccccacgcacgtggggatgaaccggcacggtctggcagggcgcggcgaggcagggcgtattccccacgcacgtggggatgaaccgacttgaagcgcgcggtctgggacgaggatcatgtattccccacgcacgtggggatgaaccgccagacgttcgggagcggccatttgaaaccgcgtattccccacgcacgtggggatgaaccgtccgcctccgtccacgaagcggacacaacgacgtattccccacgcacgtggggatgaaccgtacttgttcgacgtgatctgtggcgccaacgcgtattccccacgcacgtggggatgaaccgtcccccgcccgaacacgctgattaaactcccggtattccccacgcacgtggggatgaaccgacgatgtagctcgtgtgacccccaaactcgacgtattccccacgcacgtggggatgaaccggagatggtcggcgtgctgagggccgccgggaagtattccccacgcacgtggggatgaaccgaaaggacgagaggacagtgaggtccgggaagggtattccccacgcacgtggggatgaaccgatcttatcctgagtagaagagccgaaaaccgggtattccccacgcacgtggggatgaaccgcctatgaggctgagatggcgcgtcgtcgaggtgtattccccacgcacgtggggatgaaccgccgctgcgcatgcaacgtcacccgaaacggttgtattccccacgcacgtggggatgaaccgtgacagtcgtgacgggactccgcaaggcatgggtattccccacgcacgtggggatgaaccgcgggatgggaagagcgatttcggacaggttcggtattccccacgcacgtggggatgaaccggcccaacaatcgacgccacaaccattctccccgtattccccacgcacgtggggatgaaccggtgattttggacacggttccgcctgtgattacgtattccccacgcacgtggggatgaaccggagaagagggatctgagcgctctgggatacttgtattccccacgcacgtggggatgaaccggcggtgaagaggcggacgccggcggtgaggatgtattccccacgcacgtggggatgaaccggcgccccaaccgtcgccccatgggaggtaatcgtattccccacgcacgtggggatgaaccggacggtgtgcgatggcgaattggcggacgagtgtattccccacgcacgtggggatgaaccggcgctccgtactatcggatagccccctttggagtattccccacgcacgtggggatgaaccgccacgacggccagagcaagtatgagacgtgctgtattccccacgcacgtggggatgaaccgacggagcggtcggcggtgttggagatgtggcggtattccccacgcacgtggggatgaaccgtcaggcagggcattctcgcctttgtaaagctcgtattccccacgcacgtggggatgaaccgaggcacgataccgtgcggcggagtatacctgagcgacgattcccttcaaaccacagctctcgcaacgcgggacccaaaacccaatatccgaggcggttggcaaagggaccggcatctgagccggcatcctctgcgccaacatgctcacggaaaaactttgcatttgtctgggccgactatgttggcgcagagggcgccgattccgaaacgtgaaacagcatagacagcggggcataaaaagcggttttcgcaataaatgtcaagccaaccaccctcgtttcgcatgcggattcaagtggcaagtgcaacgggtgagtcgttgaaggcctcgcttggggttcgatatcgcaacttctttcga

SEQ ID NO: 767 - DNA, 6904 bp, Artificial Sequence
  Synthetic Oligonucleotide
aaggctcggttggcagggtccgccttgctccactcatcgcgcttatagctgcggcccgaccacgtgatgccggcttcctgggcggccttggcgtaggcatcgcgcacccgcacgccctccatgccgcggatttgctggagggtcagggcagggtcgaacttctccgaaaatcgcaactgatagaggcggcgcaccacctgcatatggaaaccctggtccgcccacagcctcgcctgatgcaggaagttggccgcgttgcgcgtctcgcccatgcccacggcgtagaagcggactccctcctccccgcaccaagccaccaggcacccatggtccgccaacacggagatggcggcgtgagtaatcgagacgcccggacccaacatcaggagagccagattggcacaggggaccggcaccttcccggcttgatcgtggacggcaatggcccgctcttcctgatcgacgtggcaatgctcgacgtacagataactccacccgtcactgaacttgggtagaacgtggagatcttgaattctcacagagcctccagcccgtgctgtagcgtcgatctccgatcgacggcggttgtagcgtcgatctccgatcgaccggggttgtagtcgatctccgatcgacgttacggcggtcggagaccgccgctacaaaaccaggcgatggatctcaccctggtacggccaatcttccgggcgcttgactaaaccggcccggaccggattctgccggacatattcatatttctcccgataggattcttgcgatctcaggacgtgatcgaaaaagtctttctcccaatgtgtgccctcgccctcatcttcccggaggactttggataaatccccgcgcagcgccttgatccatttccctaaaggtggggactcacgacaaaagccggcgaaaagatggatgtgatcaggcatgatcatgaagaacccgacccaaacaagaaaatcgctcgcccgttcggagaatctcgtgaattcccggtgaatcgcaggatttgccaacgagcgtttgcggtcctgcgtacacagcgtgagatagtagattgggctgcccgtatagagccagtccagtcgccgcaagcggggtttgaatttcatattggctcgatctccgctcaagaaatgttgcacggatccccgatcgacaagggattgtagcgtcgatctccgatcgacgtaccggcggtcggagaccgccgctacagcgagagcggcgccacggaaagcaggccgaagccgaaggctttgccgtgcccaacgccgcccacgatggtttctctgaagctgtccgcgtcctcaaccgtaagcgtcccctccaataacgccgagcgaaatttcatgcggccgcccgtcggcctcgggtcggatcggtctcctgcgccccacccgatctgcaagacccggaaagtttccacttggaatccaccttggccgcccttgccggcgaaccattttcgtatcacatcgtcgcggttctggtccttgtcccaggtcagcgccacgcgtttgccttgggccttcgggcggccccgcttatctgtcccctctcgcgtcctcgtaagatcaacgccctctgtgctggtttttatcttcttactcagattggcgcggatacggaagcgaagccgctgacccttctcaaagcgggggtcgaattcctgcacctgagggggagcggctagaggattcagaagaaaacgggcgttgtggaaggcgtagccccagtcaggctttacggcagagttagactggacgaggatcacgacccgcccgcccggttgcgggtcgatgcggaagagaaagccggagtcgccgtcacgtcttacatggacctggttgttggcaaagtccgcgggtttgaaaggcttgaggaagtggggatcgtgggatattcggtctttggatggaaacgccatgcaaaggcgctggtggacgtgatggaggtttcgcagccagagccgcccgggcctggggcggtcggggttggtgccgacgtcaatcaagaggcaggagaggtacatggctattccacctcctcagcggcaaggcgtctgcggcgagtctccagagagcggaacctgataatctcttcccgcttctcgatgatcttgtcgcgccaacggggctcttcggggttgatgcggtccaagcccattccgagcccgtactcgatcatggtcacggcgtcgtggcagaggcggcagagggagcgcaaatcgtcccggagttcgccgccgcccgcgcggcggtacgtgatgtgctgcacggtgctggcgggagacttgcaaaaaacgcacaagtgatagtcgtcgtcgagccgctccttgcgtcggtttttgtactctgtgttcgtgtaatccgctcttgggcgcggaggcggtggcgtgtcgctctgcggtggctgcaccgcaagtgttacgtcgccgtccgctccgacgcgcaactgcctgcggatgacgaatcggggttggtgcgacggcggctcgaatgtcaacggcacgtcgtaccagacgagcgcatcatcgggcgcctcgggctgctcgttggtgggttcccaatcaagcaggcaatcgacgggtcgcggctggggatcgtccttcagccgccgacgccaggggaccgattcgagggcagaaagcaagtcggggaattcacctcccggatgctccagcagagggcggcaaggggggcagcactttctgccgaggtagagtgtccacttgggcgctttgattgccgcctccagttcctcaatgaggtccggttcgccctgaagagcgacgagaaacgaggcgtcgcaaaggtattcgcggcgggtgagcatggctccggacttggttcccccctcggcggtacgcatcggcatccccgcacccaccgtgtgataatcccaccagcggacccctggcgcatcgacgcgtacgcccatgcgcagccgggccagccttggaagccagccttcgcgggcctctggccgggaaacgcccaatgccgcgcaaagcatcccgatgacgccggacttggtcggcgcctcggccgtgcgccgaatgacgaacttggattgctgatcgccccatgcctgaagaggaccttcaagccgaagtagcagcgtctttgcgctcatggggcacctccggattcaggaccactttcttggcctcctgccagtcgtaaccgatttccttgagtacagccgctatcagttcgtcaagagacttaacatctttgtcggcaagcgggacctcacgctgtttctgttttccgtcttcgctctccgtggtggtagccgtcaacggatagcggagatttggagagaaccagaaccgcttcgtcggcttgccgtatcccgtatctatgtcgttcacataatgggcaagctgcgccacgctctgcgagatgatgtcccgttcgccctgaggagccgccggtttggcgaaggcgttggcgtagctgatgggagtgtttctgacttccaccaacatcccgtcaggagggttgtgcgcggcaaaactattttgttttcccgtggggttggccaaggccgcggcgcgaatgaaggcgccgacggtatgggccgccagtttttcgtgattcgtcccgaagggcttcaggtttttgaccagcgtttcccaatgaatggagaaatacttgtagaaacatgccgaaccgaacatggcttcatccacgtaacctgcgcccgcgtcctcgccggggacatcatcggcggcgacatagtagtccacctcgggccgggcctcatgggtggaaatggcatgggcgacttgaagcgatgcctcaaccgtcgtgtctttgaggactcccgtttcaagcatcctgccgctcagcgccatgtccggcacggcgacggattcactgatgagcttgccgaactccgctgccaaggcctcgtccgtttttccgtcgccctgctggaggagttcggccatgcgtgtaatcgcctcttgggtggtgtaaaccagcatcttgctcctctcagcactttcctgttcgtcttctccttcctgtttttttgctttcttaggctccagcccgcaggctttgagaatgttctccgctcgcttcctgacgtctttgcccgtcaccttttccgcaatctctttcgccaactggcgggtgcgaactccgcccagcaattgtctgaactcctcactcatgcggatgctgcgcttaaggcactggctggaaatacgggagcgcaagactccgccaaaaaagcaagtcttgggcgcgcccaggtcatcccggttcaggttggccgggctgtgattctgaatggcgtgaatctggatcaacatgactctcctcctcttggacagttcaaaaattcctcggcccatttgagccgggtggattcgcgttcccagatggaaagatcgttcgtcagccgcacccagtcgagttcgaggtgcttggaagctatgaggtcgattgcccactgtagggcgggttcgatttcagcaagcggcagcgtgagcatcctgtcgaagcgttgctcgaaacgctgccgcgctgttttctcgcccggccgggatcgcccgagctggcgagcgagggtctcgcggggtgaatgctcgaggggccggagggcgtagagtttggcgacaagccaggccacctcacggcgaggcgcccgttgggtttgcgcccgcagcggccaccaaaggcctgcgaaaaggtcaaagccctctaccgattcgtcgagcccttgcccggcatggttgcgcaagagcccgagctcaccgggtttcagtcgagtcagaacttcgacgtactgctccgttggagtcacttgtcccccccttcgtctttgttgtttctctttggccgcatgtccggctttacagcggcaatttcttgtcgcctccggagggaagcggttgtgtagcccggggaaagcgatttggcgacggcggccatcaacggacgatattcctgggccgcctcttcccatgccttaccgccttctgcgatcatctcgtcgatttttccggaaaccgttgcctcggcttggggacgaacagcggcgactgcggagagaatttcaaggtgtcctctgtttcgtgaagtctctcgcggtttggctctgccaacgagcttccagccttccttctgccacgcctggatttcttgcaaactcgcctgaaccttcacgtcgtcgagcgcggccaagaattgaatctcccgctcggctgcttccaggtatttgtcgttctgcactgtcgcaaagctgacgacccacaacttactgttccccttcggcttttccccgcacaggattcccgccacgaccttcgtccacttcccagccgcagcgtcggccgggccaagcgcgctgaaaggcttcacaatctcgtcgccttcgctgatggtgtgcgggtcgttccagattcgtgccagactgccttcgcctgtctttgtgctcccaatacccgcaaagacacattgacgtatcagagcctccctgcgcccgcaggcgatgcagttggactctggtgtctccggagtgtctaaccagacgcgccgcggtacccacgttaatcctatcaataatggaacattgccgtgttgagggaggcttatgtccggattttcccatgtgggcgtgcccaggttcatctccgacgtcttccgccatgagaggcgcagggtttcggaaaggcagtcgcccatcggcacgatgtagatcggcggtttttgattgacgcccgggggcttgccgcgcccggccgacgtagcaaagagcggaaggcgcaacaagcccattgcgcagcatgccggacataagccgtttctgaaatctgtcccatgccggaagtgccagaagtttgtgccggtcggcacttcttgcatcagatagttgacggacagcttcttctcaagtcggttaggcttgcgttggtaaaaccgcttcccatcgccctgaaggttgaaacagtctttgttgtcatcgagtttcttgaaccaatcagagggaaacgaagaaatcgagttcttgtcgtccgggggattccctttgcaccaatagagcaacgcaagcaggaaacgcaggatggccaggcggtccattgggttgctggccgcgatttggcgaatccggcctgcttgcctaagggcctcactaatgcccacgcgaccgctgtgcccatctttccacagaacgggaatccacttttcttcgagcaggttgtactccacggcttcctccttgcctgggcaagaggcgggtggcaggcccgtcgcgccccggggggaccggaccgtccgctgcgtagctaccacaggacaatcatggcgaaggtatacacccgggacgcggcaaaggcaaggcccgaagaccacgacaacggttatcgcgtccgcttagcccacacttcacaggctgcaaggcgcgccgttgactaagcgcagaagctttgatgcctccgcggcgttccgattcggagggaatcttgcgatcgatttcgcgggtggcgcatacgtcccgacgggtttttgtcgggatgtatgcgcccctcggcatgtcgacaccttcatagcctcttgtccatgctcaagatcgaaccatcattccagaaatagaacctcccgccgcagcgcgaccacggccagtcgcccgggtgcttgaccagcactcgtttgacgggattgtcgcgcctgtgattcaatttctcgtctcgcttcttggggctccagatgttcatgtcgtagaacccaccccaacaatatatcgtccctgtggcgcatacatcccgacaaaaagaagctgtgaaaaaatcaagaaaatcgaaaaattaagaaattttcttgtcttagctatacagctatgatatattagcctctgaccgcacttccggcgggga

SEQ ID NO: 768 - DNA, 6889 bp, Artificial Sequence
  Synthetic Oligonucleotide
ccttcaagccttagtttaaggatgcttggtcataagtttgataccctcccattccgtaacgactcttgatgcggcaccccagaattcgatatcaaacccttgctcggtctgactactccagatcatcaggcaagttccaccgctgcaattgcttctaaccttatcccacagtttatctctaaccattgctgagactttacccacaaacaccccggcttttacttccagcagccaacgtgtgatcttacccctcagggagcttggcacattttccaatactaaaaccaccatcaatcttcctttggcagatcatcctgcccgtaagatatgccgcctggggaaacttctccatctggagaccagagtcctccaggcaaggctggttcttcggcaaaacagtcatccgggctatcctctggcataatatcaccgaagagagaactaatatccgcgacaatgcgtttgagtagattctgcctgtggaattcatcacggcaggcaagcctgactctgcggtcgagttcgccgatcccttcagcggtcgcccggaatgcggcgggagcagccatttccattttgtatagatccgcgatatcatagacaaatgacagttgcttgccagtgtggacaaagcccaatccgggagagaatcctgcagcaacaatggcagcgtgcgatatgccgtagaggcaggagtttgccacagataatgcccggtttatgggatccgctttattccagttgtctctttgatagtttctgccctgcatgggcacaccatacttttgggagagttggaaatatgtatcgcgcacccgggcaccttccttgcccctgatctggttcaaagttaaatcaggagaaagctcatcctggaacctcaactgatacatggagcgcacaacccgtaaatgcaaaaccgggtctgcccagtactttgcctgtttcataagattgacggcgctacgggttgtacctgtgcctgcggcatagaacctgacgccatgttcccccacccaggctaccagacagccacaggcagccagtgaaagtattgccgcatgggtgatggttatgcccggtcccagcatcagcatagccaagccggcacaaggaaccggggtttctcccagggcatcgtgaatggcgatggcttgcccgttctgatcaattttggcatgctccacatagagatagctaagccgatctctgatccgggggatagagtgcaggtctttattcatcattcctgattggcagaacggacagcaggccaaagccgaagcttttcgcttttccaatgccgcttctaagcgtttccaggaacagtttcgggtcatccactttgagaattccctccagtagagccgaacggaagcgcagaggattgtatgtgtgttcacgccagtagccctgtccctgttcctttgctttgacatttttaggttcaggcttggagccataaacccaacccagttgaagaagctcacagcgctgaagggtgaagcccagctttgggcttttggcagccagccagtcggcaagggcctgatccggggtggaagagggatcccaggtgagagaaacccttttgtgcaggatgttgccagtttctatggtttgaccgtcctgttgcaccttctcaggaatatgacggcgtacgctggcgtttacccgcagcctgaaccggagcagttgtcccgcttgaaactctggattatactcctttgtttccggtggcgctgccaggaaatcaagcgcgttttggaagcaataatcccaatccggctcaagaacggactggacgataataatcgcccttttatcgtttccgtcgatgttgttatcgacccggaaaaggaagggagttttttggaagtcgtttggcgaaaagggcttcaggaaatgcggatcctgctcccggcgcaaacctgaagggaacgccatggaaaggcggcggtggacgttatagatattgtccagccactttctgccggggcggggacggtctggattgcctccagtatcgatcaatagcttggacaagtagatcatccgttttcctcctctggcttcattttgcggaaacgctgcccgcgcgaacggaactcgactatatctttgcgctttgccagtattcgctcccgccatatggggtcgcaggggtcgatgcggtcggtggtcatgccggaaccgtattccagcatggtgcaggcgtcgtggcagaggcggcacagcgcccgcaggtcttccggtatttccttgcctcccgccctgcggtaattcacgtgttgaacagtcgtggcgggagctttgcataccatgcacgcggcatggtccatcacaagccgctccgccctgaccttcttatactcggaattgttataatccgcccgggttcctttgggcctccaaacgctggttccggtttccctgctcacttgcacatcctctcccacaaccagctcacgcctgatcacgaagcgcggcaaatggcggggcggctgaaaagaaaccggcagatcgtaatgaatctccgcgtcatcaggcgcatgttctccgtcctggctggggatccagtccatgacgcaaggcagtatttgcggcaggggttcattgtgccagcgcttttgcaggggaaccgcggacagcgcctcctccaaagtgttataaaagcccggagcatgctcgcccacgggacgtgaagggggacaggatttgcgccccagataaattgcccagaccggcttggccagagcggcggagagcttttccacaagttccggctcaccctgcaaggcgaccagaaaactggcgtcggcaagatattcgcggcgtgagagcaaggtctctgccctggtttttactttgcttggtgtcagggtatcagccagggcagctccaaccatggaaggttttttgggtgccttcagctctgccatgcgcattctttgtcccgctccaacagtatggaagtcccaccagcgtatgccggggcggtctatccgcacgcccatgcgcaggttggcgagttttgggagccatgaatcagcagcctccgcgcgcccaattcccatggccgcgcaaagcagccccaggacacctgattttgtgggagcgtcggtagtcctgcgcaaagcaaacttagcctcgttgctgccccaagactgcaaagccccctccaagcgcaagaataaggtgttgggtggcgcactcatgtcagccgccaacataagccttgcttttctgaacttcttcccacttgaagccgccaatataatccaacacagcgcctacaagctcattgaggttgccaatgtttctggaagccagtttggaatgctcattgccaagggaatagcgattgtttggagaaaaccagaagctgataactggggattgctcatcataatagccaagcctgatgtcgttcacgtagttggaaagctggccgatgctttgttccaccaggtccgattccttgaccacggaaactggcctgacgaatgcgttggcgtagctaataggggaattcttgaactcaacaaggatgccatcgggatagttatgagcggcgaagctgttctgtttgccactggggttggttttggctgcggcgaggagaaaggcacccacggtgtgggctgccagattcgtgtcccctttcaggttcttgaccaactgttcccaatcaatggagaagtatttgtagaaacaggctgaggcaaacatggattcgccaatatgacccgctccggcgtcttcaccgggaacatcatcggccgccacaaaatagtctatctcaggtctggcaatgtgggtggagatcgcatgtgcaacctgtagggcgccttcaacgccagtgtttttaagctatttggtctccagcatcctgccgcaaagtgctatatccggagaatggacgcagtttgtgagcagatctttgaactgcagcagtttttcgctttcacttagtttggagtcggaaagcagctttgccatttggcgcagggcatcataagtggtaaaaaccagcatgtcagatgtatcagccgcctgctgctcatcctgatcttcatcggcttccgcgggtatcttttcggacttttttgcagctttcttggaagatttggttttgattccgcaggcttcaagaaacttggcaaccagcttcttatctttgttttccagcatttcctcgagtttctctgccagacgccttgttcggatacctcctctaaggtccgcgaattccggggcaaaacggatgctgcgcttgatgcactggctggagatgcgagaacgtaatactccaccgaaataacaggtcttgggggcgcccaagtcgtcccggttaagatttgccgggctgtgattctgaatcatatgaatttcaatcaacatctgaatcctccttgttgatcttgtatgctttaataaatgaatccgaccattctcttttgacaggttcctgctcccaaaatgacagaacatcagtaagccctacccagtccaggcagacctgctggtgcttgcgcaaaatacccatgatgaccgacagcggctcttccatctgcataatgtcaagcgatgcgagttgatcaaagcgtgccaatacccggggtaattcctttttgggttccaacttccggcagatgcctcccataagaatgggcaatgtggctccctcgcgctgttcaaagcggaattcagcaaaaagtttggcgatcaaccaagccacttcacgcttgggagcgcgttgattcttttgccgcaaaggccaccatagggcggaaaacaggtcaaatccgggaagcttttcatcaagccgggctcccctgagttttctaagaatgcccaaatcgccttctttgaggttctccaggcttgcgatgaagtcaacggttcctctattcattctggtcctcctctgcgggttttgttttggattctggtataactggccagggcttgcgggaaatgaatttacctctcttgagcctggcgtccactgtttgagccggctccaaagagcatgcaaccttggtgagcagttctccgtattcagtatcggcatcctgccaggaatagcccctgttctcagtcattttacccgcattgatggcaattctgctttcggcgtgggggataatgtcagcaatctggggagtgcccactgactttttgaaatcacctctgagaggcttcttgcgcatggcattaagggcagtagccctgtttgccaattgagccagtagctcatcatttgtatcagttccctcaagctcgatgatcttgtcccagatgtctatgctttttgctttatcgctggcaaatccaaccaaccatagttttccttgtctggagtttccttccgcgtgcaaatagctgaacaacgggctataccaatcccggtccgcgaaagtgtatctatcattggacatcagtttgattttggactggagactttttccctgatcggtgtaaacaccatgagggtctttccatttaaggccttccggcactggttcaggttttatgctgcaggaatagacgagagctttggagggtaagccgcaggaacaacatgctgcctgacctgagacaggatcatgcagatgcaccttgcgcggcagccaggtcattccggcaagtaagcccactttcctgctttctttttgaaaagaacccaaccatgccggaatccccatattatcccagggttgccaattttgaaccagcatgccagcgaggtcatttgcatgccagagcaggtaaaatggaggagtgttgttgattcccgcgcctatccctctgccaccgacagtggtaaagacaggtaatctcagcagtcccttgatgcagcaagcttcgcagagcccatcgatatagtcggtgacatgattgaaatggcataggttgtgagctgttggtatctcatgaataaggtcggtaatggctctgatcctggaactgggatcggcttggaaaaatctctgtccatccccaaaaagctcgaaataccccttgttttcttccagccaggatatccaggaggtcggaagcggcttatcaggttcaggctccccgttggtgttggcgaaacaccagtagccaagagcaagcaggaatctgaaaacagcgaaccggtccataggattgctgtatgccagttgcagacagtgtgcgtcttcaagagtttgaactaaagatattctatctggtttgcccgaaagatagaccacgtttacccaattatcacaaagaagattgtacataacatgctccttttgttcgataggaaccttatatttaagccaaagatcattgtcaagaaatttgctttgcggattttgggttaggaaagatcaatttggggcggtatcttgttactttcaaggtgttccatgcggcggcttccactcccattttacggagccccaccagcggctttttcagcgcagttttcccgctgctgatacttggcttgttggaaagaaccgccgtgtgtaatgcgcggcggttcaagttaattatcggacttggaagggcggctgtccgtcacttcagcaatatcattttgcggctggcgctcgtctttccggtgctgaggcggtagatatagactccgcttgccagttgggcgccgttggagtcggtgccgtcccagttcaggctgtgttttccggctcccatctctttgtccagtagggtgctttacatgaaaactcccgggaaaaaagcgtaaaaaaacccctactggtgaaatgatgaccactagtgtaatatggaaagagcagagaacaacctgtgctgtctacaatgcgttatataagaatatagctttacattcgggcatatgcctaatggcaagtcccagctggtagtc

SEQ ID NO: 769 - DNA, 6889 bp, Artificial Sequence
  Synthetic Oligonucleotide
ccttcaagccttagtttaaggatgcttggtcataagtttgataccctcccattccgtaacgactcttgatgcggcaccccagaattcgatatcaaacccttgctcggtctgactactccagatcatcaggcaagttccaccgttgcaattgcttctaaccttatcccacagtttatctctaaccattgctgagactttacccacaaacaccccggcttttacttccagcagccaacgtgtgatcttacccctcagggagcttggcacattttccaatactaaaaccaccatcaatcttcctttggcagatcatcctgcccgtaagatatgccgcctggggaaacttctccatctggagaccagagtcctccaggcaaggctggttcttcggcaaaacagtcatccgggctatcctctggcataatatcaccgaagagagaactaatatccgcgacaatgcgtttgagtagattctgcctgtggaattcatcacggcaggcaagcctgactctgcggtcgagttcgccgatcccttcagcggtcgccctgaatgcggcgggagcagccatttccattttgtatagatccgcgatatcatagacaaatgacagttgcttgccagtgtggacaaagcccaatccgggagagaatcctgcagcaacaatggcagcgtgcgatatgccgtagaggcaggagtttgccacagataatgcccggtttatgggatccgctttattccagttgtctctttgatagtttctgccctgcatgggcacaccatacttttgggagagttggaaatatgtatcgcgcacccgggcaccttccttgcccctgatctggttcaaagttaaatcaggagaaagctcatcctggaacctcaactgatacatggagcgcacaacccgtaaatgcaaaaccgggtctgcccagtactttgcctgtttcataagattgacggcgctacgggttgtacctgtgcctgcggcatagaacctgacgccatgttcccccacccaggctaccagacagccacaggcagccagtgaaagtattgccgcatgggtgatggttatgcccggtcccagcatcagcatagccaagccggcacaaggaaccggggtttctcccagggcatcgtgaatggcgatggcttgcccgttctgatcaattttggcatgctccacatagagatagctaagccgatctctgatccgggggatagagtgcaggtctttattcatcattcctgattggcagaacggacagcaggccaaagccgaagcttttcgcttttccaatgccgcttctaagcgtttccaggaacagtttcgggtcatccactttgagaattccctccagtagagccgaacggaagcgcagaggattgtatgtgtgttcacgccagtagccctgtccctgttcctttgctttgacatttttaggttcaggcttggagccataaacccaacccagttgaagaagctcacagcgctgaagggtgaagcccagctttgggcttttggcagccagccagtcggcaagggcctgatccggggtggaagagggatcccaggtgagagaaacccttttgtgcaggatgttgccagtttctatggtttgaccgtcctgttgcaccttctcaggaatatgacggcgtacgctggcgtttacccgcagcctgaaccggagcagttgtcccgcttgaaactctggattatactcctttgtttccggtggcgctgccaggaaatcaagcgcgttttggaagcaataatcccaatccggctcaagaacggactggacgataataatcgcccttttatcgtttccgtcgatgttgttatcgacccggaaaaggaagggagttttttggaagtcgtttggcgaaaagggcttcaggaaatgcggatcctgctcccggcgcaaacctgaagggaacgccatggaaaggcggcggtggacgttatagatattgtccagccactttctgccggggcggggacggtctggattgcctccagtatcgatcaatagcttggacaagtagatcatccgttttcctcctctggcttcattttgcggaaacgctgcccgcgcgaacggaactcgactatatctttgcgctttgccagtattcgctcccgccatatggggtcgcaggggtcgatgcggtcggtggtcatgccggaaccgtattccagcatggtgcaggcgtcgtggcagaggcggcacagcgcccgcaggtcttccggtatttccttgcctcccgccctgcggtaattcacgtgttgaacagtcgtggcgggagctttgcataccatgcacgcggcatggtccatcacaagccgctccgccctgaccttcttatactcggaattgttataatccgcccgggttcctttgggcctccaaacgctggttccggtttccctgctcacttgcacatcctctcccacaaccagctcacgcctgatcacgaagcgcggcaaatggcggggcggctgaaaagaaaccggcagatcgtaatgaatctccgcgtcatcaggcgcatgttctccgtcctggctggggatccagtccatgacgcaaggcagtatttgcggcaggggttcattgtgccagcgcttttgcaggggaaccgcggacagcgcctcctccaaagtgttataaaagcccggagcatgctcgcccacgggacgtgaagggggacaggatttgcgccccagataaattgcccagaccggcttggccagagcggcggagagcttttccacaagttccggctcaccctgcaaggcgaccagaaaactggcgtcggcaagatattcgcggcgtgagagcaaggtctctgccctggtttttactttgcttggtgtcagggtatcagccagggcagctccaaccatggaaggttttttgggtgccttcagctctgccatgcgcattctttgtcccgctccaacagtatggaagtcccaccagcgtatgccggggcggtctatccgcacgcccatgcgcaggttggcgagttttgggagccatgaatcagcagcctccgcgcgcccaattcccatggccgcgcaaagcagccccaggacacctgattttgtgggagcgtcggtagtcctgcgcaaagcaaacttagcctcgttgctgccccaagactgcaaagccccctccaagcgcaagaataaggtgttgggtggcgcactcatgtcagccgccaacataagccttgcttttctgaacttcttcccacttgaagccgccaatataatccaacacagcgcctacaagctcattgaggttgccaatgtttctggaagccagtttggaatgctcattgccaagggaatagcgattgtttggagaaaaccagaagctgataactggggattgctcatcataatagccaagcctgatgtcgttcacgtagttggaaagctggccgatgctttgttccaccaggtccgattccttgaccacggaaactggcctgacgaatgcgttggcgtagctaataggggaattcttgaactcaacaaggatgccatcgggatagttatgagcggcgaagctgttctgtttgccactggggttggttttggcagcggcgaggagaaaggcacccacggtgtgggctgccagattcgtgtcccctttcaggttcttgaccaactgttcccaatcaatggagaagtatttgtagaaacaggctgaggcaaacatggattcgccaatatgacccgctccggcgtcttcaccgggaacatcatcggccgccacaaaatagtctatctcaagtctggcaatgtgggtggagatcgcatgtgcaacctgtagggcgccttcaacgccagtgtttttaagctctttggtctccagcatcctgccgcaaagtgctatatccggagaatggacgcagtttgtgagcagatctttgaacagcagcagtttttcgctttcacttagtttggagtcggaaagcagctttgccatttggcgcagggcatcataagtggtaaaaaccagcatgtcagatgtatcagccgcctgctgctcatcctgatcttcatcggcttccgcgggtatcttttcggacttttttgcagctttcttggaagatttggttttgattccgcaggcttcaagaaacttggcaaccagcttcttatctttgttttccagcatttcctcgagtttctctgccagacgccttgttcggatacctcctctaaggtccgcgaattccggggcaaaacggatgctgcgcttgatgcattggctggagatgcgagaacgtaatactccaccgaaataacaggtcttgggggcgcccaagtcgtcccggttaagatttgccgggctgtgattctgaatcatatgaatttcaatcaacatctgaatcctccttgttgatcttgtatgctttaataaatgaatccgaccattctcttttgacaggttcctgctcccaaaatgacagaacatcagtaagccctacccagtccaggcagacctgctggtgcttgcgcaaaatacccatgatgaccgacagcggctcttccatctgcataatgtcaagcgatgcgagttgatcaaagcgtgccaatacccggggtaattcctttttgggttccaacttccggcagatgcctcccataagaatgggcaatgtggctccctcgcgctgttcaaagcggaattcagcaaaaagtttggcgatcaaccaagccacttcacgcttgggagcgcgttgattcttttgccgcaaaggccaccatagggcggaaaacaggtcaaatccgggaagcttttcatcaagccgggctcccctgagttttctaagaatgcccaaatcgccttctttgaggttctccaggcttgcaatgaagtcaacggttcctctattcattctggtcctcctctgcgggttttgttttggattctggtataactggccagggcttgcgggaaatgaatttacctctcttgagcctggcgtccactgtttgagccggctccaaagagcatgcaaccttggtgagcagttctccgtattcagtatcggcatcctgccaggaatagcccctgttctcagtcattttacccgcattgatggcaattctgctttcggcgtgggggataatgtcagcaatctggggagtgcccactgactttttgaaatcacctctgagaggcttcttgcgcatggcattaagggcagtagccctgtttgccaattgagccagtagctcatcatttgtatcagttccctcaagctcgatgatcttgtcccagatgtctatgctttttgctttatcgctggcaaatccaaccaaccatagttttccttgtctggagtttccttccgcgtgcaaatagctgaacaacgggctataccaatcccggtccgcgaaagtgtatctatcattggacatcagtttgattttggactggagactttttccctgatcggtgtaaacaccatgagggtctttccatttaaggccttccggcactggttcaggttttatgctgcaggaatagacgagagctttggagggtaagccgcaggaacaacatgctgcctgacctgagacaggatcatgcagatgcaccttgcgcggcagccaggtcattccggcaagtaagcccactttcctgctttctttttgaaaagaacccaaccatgccggaatccccatattatcccagggttgccaattttgaaccagcatgccagcgaggtcatttgcatgccagagcaggtaaaatggaggagtgttgttgattcccgcgcctatccctctgccaccgacagtggtaaagacaggtaatctcagcagtcccttgatgcagcaagcttcgcagagcccatcgatatagtcggtgacatgattgaaatggcataggttgtgagctgttggtatctcatgaataaggtcggtaatggctctgatcctggaactgggatcggcttggaaaaatctctgtccatccccaaaaagctcgaaataccccttgttttcttccagccaggatatccaggaggtcggaagcggcttatcaggttcaggctccccgttggtgttggcgaaacaccagtagccaagagcaagcaggaatctgaaaacagcgaaccggtccataggattgctgtatgccagttgcagacagtgtgcgtcttcaagagtttgaactaaagatattctatctggtttgcccgaaagatagaccacgtttacccaattatcacaaagaagattgtacataacatgctccttttgttcgataggaaccttatatttaagccaaagatcattgtcaagaaatttgctttgcggattttgggttaggaaagatcaatttggggcggtatcttgttactttcaaggtgttccatgcggcggcttccactcccattttacggagccccaccagcggctttttcagcgcagttttcccgctgctgatacttggcttgttggaaagaaccgccgtgtgtaatgcgcggcggttcaagttaattatcggacttggaagggcggctgtccgtcacttcagcaatatcattttgcggctggcgctcgtctttccggtgctgaggcggtagatatagactccgcttgccagttgggcgccgttggagtcggtgccgtcccagttcaggctgtgttttccggctcccatctctttgtccagtagggtgctttacatgaaaactcccgggaaaaaagcgtaaaaaaacccctactggtgaaatgatgaccactagtgtaatatggaaagagcagagaacaacctgtgctgtctacaatgcgttatataagaatatagctttacattcgggcatatgcctaatggcaagtcccagctggtagtc

SEQ ID NO: 770 - DNA, 6855 bp, Artificial Sequence
  Synthetic Oligonucleotide
aacatcagttttgaactgcctcagcccggccctgcccggctggaaatcttcgacctccgcggaaggctggtaagcaccctactggacaaggagatgggagccggaaaacatagcctgaactgggacggcaccgactccaacggcgcccaactggcaagcggagtctatatctaccgcctcagcacgggaaggacgagcgccagccgcaaaatgatattgctgaagtgacgggcatccgcccttccaagtccgatctttataccgagccgccgcgtgtattgcgcggcggtttgctttccgcagaccaagtattagcagcgggaaaactgcaatgaaatagccgctggtggggctccgtaaaatgggagtggaagccgccgcatggaacaccttgaaagtaacaagagaccgccccaaattgacctttcctgacctaataacccctcaaagcaaatttcttgacaatgatctttggctaaaatataaggttcccatcgagcaaaaggagcatgttatgtacaatcttctttgtgataattgggtaaacgtggtctatctttcgggcaaaccagatagaatatctttagttcaaactcttaaagacgcacactgtctgcaactggcatacagcaatcctatggaccggttcgctgtcttcagattcctgcttgctcttggctactggtgtttcgccaacaccaacgtggagcctgaacctgataagccgcttccggtctcctggataccctggctggaagaaaacaaggagtatttcgagctttttggtgatggaaagagatttttccaagccgatcccagttccaggatcagagccattaccgaccttattcatgagataccaacagctcacaacctatgccatttcaaacatgtcaccgactatatcgatgggctctgcgaagcttgctgcatcaagggactgctgagattacctgtctttaccactgtcggtggcagagggataggcgctggaatcaacaacactcctccattttacctgctctggcatgcaaatgatctcgctggcatgctggctcaaaattggcaaccctgggataatatggggattccggcatggttgggttcttttcaaaaagaaagcagggaagtaggcttacttgctggaatgacctggctgccgcgcaaggtgtatctgcatgatcctgtcccaggtcaggcagcatgttgttcctgcggcttaccctccgaagctctcgtctattcctgcagcatagaagtggagccagtgccaaagggacttgagtggaaagaccctcatggtgtttacaccgatcagggaaaaagtctccagtccaaaatcaaactgatgtccaatgatagatacactttcgcggaccgggattggtatagcccgttgttcagctatttgcacgcggaaggaaactccagacaaggaaaactatggttggttggatttgccagcgataaagcaaaaagcatagacatctgggacaagatcatcgagcttgagggaactgatacaaatgatgagctactggctcaattggcaaacagggctactgcccttaatgccatgcgcaagaagcctctcagaggtgatttcaaaaagtcagtgggcactccccagattgctgacattatcccccatgccgaaagcagaattgccctcaatgcgggtaaaatgactgagaacaggggctattcctggcaggatgccgatactgaatacggagaactgctcaccaaggttgcatactctttggagccggctcaaacagtggacgccaggctcaagagaggtaacttcatttcccgcaagccctggccaattataccagaatccaaaacaaaacccgcagagggggaccagaatgaatagaggaaccgttgacttcattgcaagcttggagaacctcaaagaaggcgatttgggcattcttagaaaactcaggggagcccggcttgatgaagagcttcccggatttgacctgttttccgccctatggtggcctttgcggcaaaagaatcaacgcgctcccaagcgtgaagtggcttggttgatcgccaaactttttgctgaattccgctttgaacagcgcgagggagccacattgcccattcttatgggaggcatctgccggaagttggaacccaaaaaggaattaccccgtgtattggcacgctttgatcaactcgcatcgcttgacattatgcagatggaagagccgctgtcggtcattatgggtatcttgcgcaagcaccagcaggtctgcctggactgggtagggcttactgatgttctgtcattttgggagcaggaacctgtcaaaagagaatggtcggattcatttattaaagcatacaagatcaacaaggaggattcagatgttgattgaaattcatatgattcagaatcacagcccggcaaatcttaaccgggacgacttgggcgcccccaagacctgttatttcggtggagtattacgttctcgcatctccagccaatgcatcaagcgcagcatccgttttgccccggaattcgcggaccttagaggaggtatccgaacaaggcgtctggcagagaaacttgaagaaatgctggaaaacaaagataagaagctggttgccaagtttcttgaagcctgcggaatcaaaaccaaatcttccaagaaagctgcaaaaaagtccgaaaagatacccgcggaagccgatgaagatcaggatgagcagcaggcggctgatacatctgacatgctggtttttaccacttatgatgccctgcgccaaatggcagagctgctttccgactccaaactaagtgaaagcgaaaaactgctgcagttcaaagatttgctcacaaactgcgtccattctccggatatagcactttgcggcaggatgttggagaccaaagagcttaaaaacactggcgttgaaggcgccctacaggttgcacatgcgatctccacccacattgccagacctgagatagactattttgtagcggccgatgatgttcccggtgaagacgccggggcgggtcatattggcgaatccatgtttgcctcagcctgtttctacaaatacttctccattgattgggaacagttggtcaagaacctgaaaggggacacgaatctggcagcccacaccgtgggtgcctttctcctcgctgctgccaaaaccaaccccagtggcaaacagaacagcttcgccgctcataactatcccgatggcatccttgttgagttcaagaattcccctattagctacgccaacgcattcgtcaggccagtttccgtggtcaaggaatcggacctggtggaacaaagcatcggccagctttccaactacgtgaacgacatcaggcttggctattatgatgagcaatccccagttatcagcttctggttttctccaaacaatcgctattcccttggctataagcattccaaactggcttccagaaacattggcaacctcaatgagcttgtaggcgctgtgttggattatattggcggcttcaagtgggaagaagttcagaaaagcaaggcttatattggcggctaacatgagtgcgccaccaaagaccttattcttgcgcttggagggggctttgcagtcctggggcagcaacgaggctaagtttgctttgcgcaggactaccgacgctcccacaaaatcaggtgtcctggggctgctttgtgcggccatgggaattgggcgcgcggaggctgctgattcatggctcccaaaactcgccaacctgcgcatgggcgtgcggatagaccgccccggcatacgctggtgggacttccatactgttggagcgggacaaagaatgcgcatggcagagctgaaggcacccaaaaaaccttccatggctggagctgccctggctgaaaccctgacaccaagcaaagtaaaaaccagggcagagaccttgctctcacgccgcgaatatcttgccgacgccagttttctggtcgccttgcagggtgagccggaacttgtggcaaagctctccgccgctctggccaagccggtctggacaatttatctggggcgcaaatcctgtcccccttcacatcccgtgggcgagcatgctccgggcttttacaacactttggaggaggcgctgtccgcggttcccctgcaaaagcgctggcacaatgaacccctgccgcaaatactgccttgcgtcatggactggatccccagccaggacggagaacatgcgcctgatgacgcggagattcattacgatctgccggtttcttttcagccgccccgccatttgccgcgcttcgtgatcaggcgtgaactggttgtgggagaggatgtgcaagtgagcagggaaaccggaaccagcgtttggaggcccaaaggaacccgggcggattataacaattccgagtataagaaggtcagggcggagcggcttgtgatggaccatgccgcgtgcatggtatgcaaagctcccgccacgactgttcaacacgtgaattaccgcagggcgggaggcaaggaaataccggaagacctgcgggcgctgtgccgcctctgccacgacgcctgcaccatgctggaatacggttccggcatgaccaccgaccgcatcgacccctgcgaccccatctggcgggagcgaatactggcaaagcgcaaagaaatagtcgagttccgttcgcgcgggcagcgtttccgcaaaatgaagccagaggaggaaaacggatgatctacttgtccaagctattgatcgatactggaggcaatccagaccgtccccgccccggcagaaagtggctggacaatatctataacgtccaccgccgactttccatggcgttcccttcaggtttgcgccgggagcaggatccgcatttcctgaagcccttttcgccaaacgacttccaaaaaactcccttccttttccgggtcgataacaacatcgacggaaatgataaaagggcgattattatcgtccagtccgttcttgagccggattgggattattgcttccaaaacgcgtttgatttcctggccgcgccgccggaaacaaaggagtataatccagagtttcaagcgggacaactgctccggttcaggctgcgggtaaacgccagcgtacgccgttatattcctgagaaggtgcaacaggacggtcaaaccatagaaactggcaacatcctgcacaaaagggtttctctcacctgggatccctcttccaccccggatcaggcccttgccgactggctggctgccaaaagcccaaagctgggcttcacccttaagcgctgtgagcttcttcaactgggttgggtttatggctccaagcctgaacccaaaaatgtcaaagcaaaggaacaggggcagggatactggcgtgaacacacatacaatcctctgcgcttccgttcggctctactggagggaattctcaaagtggatgacccgaaactgtttctggaaacgcttagcagcggcattggaaaagcgaaaagcttcggctttggcctgctgtccgttctgccaatcaggaatgatggttaaagacctgcactctatcccccggatcagagatcggcttagctatctctatgtggagcatgccaaaattgatcagaacgggcaagccatcgccattcacgatgccctgggagaaaccccggttccttgtgccggcttggctatgctgatgctgggaccgggcataaccatcacccatgcggcaatactttcactggctgcctgtggctgtctggtagcctgggtgggggaacatggcgtcaggttctatgccgcaggcacaggtacaacccgtagcgccgtcaatcttatgaaacaggcaaagtactgggcagacccggttttgcatctacgggttgtgcgctccatgtatcagttgaggttccaggatgagctttctcctgatttaactttgaaccagatcaggggcaaggaaggtgcccgggtgcgcgatacctatttccaactctcccaaaagtatggtgtgcccatgcagggcagaaactatcaaagagacaactggaataaagcggatcccataaaccgggcattatctgtggcaaactcctgcctctacggcatatcgcacgctgccattgttgctgcaggattctctcccggattgggctttgtccacactggcaagcaactgtcatttgtctatgatatcgcggatctatacaaaatggaaatggctgctcccgccgcattccgggcgaccgctgaagggatcggcgaactcgaccgcagagtcaggcttgcctgccgtgatgaattccacaggcagaatctactcaaacgcattgtcgcggatattagttctctcttcggtgatattatgccagaggatagcctggatgactgttttgccgaagaaccagcattgcctggaggactctggtctccagatggagaagtttccccaggcggcatatcttacgggcaggatgatctgccaaaggaagattgatggtggttttagtattggaaaatgtgccaagctccctgaggggtaagatcacacgttggctgctggaagtaaaagccggggtgtttgtgggtaaagtctcagcaatggttagagataaactgtgggataaggttagaagcaattgcaacggtggaacttgcctgatgatctggagtagtcagaccgagcaagggtttgatatcgaattctggggtgccgcatcaagagtcgttacggaatgggagggtatcaaacttatgaccaagcatccttaaactaaggcttgaaggtgttcaatgacctcttagacctctattgatcaagtgtattccccatgcatgtgggggtgaacc

SEQ ID NO: 771 - DNA, 6840 bp, Artificial Sequence
  Synthetic Oligonucleotide
ctcgacgcgttccttcagcagcgtgcggaccaggtcgcctttgtcattggggtcctggcgcatggactgaaaggctgccgggaaactggttatttccttgtacaggtccgccacatcatagataaagggcaacgtgccggcgtcgtgaacgaatcccagagacggcaggtaacccagcgagcagagtacggcggcgcacaaggcgtaaaggctggcattggccgtcgagagggcgcgattgatgttgtccgccagattccagttggatttgtcgtagttgcgccccttccaggtgactccgtactgctcgccgagttccgcgtatttggcgggcacgcgcaagccctccattccccgcaattcggtgacggaatacgcctgcacatccacaccgggaaagcgctgcacaaacatgcggcgggcgatctcggcgcgctgcttcggggctcgctttggcgtcagaactctcacgttgcctctgccgggagtggtgtgcgaggggctacggaaagaagcccgaagccgaaggctttgccgtgcccgatgccgcccacgatggtttctctgaagctatccgcgtctttaaccgtaagcgtcccctccaataaggctgagcgaaatttcatgcgatcgcccgccggcctcgggtccgatcggtttcctgcgccccacccgatttgcaagacgcggaaagtttccacctggaagccaccttggtcgcccttggcggcgaaccattttcgtatcacatcgtcggggttctggtccttatcccaggtcagcgctacgcgtttgctttgggccttcgggcggccttggcgatctgttccctcgcccgccttggtaagatcgacgccctttgcgctcgtttttaacttcttgcttagattgatgcggatgcggaaccgaagctgttggcccttggcgaagcgagggtcgaattcctctacctgcgggggagcagccagaggattcaaaagaaaacgggcgttgtggaaggcgtagtcccaatccggcttcacggcggagttggactggacgagaatcacgacccgcccggcgggctgcggctcaatgcgaaaaagaaagccggaacccgccccgcgttctacctgaaccggcttctcgccaaagtccgcgggtttgaaaggcttaagaaaatcgcgatcatgggattttcggttctcggagggaaacgccatccaaaggcgctggtggacgtgatagagattccgaagccacagccttccgggccgaggccggtcggggttactcccgacgtcaatcaaaaggcaggaccggtacatggctactccacctcctcggcgaccaggcgcctgcggcgagtctccagggagcggaacgtgatgatttcgttccgcttttggataatcaagtcgcgccaacgcggctcttccgggttgatgcggtccatgcccatgcctaggccatattcgatcatggtgacggcatcgtggcagaggcgacagagagagcgcaagtcatccgcgagttcattgccacccgcgcggcgataggtgatgtgctggacggtggtggcgggcgacttgcaaaagacgcacaagtgatagtcgtcgtcgagccgcttttcccgtcggattctgtactcggtattagtgtaatccgctcttgggcggggaggcgctggcgtgtagctctgtgctggctgagttgcaagcgttacttcgccgtcgagtccaacgcgcagttgcttgcgaatgacaaatcggggctggtgggagggcgggtcgaaggtcacgggcacgtcgtaccagacgagcgcatcatcgggagcctccggctgctcttcggttgacttccaatcaagcaggcaatccagcgcttcgggctgatcgtctccctccaacctcttgcgccagggaaccgatttgagggcagaaagcaagtcaggaaattcaccccccggatgctccagtaaagggcgcgagggagggcagcactttctgcccagatagagcgtccatttgggcgctttaattgcggactccagttcggcaatgaggtccgactctccctgaaaagcgacgagaaacgaggcgtcgcaaaggtattcgcggcgggtcagcacggcccctggcttggttccaccttcggcagtgcgcatcggcatcccggcgcccaccgtgtgataatcccaccagcggacccccggcacatcgatgcggacgcccatgcgcaggcggctaagccttggaagccagccttccggcgccgccgagcgggagacgcccaacgccgcgcaaagcatccccatgacgccagacctggttggggcgtcagccgtccgccgaatcacaaacttcgactgctgatcgccccatgcctgaaggggggcttcgaggcggagaaagagggtatttgcgctcatcaggccacctccgagttcacaaccactttctgaacctcctcccaatcatggccgattcccttgatgactgcctcgatcaattcctcgagcgacttgatattgttttcggccaaggcgttttccttatccccctccgtaacggtcaagggatagcgaagattgggcgagaaccagaaccgcctcgttggtttgccgtatccggtgtcgatatcgtgaacgtactggccgagttgcgcgacgctctgggatatgatgtctcgttcgccctgggctatggctggtcgggcaaaagcgttggcatagctgagaggtgagtttctgatttcgaccagcattccgtcgggtgggttgtgcgcggcgaaactattctgtttgcccgtgggattcaccaacgccgctccccggatgaacgcgccgacagtatgagcggccagttccttgttgcccttcagattgttgatgagggtttcgaagtcaatcgaaaaatacttgtagaagcaggcggagccgaacattgcttcatctacaaagcctgctcccgcgtcttcaccgggcacatcatcagcggccacatagtagtcaatctccgggcgagccgcgtgagtagaaattgcgtgggcaacttgcagcgccgcctcaacggttgtgtcaagtcccttccagacgtcgccgcccttgggcttcgcgccgccttcctccgacgcctgctttttcgctttctttggttccagcattctgccacagagtgccatgtccggggtgctcgtatggcgagcgattatctgggcaaattccttggcgagctcgttatcggtcttggccgacttggttttcagaagctcagacatctcgttgaccgcttgtttgctcacataaaccactccggcgcttttttcgtcgggcgtagattcctcgtcgtcgcctttcttccctttcttctcttttgccgcgatgccgcagatttctaaaaccgcgatcgcctttttaaactcggcggtatccgggccgcctggagcgatcaattgcgccagtcgccgtgtgcgaacgccgccgagcaactgcttgaattcgtcactcatgcggatgctccgcttgaggcactgactggaaatacgggagcgcagtactccgccgaagtagcaggtcttgggagcgcccaagtcgtcccggttcaggttggccgggctgtgattttgaatggcatgaatttcaattaacatgacggtcctccttcgaagacttcaagaattcctcggcccacttgagccgggtggtttcgcgttcccaaatggaaagatcgtttgtcagcgtcacccagtcgagcttcgggtttttggaggcgatgaggttaagcgaccattgcaaggccggctcgagtatatcaaccggcaaggtcagcatcctgtcgaacctttccgcgacagggtctttctcggggtcattgtcgttccggtaccgcccaagctgccacgcaagcgtctgcccgggtgaatgctcgatcggccggaaggcatagagttttgcgataagccacgccaccgcacggcggggcgcgcgctgattcctctcccgcaacggccaccagagccccgcgaagaggtcaaaggcatcgaccgattggtcgagcccttgcccggcatgctcgcgcaggagtccgagatcaccggacttcagatgtgtcaggacgtcgacgtattgctccgttggagtcatttgtcgcctcccttcttccgtccggccctcccggccggtggggtgcctggctgcatgttcggccttacattgacaatctggcgtcgccgccggagcgcagcggtggtatagcccggggaaagcgatttggcgacggcggccatcatcggcctatattcccgggctgcctgctcccacgcatcgcggcctcgcgaaatcaactcgccgaccttcccggagacctttgcttctacgtgcgggcgaactgcggcgaccatgggaggaatttcaagatgtcttcgggaagtccctctcggtttggctttgccggcaagcttccggccctccttttgccacatgtcaatcgtttcgacactctccgcgacctgccgatcatctagcgtgctcgggagaggaatctcatattccatcgcttccaggtacttgtcgttctgcaccgtcgcaaagctgacgacccacaagcctcttttgccattgggctttttctcccgaagaattcccgccgctatccttgcccattgcccagccgccgcgtcggttgcaccaagggcattgctgggtttaatgacatcctcgccgtcagtgatggtgtgcgggtcgctccatacgcggcccaggccattttcatccgtttttgcgctgccgacaccagcaaacacacattggcgtattagaggcgctttacgtccgcacgagatgcagttggcgtcgggttcctgcggattgtccagccacacgcgccggggcagcgacgtcaatcccacaagcagcggaacattgccatgtcgaggaaggctaagatcgggctcttcccaagccggcgttccgaagtccgtgtccgataccttgcgccaggagagacgcagggtttccgcaagtgaaccgccgaccggtacgacataaaccggcggtttctggttgacccctggcggcttgccgcgcccccctgacgtagcaaatagcggtaaacgcaataaccccgcggcgcagcacgccggacataatccgtcctctttatctgtcgaatgccggaagtgccaagagtttgtgccagtgggcacctcttgcatcaggtagttggcggaaagctttccctctgttccagacttggcattgcactgatagaaccgcttgccatctcccagaaggttgaaacagtccttattgtcatcaagtttcctgaaccaatccgagggaaacgaagagaccgagtcttcatcgtccggcggattccccttgcaccaatagagaagcgcgaggaggaaacgcaggatggccaaacggtccatgggattgctggcggcgacttgacgaatccggcctgcttgcctaagagcttcagtaatgcccacgcgattgctattcccgtctttccatagaactggaatccagttttcttcgagcaggttatagctcataacttcctccttgccttggcaagaggctggtgggcggcccgttgcgctcctggcggcccgattgtcgggtggctgtctaccaaatgattaacgcgatgaaggtatacacccggcacgcgagaaaggcaaggcccgaagaccacaagaacggttatcgcctctgcttagcagacgcgaaccaggagccacctgctcgccaccctttcggccgctgacccaggaagaaaaggtggaagtggagctacgaatccaggcggcggcgccggatgtcgtctgggtaggcttgagcactcccaaacaggaacgctcgatgttcgagcaccgctcacggctaggcgtgccggcgatggccggggtgggagcggccttcgacttcatcgccgggactgccaagcaagcatggatgcaggagaacggcctcgagtggttcttccgcctcacgcaagagccccagcggctctgccaccgcaaggcaggggacaggttacaggttacaggggaaagaagggaaaacaggggttagggaacaggggaaaacaggtgtcaggtatcaggtgtcaggcagcaggctgaccttgggcgccggacggcgctgcctcttggcctgtcacctgtaacctgtgccctctgcctgtcgcccatagccttaggtgaaacccacggaaaggaaacgcggaaaattaggttcctttcgtcgccgtctcggtccgtaggtttcacctacggctaatgatattcctccccttcggggaggcaggtagcgtcctaaacgtgtgttggtggggttttggaattccaatcaaacactggaagggtgtgccatggagtgcattttctaaccttccggggtgtttaagaactcaagccccgcgaaggtccaatggctgaactcatcctcccgcacccaaatcgtgcgagtggggatggcatacgggtatcctcccttgggaacgacacccacccactctcctggatctaactccagcttggttcgaacacaggcgccgcgcggagaaatgtcgaccgcgagagctgaatcgtctgcattgaagaggtcggccttcaccacaagtttgattggaattgttgctattttgcgctcacaccggcgcgaattaacggaggcatttgtttgcatcggcagcccctccccttttggctagactaccggaaacctatattaacccatccaatggggttttgtcaagtcagtccaggggtattggctgagaagttacattgacggccgaaaggaaatctgtgcaacttggcgagctgaaccgagtgccgaagaaaaaa

SEQ ID NO: 772 - DNA, 6819 bp, Artificial Sequence
  Synthetic Oligonucleotide
caagaaaagcacggtgctggaacacatggccgccactgtggaaagtatgctcgaacttgatcccacgacaaggccgaatctggaggaggttcagtccgcttttgacggcttcttccagcacgtgggcaacgaaaagcatggcataagcattttctatcacaagggataaaacccgataaatatcaaaaaagcgggcattgaagagagtctcggaagacatgacgggttgaatgttgggtgccactgctggctcgtccagcagtgctggttttattccggcagagcttttgagaacagctttagatgctccacgccttcttcgctgcgaactcggagcctgccccggactgtgatccgggggtctctgcggtgaactggttttccggaacctcctcgcgcaactggatgcatcgttcctcatggtgaatttcattgacatgtggaaagcattccgcataatgacctcaaatctcttgatgggctgctaaagccatcatctctatcatcgaatgacttacagcatttctcaaaggttctttccgaatggccgttcccgtcgtcccggcgaaagccgggacccagcctcttccggattccggcttccgcccgggcgccactgctggctcgcccagcagtgctacgccattcagaaaaaacttcggcatagccataacgactgccgatactcagatttttcccgcgcacgaggtagccatgaagcacaaaaccgagaacttcaacctactcgaagaggattggattcccattttatggaccaatggcaaacctgatcgtgtaggcatcaggactgcgctaacggaagcaggccatatccgccagatcgctgcgagcaatccgatggacaacgtcgcactgctgcgccttttcctggctgcacttcattggtgtacgaggaccctgggagacgaagagcacaagcgcctttgtgatgccaaaggaatccgcgatgactggttgagagagttggatgaacatcaggacaagttttgcttgctcggggattcctatcgcttcatgcaagcgcccgatggtgcggacaatcgtcgtcccgttgccgacttattccacgagttacccggagcgaccaacgtggcgcatttttaccacatccgggactatcgtgatggcgcgtgtatagcctgcactgctatcgggctggctcgcttgccgactgcgatcaccggaaaaggtgccggtaaacggagagggatcaacggcgatccgcccatttactttgttccgataggcaagtctctcgctgagacactgttgatgaattggcgacctttgcgccacgtaacgggggacgcaccgtgctggtctcaatggccggtcgctcctgggctggacgcacctggcctcatggaggggttcacctggactccacggcagttcaggattgacgataggtctatgcggtcgggccattgcgtagtgtgcggcaaatcaaccaccaatttggtcacatgcctgtacgagttaaacacaccgaacgggcgaagtgaattgaatgaactgcggaggtggcgcgaccctcaccttgcttatcccgacgatcagaagaaccttggccccgtggatacagagaagaacccattgggagcctctggcgaatggcgcaactggttgaaaggcgtgatccaaagcgacacagagggcaatagagcccccgccgcaataatcgaggcggcacgtcgctctggtaagaactcgttgcgactaagagtcgtcggcttggcgacgaggaaggacaagagcgtggaatgttgggaaaggagcttttcgattcccacccagttcttaactgctgagggcggaggtaaatttgcggacaggaccaccaatctcaacaatgctgtggccaaaattctagatcctcaaaccaaagcctggaccaaggctgtaggcaaactgagagatgcaagcttgctcaaatctttagccgcccacgacgggcaaaagcttcaccccctccgcagttccctcgctgatagcctacccgcgctggaactggctatgttcaccactgtcaagcaggatctcgctcattccaatggcgcagtaccacccacgcgtccaacgatcggctgggatgcagtgctggatgcggccgttttgagcacaaccttcggctcgcccctgcgcaggcgcgaagcaactgaacgggctcggcaagcactgactgtggagatagccaaattaggcaagaccgaccagaaggagccagagccagagaacaagaagaagcccaaaagccccaaggaagatggggctggctcgactcagactgagcaattcattcgacggctcgaatcgctgaaggaaggcgagcgctcgcggctgcgccgactggcgggcaaaccgttggacgagaagctggaggggttcgacctgttcactggactctggtggactctccgggacaaaagcgccggagcgccgcggcgcgaaacaagttggatgatagccaagttgtacggagcgtttccaatgcgtcacgtgcgtccagccgatccggtcgcccggcccaccctcccgcgagtcctgggcacgtgtgagccccgcgatgagcacggccgcccccgattccggacgcgattcgatagtctgctgtgctcaccgctcgccgcgctggagccgcacctgtgctgggctctgtccgtcgtggccgaagcagtcgagaaaggaaaatgctctggcttggactgggtcgagttgctcgacaatttgtccatttgggaccgcggggaagagcaccgtcgcgagcgagacgtccgcgatatctgggcggaacagtacctagaaactgttcatcaatccgaaaggagtgttaaccatgctgattgaaatccacatgatccaaaatcacagcccgtcaaacctgaaccgtgacgacttgggagctcccaagacatgcgtctttggcggggtcacaagggctcgcatctccagccagtgcctcaaacgcagtatccggaatccgggcaacccggacgacgagcacaatcgggagccaggaatgttcgcgaaatcgatggagggccatatcggattactgacaaaattcctgccttggctggttgaaaagggactgcaaaagctaaaggtggacgaaaatgaaattcgaggagtcgggatcaaactgcaaagcatcgccaagtctgaggagaagttaggtgcaggtaagaagaagaggcgactcgacccccgcagacagaccccacaactaattcgcatacatcctggacttgctggggaacttgctgaacgtctggtcagccttagagagtctgacgaggattcgtttcgctatttcttgaatccggctgtgagcttcagacagttggtggaagcagaactcgaggattcgcaattcaacgagaaccaacgaaagtccatcttagacaaggcttggctgatcttgaactgccgaatggaggaactcgaatccgacgcagagcagcctgaagcggtggctcaacagtcgacatatgcgctcgacgcagagagtgccaagatcatcgtgactactcttgagagtctaccggatgacaagttcaagaatatcatcagaaaacagactgatccggaaaagaagcaactaaaggatgacgctcctaaaccgcccccaggatacaaagacgctgagaagaaactgtgggccgacctgcagcacaattgcgctgacattgctctctttggccgcatgacgacatcggagttttttgaggatgtcaaagccgccctgcaggtggcgcatgcgatctccacgcatgcagcggtcaatgaggtggactatttcactgcggtggacgaccgagccagggctggcggcagggctggccacgtggatgaggccatgtacaactctgcgtgcttttacaagtatttctctctcgattgggaccagttggtgtacaaccttgcgccagagccgaagaagcctgaagacaagaaggacgatagtcaggaaataaagaactgggaggaagagcacaagaactgggctgacaaactcaagccgaatgcggtgaagctcgccgcttgcacgctaggccacttcttgcgtgctgctgctcgtaccacgcctagcggtaaacaaaacagctttgcctcccattgcgaaccgtgcggcatcttggtggaaatcaagaagaacggaaagattcccacgagttatgccaacgccttcgcggaccccgcaggcaagatcggcgatccgccggacgacaacgccgattgcgagagtctggtggggcgaagtatcgcccagtttggcgaccatgtctacaacgtgcgcaatgcctacggcatcgagtcgactcttttctggcatgctttgcctctttaccgctatccgcttcagggctgggaacgtgaagctgacggtcgcaaggcgaaagtgcgagatgagaatggcgaagaaaccaaaaaggacaaaccggctgttcagttcgcaacaaagtgtttgcgtggcctcggcggcgaagatggaaagccggaaggcctggttgaagcagtgatcgaggcccttgatctcggtttcaaatgggccgacgtgaaagatcctggagagtccgctgcaaaggagtcgtgactatgatcgctgcccttaataccatcttcctacgtctggaagggccgcttcaagcatggggcgacacttccaagattgtgattcgccgaaccatggaagctcccaccaaatccggcgtcttgggtatcatctgctgcgcgatgggactgtcgcggaaggcagcgcgtgagcgtttgccggatttgaagaagttggcgatgggcgtgcgcatcgaccggacaggtattcgatggtgggattatcacaccgtaggtgccaaggtgggattgctaaaagccgaaggaggaatcaaacgcacggggggagcaaaaggcccgattgaaacgctcatcagccgcagggagtacctttgcgacgctagttttctcgtggcgctaaaaggcgattcagacttaatccaggaggtctccacagcgcttcagaaccccaagtggccgctttttctcggccgtaagtcgtgcccgcctgccgtaccgataggatggaaagctgataatggcaagtgtgctgcagacacggatcgatttgacagtctcgagcaggcgttaaagtcgcggccttggcgtccccgatttaagagtgacgctcctcgtgacgacaaaggaattccatcgaagacgaaacagctggattgtataatcgaatggcagccgcgcaatggcgtgatcgctcctgcggaggcagaggtctggtacgatttaccagcctccttcgatccaccagtgcatgaaccacgactggtgctgcggctggaaggagaccggcgcatcgaagtacgagtcgacaggccactccagcatcatacgtcccctccgcctcgcccgagagcagactaccaaaataaggaattcaggaaacgccgcaaacaaaggttggaatctgaccaaggcctctgcgttttttgcaagtctcccgccacgaccatgcaacatgtcacgtatcgacgtgccggcggcaatgaagagcaggacgatctgcgctcgctctgtcgactctgtcacgacgctgtgaccatgatcgagtacggcctgggaatgggcctggatcgcattgacccctgcgattcccgttggcgcgagcaaatcatcagaaagagggctgagatcattgagtttcggtcgttggaaacccgacgccgtcgcctcagcccagaggaggtggaatgatgtatctttccacgctgctaatcaatgttggtagtaaccctgaccgccctcgccctgggcgcctgtggctgcggaaccgctatcgcgttcatcagcgccttgcgatggcctttccgtcagatccacgaaaaggtcgcgatccagaattccttttgccttacgatttcaaagactttcccgaacagcgccacttggccgacccatttgattacctgtcggaaaaaccgaggacggagcttgattccgatttgctggccgacgtccacaccccacgcagtgcgggcaccgggtttctctttcgcgtcgaccctctccctggtggacgggcggtgattctcgtcctttcccatagaaagcccgattggcgctacgcgttcggcctgattcccggccaaatcaattcgcggccgaaatctcccatcggaaacgctgggtatctattggcagcaatgcctgacgagccacgccctctcaaggtcgcgctgaatctgggtgaaaggtttcgcttccgtctgacagcgaatccaaccaagaaaaagggcacgatcctcaagaccgaacgcctggcgatgaatgagcgcgggacgaaagacccgaagagacatggatgccgcgtaccggtgcgccccgaggaatacgagcactggcttgtctctagaagcgatacgcatggctttcggcttgtagaacctctcaaagatactcttcatatcgaagccggatatgtgtacgtcaacaagactctcgattccggcaaagggcagcgactaagaagcttgagctacgacgggcttctggaaatctgcgaccccacccgttgccgcgaggctctgcaatctggtatcgggccggccaaggctttcggatttggtcttctctcgatagcgcccgttagaccctgacttcagggaggggggatatgagaattcaagatctgcacatcttgcccaagttccgggactgttggagctacttatatgtggagcactgtgtgattgaacagcaggacaaagccatcgccattatagacgcccg

SEQ ID NO: 773 - DNA, 6819 bp, Artificial Sequence
  Synthetic Oligonucleotide
aagcggagttcctgtttagctgtaaatgtgggatcgtatgccttgcactccggcggggcggcgagaaacgcgttcgcgttgtggaaagcatagtcccaatcgggcttgaaagccgactggacaaggataatcgcccgcggagagttctctttcgtgctgttgtcgatacggaacaagaaactgtggcgcgggtcttcgggcttggcgtccgggttgcggagaagtgggaagtcctcctctttgaacggttgaagaaagtcgccatcacgctgtacgcgcgcctccgacggaaacgccatgcagaggcgctggtgaacgtggtagatattacccaaccagcgtctgccgggcctaggccggtcagggttacccccgacgtcgatcagaagatgggataggtacattactcgacctcctctgcggcgagcttgcgccggcgcgtttccagcgaacggaagcggatgatttcgtcacgcttcttgatgatccggtcccgccaacgttcctcttcggggttgatgcggtccatgcccatgcccaggccgtattcgatcatggtgacggcgtcgtggcacaggcggcagagggagcgcaactcgtccaggcgttcatcgccgcccgcatggcggtaggtgacatgctgaacggtggtcgcgggcgacttgcagaagacacagaggcgatagtcgctggcaagccgttcttctcgcctcctcttgtactcgctgttaccgtagttggcgcgcgggcgcggcgggcgtggagtatggctctgcgcaggactctccgctatgtttacctcgccgccctcgcctacacgtaactggcgccgaataacgaatctggggcgatgtgaaggcggctcgaacgttaatggcacgtcgtaccagatgagcgcatcatcgggggcttcgcgctgctcgggcgtcggaatccagtcgagcagacaatccacggtttccggaacgatatctcccttgaggcgcggacgccagggaaccgactccgatgtgagcgccgactcgaggccggggtggtgctctgtcagaggctcccatttgtccgcagtgtggtcatcgccatggcgtttccgcatcacaagaatgggaatcccaggcggacaggacttgcgccccagatagagcgtccacttggggctttgcatcgccgcggccagtttttcgatcagagccggttcgccctgaaaagcgacgagaaagctggcgtcgcagaggtactcgcgccgcgtgagcatcgccccgtctttgtgcttgccctcggcagtacgcatctgcattcccgcgccgaccgtgtggtagtcccaccatcggacccccggagcatcaactcggacacccatgcgcagattacgcggatcgctgagtcttggaagccactcggcggcggcatcggcgcgtgaaacgccgagtcccgcgcagaggattccgatcacgcccgatttggtcggggcctcggccgtccgccggatgaggaatttggattcctgatcaccccacgcctgcatgggaccttccaggcgaaggaaaagggtgttggcgctcatggggccacctctgagttgacgactacctttttcacttcggcccaatcaagcttttcgtcgatggctttgataacagcggggatcaactcgtccagcgacttgatgttgttttctgcaagcgcgatctccttcttgtcctcaacaacacccaaggtgtgacggagattgggtgagaaccagaaacgtgttttcggtttgccgtatccggtatcgagatcgtgaacgtactgggccaattgcacgatgctctgcgaaatcatgtcgcgctcgcccttactcggcacaggcgcggcaaaggcgttagcatagctaatcggggtccgggcgtccttgatctcgaccaggattccgtcaggcggattgtgcgctgcgcaactgttctgttttcctgtcggattggctctcgccgctccttgaatgaaggcacccaccgtgtgtgcggccagttctttgttgtcatttagattctcgaccagcttgtcccagtcgatcgagaagtacttgtagaaacaggccgaggcgaagagagcttctccaatatgcgcgccgccagcatcctcgcccttgatatcatccgcagccacaaagtagtcaacttccggacgggcctcatgcgtagaaatcgcgtgggctacctgaagcgcggcctcgatcttcaggtcaagtcctttccatacgcccttgttctttgcctcttcttcatcgtcctcttcatcgccctctgattcgcttgtatcgtcgggctcgcctttcctgcccttcttaggcggcttggccggctccagcatgcgcccagacagggccatatccggcgcgtagcgttcctccgctatcagtgccgcaaactggccagcaagctcctccacttgcttctcgctcggtttctcaggtccgttgcgaagtagatccaacatacgcgtcgccgctctctttgacagaaatacgatgacatccttcttctgcttcttgccttgtttctcgccctgcaataacccacacttctgcacgacggccgtggcaagcgggagtacatccctgtctttgatcttgtccgcaaggtactgcggcagccgccgggtgcgaataccaccgcacagcaacgcgaactgttcgctcattcggatgctgcgtttgatacactggctggagatccgcgagcggaggacgccgccgaagtaacaggtcttgggtgcccccaggtcgtcccggttgagattggccggactgtggttctgaattacgtggatttcgatcaacatgattgtcccctttcattcgtttccaagaaattgttccgcccattcaaggcgggtggtttcacgttcccaagaggataggtctttcgcgagttggacccagtcgagtttctcgcaattgctggcaacttgctccaacgcccattgcagcgccggctcgatcttgtctagcggcagcatgagtatgcggtcgaagctctgttggaatctcgctcttgcaggatccttcctcggctggcactgtcgcagtcggagcgcaagcgtttcaccgggcgattgcggcattggacagaaggcgtagagtttggcaattaaccatgacacttcgcggcggggcgggggcccgcccttttgttgccgcaacggccaccacaaacccgcgaacaaatcgaatccatcgacggattcgtcaaggccttgccccgcgtgggcgcgcagaaggccgagttcgccggtcttaagattgctcaagacgccgataaactgttccgtggcagtcacttgacccctcctttcttacggccttgtttctgggccgtttttgtttttggccccatgtctggtattgcgctggctatctgattccgccactgaaccgccgccgtcgtaaagcctggagaaagcgattgggcgatggcatccatcatcgggccatactccttggccgcttcttgccacgcggtatcgcccccagcaagcaactcgcgcagctttgcggagactctgctttcgacatgcgggcggatggaggcgagcgctggcggaatctcagcatgtttccgtttggatgccttgtcgtttctcggcaacgttgcgcgtgtgaggttgaaggcttctttctgccatcgcgccaacagggatgccgatgctcctcgaatcgtactatctaatggaacctcaatggtccgttcccatacgtcgatattctttgcgttgtccgtggcaaacccaacgataaggagggatgtgggtttgcctcggcaactgagctttcccgtttcgatgatacgggcaagtagatcgggccaaggtttgtccatcctgaacttgcctgctgctgtcaggtcctgcgctctcgacgttcttcgcggcttggtgtctgagtagatcacgtggggatcggtccagagttcattctcctgtttccccgccgtctgaaactcgcatgttcttatcagtggcgtccctgcagcgccacacgcaacgcatgcgcctgacggttcgggatcgtccagccatactctcctggaaagcagcgttaaaccagtgagtaagggcacaatttcaccgggggttgggcaaacatcgggctgaacccatgagggatcaccaaggtcctccgatggagcccagtttgcggcaagcgtttctaacagcgacatgccccaagggacaacatacaccggtggaacgccgttgatccccgccttcaggtagtctgactttgaacgaccggcgaggccactcacggaaaacagcggcagtcgaagcagccccagcatgcaacacggaagacaaagcgcgttaaccttgtccgtcgagtgccggaaatgccagaagttgttgcctgttgggatttcctggagcaggtccgtggccgctcgctgccgcctggcggtgcggtcttgatagaagcgctttccatcccccagcagattgaagcaatctctgttgtcatcgagtttggagaaccagtccggtggaaacgactggagcgcaattgcctcggcctgctcgggaggattccccttgcaccaatacagcaccgccagcaggaaccggagaattgccacgcgatccatgggattgctcgcggcgatttgtcgaatccggtcagcatcctcaagcgccttgcgaatcccgacgcgtttccaatccccattgcggtagagcgccggaatccattcttcatccaggagattgtatgtgattgcgccaacgtgatttgagatttcggaatttgagacttgaggacctaacatatcgagagcctccctgtgtcgagaaacggaaaaactccctactaacaagacagcccggctgtgatataagaatgacagtatacctgatcggcgattatcttacaagtcatagtagggactttcgttgcgcaggcaccaccctgttgggtgcccggaacgcctcctttgcgaggcgttcacttttttgtggggatgacgtggagctgagatttgagatctcagatttcagagtgccggcgaagttgcgcgtacgttggcgtctgacttgggcgcacggggacagaggagatccctactttttcaccaactccactgttccctgttatcgccggtcgaggacgattgccgcgacgatgatagtcgtagggtgggtggagcggagcggaacccaccggaaaagcacgcgcccgcgtctgtacccaagccggtgggttccgctccgctccacccaccctacggcttcctcggcagcaaatgacctgcccggatagaaggtatcctggcgtattgattcatcgtgctggcaacttatccgagaaggcgcaacggcttcatttccccctttgaagggggttagcgggatgtcggatgatggcaataacgttcactctgcatgattgtgacatccccctaacccccttcaaagggggaatcacattagctgcgtcccttcaaagggggaatcacattagctgcgtcccttcaaagggggaatcacattagctgcgtcccttcaaagggggaatcacattagctgcgtcccttcaaagggggaatcacactaccttcaaagggggaatcacactaccttcaaagggggaatcatactacctgcgtcccttcaatagctattttgccaacggataaaggagcttttgtatctcgggttggttgaagttttccatcgtaacgacggtgacgccggtgtcgacgcgcttctcgacgggcgcgcctttcagggtgtcgacggcggctttcacgcccttgtatcccatctgaaatgggttctggacgacgagggcctggacggcgccgtccttcaggctggcgatttcctcgtcggaggcgtcaaacgccaccagcttgacttggccggcctttccagcggtcttgatggcctgcgccgcgccgatggcgccggcttcgttggcggcaaagatgcctttgaggtttgggtttgcggtcatcatgtcctgtgtgacgttcatgcctttggccacgtcgctctggcaatagcgcgtggagaccagcttgacgttggggagctccgcgatgccttccttgaatccctgttcgcgcatctcggaggtggccgcgcctggaacgaaggggatcaggccgacctcgccttcattgcctatcagccgtgccagttcgcgcgcggcggccttcgcgccggcaatgttgtccgtcgcaatgaaggaaacgggcaggtccgacttgacgccggagtcaatggtcaccacggggatgcctgcgtcgatggcttttttcacggagccgatcaagccggtctcgtcgcaggccgccatgacgatggcgtcgacgttgctgttgatcatgtcgtccatgatgctgatctgtttgtcgatctcggtttccttcgcggggccttgccagatgatctcggcattagactccttgccggcggcttccgcgccggctttgacggtcaaccagaactggtgggacaggcccttcgggatcacggcaatccggaggtggtctttcttcacgggctgcgccgcttggggtgaaggactgggtcgagcgccctgtttctgagtcggcgccggtgtctgaggtccgcacccgaccatcgcaatcagcatgaccatgacagcaaccgaggctcgtttcatggggtaatatctcctattccttgagcagtccggcgcgacgtttccgcgaattgtcgtagtataccaagaggacgatcaggcttcccaccaggacgctctgccagtatacgttgatgtctttgagattgcagaagttcacgaggacgttcatgatc

SEQ ID NO: 774 - DNA, 6816 bp, Artificial Sequence
  Synthetic Oligonucleotide
attattatatattgatattatatcatctctaccttcccttcatctcttgtttgcggcatgagccactgcaaaccggcattctcccctggtccggctggatataagagataagcgtattttgtgaatttgtcccccaactcactgtgccacaataacacacggattcacaagccatatttaccggttgtgaatttgtgaatctgaccttgccggccttaaggaagtttgaaattagagccctattttggacttgacaaattattccttggtaaatttggtgtataatagctatggggcataatgatgttagcctgtggaacggcctctgtaaaggatcaacaagctatcaaccctccccatgcgacaggagcttcaatgtattataatttgacagacaaaccctggatcagtgtgctacagcttgacgggcattctgccaggctcggcctggctgaggtcctgcgaaaagcacacacactgcgtttggcttacggcaatccgatggaccgcatgtccgttttccgtttcctcctcgccctgggctattggtgttttgccaatacaaaacaagcgccggtatcagataagccactgcctcaggcatggacggactggcttgaacaaaaccaagaatatttcgaattgttcggtgatggccccagattctaccaatccccaggaacatccagaatacgccccagcacggaccttatccacgagcttcccacggcaaacaatttctggcacttccgccatgtgaccgatttcatcgatggcatttgcccagcttgctgcgttaccggtctgctgcgcctgccactctttaccaccgtaggcggcagcggaatcggagccggcatcaacagaactcctcccttctatgccatctggcagggtgatagtctgtcggaatcgatattcctgaattgggaacccacttcccggttgggtgttcctgcctggctgaacccgtttggatcccaaaacgagaaggatgtagccttgctgactggcctcacctggctgccccgcaaggtattcctgcttggcccggtgtcagacggagcaaaatgcagcgcctgcggagaagagcatgagcctctggtctatgcctgcaacaatgaggcggtgaaagtgcctccgaaccttgtctggaacgaccctcacgcgatttaccgggatgacaataatggcctgactgcccaggtggctctgatgtccggggacaaatacactttcgctaacagggattggcataaacccctggtcggcttcttacgggcgaaaggcatgtctcggaccgccacgctgtttttagtgggcttcacaagcgttcaagccaaatgtgtggacgtttgggaaaagaccattgccctatccggaaaaacaagctccgaggaactgctggaccagatatccgaaagagcctactccctgcacaggatgaggaaacaagaccgccggggcgattacaaggaatccgtgggaatcaccgccgtggcggacatcatcccgcacgtagagcatcgggttgacgtccattcgggcgagatggtggaaaacagcggcaatgtctggcaggaagcggatgaagattacggattcttcatgaagcgttttgccgtttctctagtgccggaaattacggttgccgccaagcttgaacgagaacaactggctcggcgcaagccctggcccctaaaaccaaaatcaattaaaaaaccttcatccggaggcgataatgaatgagagcaccgtgaaatttgttcggagcctgggcgaactcaaagagggcgacctgggcttgctcagaaagctcaggggtcgccgtctggatgaatccctgccgggtttcgacctgttttccggcctgtggtggccactccgcagtataagccccaaaacccccaggcggaaggtggtctggctagtcaccaagcttttcgcggaattccgctttgagcaaaagaaaggcgccagcctgccttggctcatgggcagaatatgccgtggacttaaagaagaaaaagagttcccacgtgttttagccaggttcgaccgcttgctcacgctcgagttgaaccaactggaggaaccgctggcgcaagtgctcgcgattttaaaaagacatgacattgccagtctggactgggttgccctcatcgatgacctctccgcttgggaacgggaatcaaacagagcgatatggtcagacacatttatttcagcatttaataatcagcaaggaggaatcaaatgttgattgaaatacacatgatccaaaaccacagcccggccaacctgaaccgggacgacctgggcgcgcccaagacctgttatttcggtggggtgttgcggtcccgcatctccagccagtgcctaaagcggagcatcaggatgagcgatgaattcaaaaacttgctcgggggtatccgtacccgtcggttggccgagttgattacaaaagctacaggacaggactgcaggaatcaggcagaggaagttctgaacaaagccggtttgaaacacgaaaacggacatagtaagatgctggtgttcatgacccggaacaagatcgatgcccttgctcaaattgtcaccagcgaaggcctgagtgttgcagagaaagccaagaaagcggcagatgtaatatcgggggcaatacattcccctgacatcgctctgtgcggaagaatgctcgagcccgataccaaggacaagaacacagacaaggtcaagtgggaaaataccactgttgaagcagccctgcaggtgtcgcacgccatttcaacccacatcgcccgcccagaaatagattactatgtagcagctgatgacgagcctggcgacgacacaggtgctggattcatagacgaggcgatgtttgcttcggcctgtttctacaaatattactcaattgattggaataccttgataatcaacctccagggtaatgaaaagttggcagctcatactgtcggagcctttatccaggccgctgcactcactaatcccagcggaaagcagaacagctttgccgcacataaccttcccgatggaatattggtagaaataaaagagacacctgtcagctatgcaaatgcctttgtgcgaccggtgggaatcgttaaggattctgacttggtagaacaaagcattggccaactggccaactatgtgaaggatataagtgccggtttcttccctggacagatgaaaggcaacgctctgtggttctcgcccaatggacgttatcccctaaagcctcaacagggcacgctggacataaagccagtttgcaacctgctagaacttgttcgcgaagcagttgagatgttgggttttgaatgggatgatgtaaaaaacgagaaagtagagagttgaaatgtcttctccgcctaataccctgttcctgagattggaggctcccattcaggcctggggaagcaatgaggccaaattcgccgtgcgcaggacagccgacgcgcccaccaaatccggagtggcaggcctgctctgcgctgccctgggaatcagccgggccgaagccggacagtattggctgggtgaaattgccaaattgcgcatgggggtgcggatagaccgcccgggcatccgctggtgggattaccatactgtgggagcggagcagaagctgcgcatttctgacctgaaaatgcccaacggcctagttctggttggcactgccctggccaaaaacctgggcgcggacaagatcaaatccaaacccggggctttgctctcccgacgcgagtatttggctgatgccagcttcctggttgcgctccagggtgaaccggatatcgtggcacaactggctgaagcgctgaaaaaaccagtctggacgctttatctggggcgaaaatcctgtcccccctcccgtccggtggatgaacacccgccagggttttatgccagtctgaaagaggctttgcggtcgatcccggcgcaactgagggaaaaaggcgaaccgatacctgacagtgttccctgtgtgctcgactgggttccggcccatgatgacgtgcacgctccgccgaacgccgaagcgcattacgacgtgccggtgtcctttgagcctccccaccacttgccccggctggtgatccgctgtaacctgccattggaccgcaacttcgaggcagagaccgtgctttccggcaaagcctggcaaccgccccgcaaccgggcaaattacgacaatcctgaatacaaaagggtccgcgctgagcgtttggtgatggacaatgccgcctgcatgttctgcaaggcacccgccactactgtgcagcacgtgaattaccgacgcgccggaggcagcgagaagccggaggacttgcgcgccctctgccgcctctgccacgatgcctgcaccatgctggaatatggcagcggcatgaccatggaccgcatagatccctgtgaccccgcctggcgtgagcgcatcttggccaaacgcgaggaaataatcaaattccgctcgctggagcagcgcaggcgcaaactcgatccgaaggaggagaacggatgatgtatctatcccaactgctcatcgacacaggcggcaaccctgaccggccaaggcccgggcgcttgtggctgaacaatatctataatgtccaccggcggctcagcatggctttccccatgcgcaagcgcaaggaaggagacccgaggtttctgcagccctttgaccccgcagattttgaaaagcgccagttcctctttcgggtggacaacaacaccgatggagaaaatcaaagggcgatggttttggtgcagtcgtccctgccgccggattgggactgggctttccagaatgccacgggatttttggcagcccctccccaggttaaggaatacgatccccagttctcagcaggtcagcggctgcgcttccgcatcctcgtgaatgccagtgtcaaacgcaaaatcgacgagttgcgggaaggacccggaggaaaggaaaaaacgggaagggttctgcacaaacgggtcgcccttacctgggacacaaattccaacccaaaggatgcggtggcgcaatggtttgccgccaaggctggcagactgggcttcacgcccggggagaccgaactggtaagcctgggctgggtatacggttccaaaccggagccccggggaaattcgccccggcgtgagaacgaataccgtcccctgagataccgttccgccctgctggaaggttatctgacagtggatgatgcctttctgttccgggaagccttggaaaaaggtatcggcagcgccaaaggaatgggcttcggcctcctttccgtggttccggcaagtgatgcgtaacagagaccttcacctaatgccaaaaatgcgggaccgcttcacctatctctatgtggagcatgccaaaatagacaaagaacaacaggcaatcgcctttcacgatgccatgggctccactcctgttccctgcgctggactggccctgctgatgctggggccaggcgtatccatcacccatgcggccatccttgttttagcagaatgcggctgtttggtggcttgggtgggggaacagggagtccgcttttactcatccgggacagggaccacccgtagttccgccaaccttatgcgtcaggctgccgcctggtcaaatcgagatacgcatctgcggatagttcgcagaatgtatgaattgaggttcaaggaaaaactggacccaaccctctctcttgaacagataaggggaaaagagggagcgagagtacgggatacctatttcagactttcaaaagaattcgatgtgcccatgagtgcgaggaattacgacaggagcaactggaataaaaccgaccccatcaacagagccctgtccgttgccaattcctgtctctatggcatctgccacgccgcgatagtggccgctggctattcacctgccctgggtttcgttcatactggcaaacaactgtcatttgtttgtgacattgccgatctttataaaatggaaacctccgtgcccgcggctttcatagccacagccgcaggggtcgataacctggacagaaggacacgcattgcctgccgtgaccagttctatcaatttggtctgctaaagaagatagtggccgacattcacgcccttttcggtattctggaaacttcggacgatgagccagaccttgctgatgtcgatccagccgtgccaggcgggctttggaacccagatgataaagtgagccccggcggcttgtcatggggtctggatgatcctggaggccatgatgatggttctggtgcttgaaaaagttccctctggcctgagaggagaaattacacgctggctcctcgaaatcaaggctggagtatttgtcggtcaggtatcggccatgataagggaaaagctgtgggacaaggccaggtctggttgtgccggtggaacttgtatcatgatttacagcaagcattgcgaacaaggctttggaattgagttttggggtgccgcggaaaggatagtgacagaatgggaaggattgaaattgatgaccaagcatccgtgatccatacttgaagcctgttcaatggcctcaaagcgtctactttcgaagtgtgttccccacctgcgtgggggtgaaccgaccgctctgcgattgagcgcaacgccatgaccgtgttccccacctgcgtgggggtgaaccgtgtgggcgaactaccgcataattgagccggtggtgttccccacctgcgtgggggtgaaccggctacactatcccgctgtgggaaccggggtaagtgttccccacctgcgtgggg

SEQ ID NO: 775 - DNA, 6712 bp, Artificial Sequence
  Synthetic Oligonucleotide
caccacctgcatatggaaaccctggtccgcccacagcctcgcctgatgcaggaagttggccgcgttgcgcgtctcgcccatgcccacggcgtagaagcggactccctcctccccgcaccaagccaccaggcacccatggtccgccaacacggagatggcggcgtgagtaatcgagacgcccggacccaacatcaggagagccagattggcacaggggaccggcaccttcccggcttgatcgtggacggcaatggcccgctcttcctgatcgacgtggcaatgctcgacgtacagataactccacccgtcactgaacttgggtagaacgtggagatcttgaattctcacagagcctccagcccgtgctgtagcgtcgatctccgatcgacggcggttgtagcgtcgatctccgatcgaccggggttgtagtcgatctccgatcgacgttacggcggtcggagaccgccgctacaaaaccaggcgatggatctcaccctggtacggccaatcttccgggcgcttgactaaaccggcccggaccggattctgccggacatattcatatttctcccgataggattcttgcgatctcaggacgtgatcgaaaaagtctttctcccaatgtgtgccctcgccctcatcttcccggaggactttggataaatccccgcgcagcgccttgatccatttccctaaaggtggggactcacgacaaaagccggcgaaaagatggatgtgatcaggcatgatcatgaagaacccgacccaaacaagaaaatcgctcgcccgttcggagaatctcgtgaattcccggtgaatcgcaggatttgccaacgagcgtttgcggtcctgcgtacacagcgtgagatagtagattgggctgcccgtatagagccagtccagtcgccgcaagcggggtttgaatttcatattggctcgatctccgctcaagaaatgttgcacggatccccgatcgacaagggattgtagcgtcgatctccgatcgacgtaccggcggtcggagaccgccgctacagcgagagcggcgccacggaaagcaggccgaagccgaaggctttgccgtgcccaacgccgcccacgatggtttctctgaagctgtccgcgtcctcaaccgtaagcgtcccctccaataacgccgagcgaaatttcatgcggccgcccgtcggcctcgggtcggatcggtctcctgcgccccacccgatctgcaagacccggaaagtttccacttggaatccaccttggccgcccttgccggcgaaccattttcgtatcacatcgtcgcggttctggtccttgtcccaggtcagcgccacgcgtttgccttgggccttcgggcggccccgcttatctgtcccctctcgcgtcctcgtaagatcaacgccctctgtgctggtttttatcttcttactcagattggcgcggatacggaagcgaagccgctgacccttctcaaagcgggggtcgaattcctgcacctgagggggagcggctagaggattcagaagaaaacgggcgttgtggaaggcgtagccccagtcaggctttacggcagagttagactggacgaggatcacgacccgcccgcccggttgcgggtcgatgcggaagagaaagccggagtcgccgtcacgtcttacatggacctggttgttggcaaagtccgcgggtttgaaaggcttgaggaagtggggatcgtgggatattcggtctttggatggaaacgccatgcaaaggcgctggtggacgtgatggaggtttcgcagccagagccgcccgggcctggggcggtcggggttggtgccgacgtcaatcaagaggcaggagaggtacatggctattccacctcctcagcggcaaggcgtctgcggcgagtctccagagagcggaacctgataatctcttcccgcttctcgatgatcttgtcgcgccaacggggctcttcggggttgatgcggtccaagcccattccgagcccgtactcgatcatggtcacggcgtcgtggcagaggcggcagagggagcgcaaatcgtcccggagttcgccgccgcccgcgcggcggtacgtgatgtgctgcacggtgctggcgggagacttgcaaaaaacgcacaagtgatagtcgtcgtcgagccgctccttgcgtcggtttttgtactctgtgttcgtgtaatccgctcttgggcgcggaggcggtggcgtgtcgctctgcggtggctgcaccgcaagtgttacgtcgccgtccgctccgacgcgcaactgcctgcggatgacgaatcggggttggtgcgacggcggctcgaatgtcaacggcacgtcgtaccagacgagcgcatcatcgggcgcctcgggctgctcgttggtgggttcccaatcaagcaggcaatcgacgggtcgcggctggggatcgtccttcagccgccgacgccaggggaccgattcgagggcagaaagcaagtcggggaattcacctcccggatgctccagcagagggcggcaaggggggcagcactttctgccgaggtagagtgtccacttgggcgctttgattgccgcctccagttcctcaatgaggtccggttcgccctgaagagcgacgagaaacgaggcgtcgcaaaggtattcgcggcgggtgagcatggctccggacttggttcccccctcggcggtacgcatcggcatccccgcacccaccgtgtgataatcccaccagcggacccctggcgcatcgacgcgtacgcccatgcgcagccgggccagccttggaagccagccttcgcgggcctctggccgggaaacgcccaatgccgcgcaaagcatcccgatgacgccggacttggtcggcgcctcggccgtgcgccgaatgacgaacttggattgctgatcgccccatgcctgaagaggaccttcaagccgaagtagcagcgtctttgcgctcatggggcacctccggattcaggaccactttcttggcctcctgccagtcgtaaccgatttccttgagtacagccgctatcagttcgtcaagagacttaacatctttgtcggcaagcgggacctcacgctgtttctgttttccgtcttcgctctccgtggtggtagccgtcaacggatagcggagatttggagagaaccagaaccgcttcgtcggcttgccgtatcccgtatctatgtcgttcacataatgggcaagctgcgccacgctctgcgagatgatgtcccgttcgccctgaggagccgccggtttggcgaaggcgttggcgtagctgatgggagtgtttctgacttccaccaacatcccgtcaggagggttgtgcgcggcaaaactattttgttttcccgtggggttggccaaggccgcggcgcgaatgaaggcgccgacggtatgggccgccagtttttcgtgattcgtcccgaagggcttcaggtttttgaccagcgtttcccaatgaatggagaaatacttgtagaaacatgccgaaccgaacatggcttcatccacgtaacctgcgcccgcgtcctcgccggggacatcatcggcggcgacatagtagtccacctcgggccgggcctcatgggtggaaatggcatgggcgacttgaagcgatgcctcaaccgtcgtgtctttgaggactcccgtttcaagcatcctgccgctcagcgccatgtccggcacggcgacggattcactgatgagcttgccgaactccgctgccaaggcctcgtccgtttttccgtcgccctgctggaggagttcggccatgcgtgtaatcgcctcttgggtggtgtaaaccagcatcttgctcctctcagcactttcctgttcgtcttctccttcctgtttttttgctttcttaggctccagcccgcaggctttgagaatgttctccgctcgcttcctgacgtctttgcccgtcaccttttccgcaatctctttcgccaactggcgggtgcgaactccgcccagcaattgtctgaactcctcactcatgcggatgctgcgcttaaggcactggctggaaatacgggagcgcaagactccgccaaaaaagcaagtcttgggcgcgcccaggtcatcccggttcaggttggccgggctgtgattctgaatggcgtgaatctggatcaacatgactctcctcctcttggacagttcaaaaattcctcggcccatttgagccgggtggattcgcgttcccagatggaaagatcgttcgtcagccgcacccagtcgagttcgaggtgcttggaagctatgaggtcgattgcccactgtagggcgggttcgatttcagcaagcggcagcgtgagcatcctgtcgaagcgttgctcgaaacgctgccgcgctgttttctcgcccggccgggatcgcccgagctggcgagcgagggtctcgcggggtgaatgctcgaggggccggagggcgtagagtttggcgacaagccaggccacctcacggcgaggcgcccgttgggtttgcgcccgcagcggccaccaaaggcctgcgaaaaggtcaaagccctctaccgattcgtcgagcccttgcccggcatggttgcgcaagagcccgagctcaccgggtttcagtcgagtcagaacttcgacgtactgctccgttggagtcacttgtcccccccttcgtctttgttgtttctctttggccgcatgtccggctttacagcggcaatttcttgtcgcctccggagggaagcggttgtgtagcccggggaaagcgatttggcgacggcggccatcaacggacgatattcctgggccgcctcttcccatgccttaccgccttctgcgatcatctcgtcgatttttccggaaaccgttgcctcggcttggggacgaacagcggcgactgcggagagaatttcaaggtgtcctctgtttcgtgaagtctctcgcggtttggctctgccaacgagcttccagccttccttctgccacgcctggatttcttgcaaactcgcctgaaccttcacgtcgtcgagcgcggccaagaattgaatctcccgctcggctgcttccaggtatttgtcgttctgcactgtcgcaaagctgacgacccacaacttactgttccccttcggcttttccccgcacaggattcccgccacgaccttcgtccacttcccagccgcagcgtcggccgggccaagcgcgctgaaaggcttcacaatctcgtcgccttcgctgatggtgtgcgggtcgttccagattcgtgccagactgccttcgcctgtctttgtgctcccaatacccgcaaagacacattgacgtatcagagcctccctgcgcccgcaggcgatgcagttggactctggtgtctccggagtgtctaaccagacgcgccgcggtacccacgttaatcctatcaataatggaacattgccgtgttgagggaggcttatgtccggattttcccatgtgggcgtgcccaggttcatctccgacgtcttccgccatgagaggcgcagggtttcggaaaggcagtcgcccatcggcacgatgtagatcggcggtttttgattgacgcccgggggcttgccgcgcccggccgacgtagcaaagagcggaaggcgcaacaagcccattgcgcagcatgccggacataagccgtttctgaaatctgtcccatgccggaagtgccagaagtttgtgccggtcggcacttcttgcatcagatagttgacggacagcttcttctcaagtcggttaggcttgcgttggtaaaaccgcttcccatcgccctgaaggttgaaacagtctttgttgtcatcgagtttcttgaaccaatcagagggaaacgaagaaatcgagttcttgtcgtccgggggattccctttgcaccaatagagcaacgcaagcaggaaacgcaggatggccaggcggtccattgggttgctggccgcgatttggcgaatccggcctgcttgcctaagggcctcactaatgcccacgcgaccgctgtgcccatctttccacagaacgggaatccacttttcttcgagcaggttgtactccacggcttcctccttgcctgggcaagaggcgggtggcaggcccgtcgcgccccggggggaccggaccgtccgctgcgtagctaccacaggacaatcatggcgaaggtatacacccgggacgcggcaaaggcaaggcccgaagaccacgacaacggttatcgcgtccgcttagcccacacttcacaggctgcaaggcgcgccgttgactaagcgcagaagctttgatgcctccgcggcgttccgattcggagggaatcttgcgatcgatttcgcgggtggcgcatacgtcccgacgggtttttgtcgggatgtatgcgcccctcggcatgtcgacaccttcatagcctcttgtccatgctcaagatcgaaccatcattccagaaatagaacctcccgccgcagcgcgaccacggccagtcgcccgggtgcttgaccagcactcgtttgacgggattgtcgcgcctgtgattcaatttctcgtctcgcttcttggggctccagatgttcatgtcgtagaacccaccccaacaatatatcgtccctgtggcgcatacatcccgacaaaaagaagctgtgaaaaaatcaagaaaatcgaaaaattaagaaattttcttgtcttagctatacagctatgatatattagcctctgaccgcacttccggcgggg

SEQ ID NO: 776 - DNA, 6679 bp, Artificial Sequence
  Synthetic Oligonucleotide
ggttcacccccacgtgcgtggggaagatttcgacgcgccgctgagggaatggctctaccgcggttcacccccacgtgcgtggggaagatactgcaaatctacaccgaaacccgcttttttggcaagtacagcccctcgaagtcttcgatcagccgcccggtgtcgcccagcgtccgaatcgcgaatccctgttccgtatcgtcgctgtggatcaggatcgccgccccctgttgcacgctccgacccacccgcgcccacagcaggtcccgcacccgcgccgaaacccgacccacgaacacgccggtcttgggctgaatcagccaccgcgtcaactcaccccgcagtgacggcgtcacccgctccagaatcagcaccaccatgacgcatgtctccttccagcccggccgtcacggccgggagcttcagaatctgcccgatcggcaagtcggccggaatcgcgaccggctcccaccactgcgccggccggctctcatcgcccgcgtactcctcggccaacgcgtcctcgctggccactggcacgtccagtaccttgccgatgtccggcaggatgcgttccatcagcctcgccgcgcgaaactgccgccggcattccatccgcacctcgcgttccagttgcgggggcgccgccttggccaccccgaacgccagcggaatcacgtgctctaccttgtacaggtcggcgatgtcgtacacgaacgacagctgcttcccgctgtgcacgaaccccagcgccggcgaatacccgcccgacagcaccgccgcgtgcaccagcccgtacagacacgcgttcgcggccgaaagcgcccggttcaccgggtcggcggcgttccactcctgccgcttgtaggaccgcccctgccactcgatgccggtggccttggccgcttcggcataggcctggcgcacccggataccttccttgccgcggagctgctggagggtcagggacggctcgggcggatcggcgaaccgcaggcagtacatccgcaccaccacctgaagccgcgtcacctcgttgaccaccagccgggcctgcgtcaagagattccggctgctccgcgccccgcccagcccggccgcgtagaaccgcaccgagtcctccccgcaccacgccaccaggcagttgttgtcggcgagggccttgatggccgcgtggctgatcttggtgccgggaccgagcaggagcacgccgagggcggcggccggcacgctggtaacgcccgactcctgccagagggcgatggccttggcctcctgttcgatgacggcatgctcgacgtagaggtaggagagtttgtccccaaaccgcggcagttcctggagattgattcgcgtattcacttgtcaaagacccttctcccaccccgaagccgtggcatccatgtggcacggccttccaggccgtgtttgcatacccgtcttacgccggggccagcgacagcagcccgaagccgaaggccttggcggggccgatgccggcagccaaggctgcccgaaacttctcggggtcggtaacttcgagcaggccctcgtaccgcacggaacgcaggcgatggccctcgctgccttcgccgcccttgcgtatgtacacgtagcccatctggctcacgcttgcctgcaagagaagaaatcctgatctttgcgcttgtcgctcaagccagcccttgaacacctcttgcgggtcgtcgccgggtttccacgtgagctgctgccgaggacgtttgatctgctcgccagccgtcttcctctcgcgccacttctctttcgtcaacggcgggcgcttcgtcggatttgccacgagccggaaacggaacctgctaccgggtgccaatgtcagtgtgattggacgaggttcggatggcgccgccgccagcaggtaccgggcgttgtggaacgcgtactcccagtcaggtttgagggccgagaggaccaggacgacaacccgcccgcccggctgagcctccacgcggaataggaacccgctgttctggttgcgcttcgcgtggacgtgccccagaacgtcccgtccgacctcgctgggggatttgtctgcgaggtatcgatcttcgggaaaatctttcgggtcgtacggccggaggaactcttcgtccgcgtctttgcgagatcgggaaggaaatgccatgcacagacgctgatgtacccgatacagattccgcaaccacagccgtccgggacgcggccggtccgggttcgtgcccgtgtcaatcagcagggtggacaggtacatcattccacctcctcgggcgcgaggcgtcgccgacgagtttcgagcgaccggaaggcaatgatctccgcccgcttgcgaatgatccggtcgcggtattgtgggtcttcgggattgatccggtccagacccatccccaggccatactcgatcatcgtcaccgcgtcatggcagaggcggcagagggagcgcaaatcatcctgggactcatcgccaccggctcgccggtaggtaacgtgctgcacggtgccagccggggccttgcaaaatacgcacaacccatgatccctcgcgagccgctcggcccgccgcttgcgatactcgctgttggtgtagtccgcccgtggccgcagcgggtacggggttcgccgctgccgcggtccaccgatcgcgacatccttgccgtctccaacggtcaaggttcgccgggtgacgaacctcgccgcgtgaccctgcacgtcgaaagacagcggaacgtcgtaccacacttcggcgtcccccggggccgtctcgccgggctcgcgcgggcgccattcgaccaagcatgtaagcaattccggcacgcgatcaccgtccatgcgcggacgccaggcaacagctctcagcgcctcgttcaggtcggcgaacgcaccaatgtcgggctcatcccgccgacccatcaacgggatcgatgccggacagcatttccttcccaggtagagcgcccacctggggcgaagcacatccccgtgcacttgccgcaccaagtcgggatcaccctgcaacgctacgaggaatgaagcgtcgcagagatactctcgccgcgtgagcatcgccccaggcttggtcttgccttcgccttcggcgatccgcatctgcatcctggccccgaccgtgtgccagtcccaccagcggacaccaggcgaatcgatgcgaactcccatccgcagggtattcagacgcgggaaccactcccgtgcctgccgcctggagacgcccaaggccgcacacagaatccctacgattcctgacttggtaggggcctcggcggtccttcggataacgaacttcgagtcatgggttccccatgattgcagcggggcctgcaggcgcagaaacagtgtattcgggtccatagggcctccctagctgatcgttaccgtctgaactctggcccaatcaaacccgatctcctctacaacccgcttgacaaggtcgtccagagatcggactttcccgtcctcatctacgcatggaagctccttctcgtcctcgatataggtgagggcataacgcaggttcggagagaaccagaacctcttgcccaacttcccgtaccccatatcaaggtcgtgtatgtactgccccagctgcgcgatgctctgggacacgatgtcacgcggccccttacacggtaccggcgaagcgaaagcattggcgtagctgatcggcgtgcacccgtccggcttgacttcgacgacgatgccgtccggcggattgtgcgcggcgaagctgttctgcttgccgctggggttggccagtgcggctccgcgcaaaaaagcccccaccgtgtgcgccgccaggtctgtgttgcctcgcaggttccggaccagcgtgtcccagtggatggagaaatacttgtagaagcaggcggacgcaaacatcgcctcgtccacatacgcagccccggcgtccttgccaggcagatcgtcagccgtaacgaagtagtccacttccggacgagcctcatgcgtggaaattgcgtgcgcgacttggagagccgcctccaccgtggtgttgtacttggccagcggcttggtctccagcattcgcccggtcagcgccatatccgggatggccacctcttcctcaatcagcttggcaaactgcgcggcaagctccgcggtgtccgcgtcgtgcttctgaacgatggcagccatcttgtcgatagcgctccgggcgacatagactgccatatccgtcgtgccatcgtcgctcgcctcgaaaccaagctctttaaggatctccgaagcccgcttctttacatccttcttgccctcaaccttggcagcaatgacttccgcaagccttcgggttcggaccccgccgagcaaattgcggaactgcgcgctcgtgcggacgctccgcttgatacactgactggaaatccgcaaacgcaagaccccaccgaagtagcacgtcttcggcgcgtccaggtcatcacgattgaggttgccagggctgtgattttgaatcacgtgcaattcgatcaacatggtatgctcccatgaagtgggccaggtcaaggccgaaccgtgcgatgatgaaccgtaacggtggaagcgaaccagcctcccattcgcgctagccccgagggctgcacactaagctggtccagttcgccccggacgcccattctccttctcgggcctcggaggccagacgaccaatgcgggctgcccggaaccgtgtttccaccaaggcacgggtgaccttgttcccggtctctacttgtcaatcttctcaacgtctcacccggctacgccgccggacgcttctcacagccattcgcttcgcccctggcccgcgccagcaggcgagcgaagcgagccaaaggggccaggggcgaagcgaagttcgctcacgccgcccgcctcaacttctttgcgtcgtacaccgtctgctgtttcagcaactggtaggcgatggtcagcaacttcctggccaacgccacgatggccgtcttcttgccccggtggtacgccaccttggcgaaccacttccgcagcggcgccgtgtctctcccggtgtccatcgccaccaactgggcgatctgcacccagacggcacgcagttcccgccggccttcccggctgatcgacccatactccgtccgctccccgctgctccgcatcgtcggggccaggcccgagtagcccaccagcttccgcgaggaactgaaccggttcacgtcgtccaccgccgccaggaacgtcaacgacgcgatccgcccgaccttcggcatcgtctgaagccttgccgcacggtcgtcggacttctcacgctgcgccaattccctgtccaacgcctggagcgaacgcgtcagcgtcttgaacgtctcggcgtaggcctcgacgatcggccgaaggtggctgtgggtgaactccacctccagcagacgctgccacgccgccaggctcgtcaggaatcgcgacggcaagcagatgccttcctgacgcagcatcccgcggaccacgttgcagaccttcgtccgcgccgagaccaactgccgccgcgccaccagcaggcctcgcaggctgcgggtctctttgtccggcacatgcaccggatcgggcaggccgtcgagccgaagcagctcgcacaacagcttggcgtcgatcttgtcggtcttgcgacggctctcggcgatcagccgcaccttgttggggttgaccacgttcacctcggcgccaatctccaccagcaggtcgtgaatccacgccgtctgcgggccggcctccaccgccaccttcaacccgccggggacgaaccgcttcaagacgcggcggaagtcctccgccgtcgtcggcaactcgcccttggacttgatgcgtccatcgccatcggtgatgtagatgtaacttgacttcatcgccacgtcgattccacaatagttcatgggccatctcctgctgtctggggtagcggattttgaggcgtccctttgacgacctcgttcaaatccatagactacctcgagccgggatggctcacttcatagcttctcctaccgctccaagctacttgacagttccacatcgccgccgtcaagctacccttgtttcgcacagaagggtgggctattgcccaccaactacgaatccggaattccaggggtaccgtatgtcgatcatgccgattgagcacgtgccggactgggaaaagcgcatcgcgcggcaggacgccttctggtcctgccagatcatcgaccggccgctggtgtgggtcaccgtgccgagaaagaaggaggtggtcccctggccgaaggagaagacctacccgagctttcgcgaccggtggatcgacacccagcgggtcgtcgagctggccgtcgcccgcgcgctcaacaccgattggctcggcgattccctgccgacggcctggcctaatctcgggcccgaggtctttcctgcgttcttcgggcaggacctggagttcaccgagaccaccagctggtcggtgccgatcctgcacgactggaagtacgccgaccgcatccgcttctcgcccgacaacgtctactacaacaaactcaaggaaatgacgcgggccctgctggacgccggccgggggaagttctacaccggcctgaccgattttcatcccggcggcgattgcatcgcggcctggcgcgacccgcagaacctggcgatc

SEQ ID NO: 777 - DNA, 6644 bp, Artificial Sequence
  Synthetic Oligonucleotide
ccggaacggcggcctcgccgcatcgctaccccgatgagtctatccgccaaccggccacgacgtaaagagcaaatcccggctccgaagtaggtagtagccagtagccagtagccggtagccagtggggagcaggggttaggcgacagccctcgtcctcgttctcgttctcgtcctcggtcttttcatgtttccgggtgaaccgaaggttcacgtgcgactgcgccccaaacgggccttgcggccgcatgacgcaactggtatgctctgccggcacgaacacgggattcatttgattgcggcgggaacacggttatgaagcaggcaagcgactccttgaaaggaaggcacgcatgaactttaaccttctggacgaagggtttatccctgtcttgtggtccgatgggcgattcggccgggtgggaatcaggaccgctcttgcagaggcaggccacattcgccaaatcgcggcctccaacccgatggacaacgtcgcactgctgcgcttcctgctggcggttctttactggtgcaaaggcccaccgccggaccggggcgagaaggacacaatcctcgccgcgggccaattccccccggactggttcgccaagcttgaccagcaagagaaaaaggactgcttcaacctgctgggggatggcaagcggttctaccaggaccctaccgctcggcgtgaacgggcaacgacagaccttcttcaggagatcccgacgggcaacaacttttggcacttcagacattcaaatgatggccacgagggcctctgtcccccctgctgcgcgatcggactgctgcggcttccgctcttctcggtaagcggcctgcccgacctgaaagccggaatcaacggcactccgcccatctacgttgttccggtcggacaatcattgctgcacacgctctgtctgaactgggtcgcgtgcgggtcgctcggcgctcccgcctgggaacagtcgggcgttcggccgcctgatggcacgcctgttcctctcttgaccggattgacaatgctgtcgcggcgtgtgtggctgcatggcctctcttcgcccggcggcgcctgcattggttgcggcagggaacaatcggcgctcatccggttctgcgaattccagagcgcaggcaatcagcgggacgagtattgggatgacccgcacgtcatctatgcgaagaaagtgaacgcacaggacgggaaagagagccggaaggcactgaccacaccggacctcacaaaatccttcttccgaatggacaaaccgtgggcctcgctgttcatggaggtcggctcttcgaccaagttccgctgcaattcggagacagttcgcctgctcattgtcggtttcgccaccgataaggcgaagaacatcgacgtgtgggagcgaatctgcgaagtgccattctgcgcctcggccgccgaatcaccgggctccgctgcagcggcgaaaatcaccacgtggaacgacgagagcaggagacttccagggcgcatgaaaccaaggggctcaaagtcggatggtgatgagtttgtcgcggctctcgcctccatccgcccgcatgtggaggcgcaagtttcggccaacatcgccgaccttctcgccgaacctgagtcggcctggccgcgggccgtcgatgaataccaccggatgctgcctgtcgttgccggatcgctcgcccctgggttcaccacgcgggcggtgcaacggcgaaatcagatcgccggcgccttgccggatatgacgccaagacaagaacccgagccccgcaagcccagggcaaagaaaggtgccgacaaatgacacccacggagcaattcattcaaacgctggaatccctcaaggcgggggatcttggccggctccggaatctggccgatctgcccctggatgagtcggtggacggcttcgacctgtttgccggcctctggtggcctctgaggcagaagagccagagggcgccccgccgcgaggtcgcctggcttatcgcgaagctgtatgccttctgtcccctgccgcaagtctgcggcgcaacgctcgcggggcaactaggcaaactgccccgccaagaagaacgggcccaagaccgccgtcagcagcgattcgacgaattgctcctgctgccgctttccgggatcgaaccggctttgcggtgggggctgacgctgattgcagacaacggcaggaagctggattgggtccggctcgccgacgaactgtccgtatgggagcgggaacaaacccgccgcaaatggtcaatggaattcctgggactcaaccgtagccaaaccctttgaaaaggagaacaaccgtgttgatagagattcacgccattcagaatcacagcccggccaacctcaaccgcgacgacctgggcgcgccgaagacttgttacttcggcggggtcatgcgctcgcgcatctccagccagtgcatcaagcgcagcatccgcaccagcgaacaattcaagctcctctgcggaggcattcgcaccaggcagcttgccaaattgatctcagaccaagtaaccggcaagtccgacgtcaagaaacgcgctgtgaagatactggagaagtgcggcataaaatccaaggacgaaaacaagagcgacatgctggtgtacacgaccgacgaggcaatcgcccagatcgcaagactcctccaagagaacgacggcgaggcgaacgggcttgccgagcaatgcgggaaacttatctctgagcttgtcgctgttccggacatggcactcagcggaagaatgctggaaacgggcgtcctggccgacacgacggtcgatgcgtcattgcaggttgcccacgcaatctcgacccatgaggcccggccggaggtcgattactacgttgcggctgacgacatccccggtgacgatgccggcgctggctatgttgatgaagcaatgtttgcctccgcctgcttctacaaatacttttcgatccactgggagacacttcttgggaatctcaaaggcttcgaggggaacaaagagttcttggccgcccataccgtcggagcgttcctgcgcggcgcggccctggccaatccaaccggaaagcagaacagttttgcagctcacaatccgccggatgggatgcttgttgagatcaaacagacccccatcagctatgcgaatgcgtttgctaacccagtcccctgcaaggggccgcgcgacatggtctgccagagcattgcccaactcgggcagtacgtccacgacctggatgttggctacggcaagccggacaagcgattctggttctcgccgaatctgcgacatcccctgacggccatagatgacaaccaggaaattgccctggccaatcacaacctcaagtcactggacgaactggtcgtcgaggtggtccgggctgtcggcttcgactgggcacaggtgcaggccgtcacggtaaagtaaggaggtcgtgacgatgaacgcaaacactctctttcttcgcctcgaaggcccgctgcaatcatggggcagccacgaatcgaagttcctcattcgaaggaccggcgaggccccgaccaaatcgggcgttgtcggcctgctttgctccgccctgggaattcccaggataaccgcaagggaacagctcccgaagctcaacgccctggctatggcggtccgcgtcgaccggcccggcgtacgatggtgggactaccataccgtaggagcgaaaatggaaatgcgtatcgctcaaggtgaaggcaagaccaaacaaggggcgatgctcacccgccgggaatacctgtgcgacgccagtttcctggtcgcccttcagggcaatcccgagttggtgcatgagttgcatcatgcgctattacagccggtttggacgatgtttcttgggcgcaagagttgtcccccgtcgctgccgttggtcggccggaatgaccaatccgacataggcgactttaccgatctgccgtcagcgctatgctcgatcccctggcgaccccgccttgccggcgacgagcggcccgagcgcgtcgagtgtctgatggaatggcggccgtccccctcagaacccgaggcgccgccagacgccgaggtctggtacgatgtcgccctgtccttcgacgtgccaggccacgaggcgaggttcgttgttcgcagccagttgaccgtgggcgatggaaaaggtgttcccacaggcccgccgcgccaaaccaggaccccggccccgcctcgcccgcgcgccgattaccgcaacaccgagtatcgcaaggcccgtcaacaacgcctcgacgccgaccatggcctgtgcgtgttctgcaaggccccggccaccacggtccagcacatcacctaccgccgtgccggcggcggcgaagaacccgacgacctgcgcgctctctgccgcctctgccacgacgccgtaacgatgatcgagtacggccagggcatggggctcgaccggatcaacccggaggatccgaaactgcggaaaaagatcatcgccaagcgtgatgagattgttgccttccggtcccttgaaacccgccgtcggcgacttgcccccgaggaggtcgagtaatgtacctgtccacccttctgatcgatgtcggcagcaaccccgaccgcccccgccccggccggctgtggctgcgcaacctctaccgcgttcaccaacgcctttgcatggcgtttccttccaggccccgcgtcgacgccgacccggagttcctcaaaccttacgacccggcgcagttcggcgatgggcaggtccacgttgcgcggggcagcaaagcggggttccttttccgcgtcgatccccagcccggcggcacggccgtcatactcgtcctgtcggccagcgagcctaattgggactacgccttccacaatgcgcggcatctcttggccgggccgccagaaaagccccggcccctgcaactgctcatcgagcccggaaggcggttccgctttcggctcctggccaacccgacaaagcgcccgcccctggccaaggcccagcggatcgagaagaagcaggcgggcgaaaaggtcaaacgaccccgcatgcagattacatggaaagagggcgacgaccccgccgaggccttcgccgactggctctgcgccagggcggaaaaggccggctttaggattgacccgaaggacctcacaatctccaacatcggctacgtgtacgtccacaagggtgggcgggaggacgccgcccagcgcttgcgctccgcacgctacgaaggcatcctcgaggtaaccgacgccgacgccttcgcccaaacccttgccgcgggcatcggcccggcaaaggccttcggcttcggcctgttgtctctcgtacccgtgcgggtttgagttattccgcttcggcgatgaggccgataccgctctttgacaagtgcatacataagggaaacgggaatgaaaaaccttcaggaactgcctcgcttcggcgacaagctcagctacctctacatggagcatgccagtatcgaccagtgcgacaaggccgttgccgcgcacgatgctgaaggctccgtccccatccccgccgccggcctggctgtgctcatgctcggcccggggacctccatcacccacgccgccatcaaaaccctggccgacaacaactgccaggtcatctggaccggggaggacgccgtacgattctacgcccagggcctgggcggctctcgacacagccgaaatataatccaacaggcccgcctggtcagcaacgacatcacccgtctgcaagtcgtcatccggatgtactgcatcaggttcagagaagccatcgatcccgacctcaccttgcagcagttgcggggcaaggagggcattcgagtccgccaggcctacgccgaggccgctcgcacctttggcatcaactggcaggggcgttcctacaaacgtcagcagtgggactacgccgacccgatcaaccgtgccctgtcggccgcaaacgcctgcctctacggcctggtccacgccgcaatcctctccggcggctacagcaccgccctgggtttcatccacaccggcaagcaactgtcctttgtgtacgatgtggccgacctctacaaggccgactacaccattcccacggccttcgccgttgtcgccggcggggcaacacaactggaacgcgaagtccgcctcacctgccgggaaaccttccgcaaggccaagctcatggaacgcatcctgcctgacattgagaaggcgctgaatgttccgcccctcagcgcagccctggccgaccaggacgatgcctactccgatgacgccgccctgccggcagacctgtggcaaccggcctgcctgggacccgatacgcccatcggaaccgttctgaaactggacccgcttaacttccccgtgcaggagaaacccgatgatcgtcatgatactggagcgagtgacaccctctctgcggggtgaagtgacccgctggctgatcgaggtcaaggccggcgtcttcgtgggttggctctcggccagggtccgcgaccttctgtgggacaaagtgtgccagtcgaaggcaactggctctgctacaatcatttatagcgataacaccgagcaaggtttctccgtccgctctgccggcgaccccagccggcgatttgtagacttcgatggcc

SEQ ID NO: 778 - DNA, 6642 bp, Artificial Sequence
  Synthetic Oligonucleotide
aatcaccgggcgcgcagccctgggcagagccagtcctacggcgcgccggccggaatctgcgcgggcgccagagacagcaggccgaatccaaacgccttgccaggaccaatgcctctggcgagggtattccggaagttagcgggatcggtgacttcgagtacgccctcgtaccgcgccgaccggagccgccggccggaaccctgatcgcgcttgtcgttgacgtaaacgtatccgggttggatgtcatcgatgccaaccagtcggaaaccgggtggggattgtttgccctctgaattcttcggagccgaccagccaggttcagcgcggcgcttgagccatttgtccaaagcggctgccgggaccgggatgtccttccccatccatcgctgatcgaagggcttcccggcgacatcgaccgatctgctactgacttttctcaccgggttcgcgaggagacggaaccgaagacgctgttccttcgcgaagcagggatcgaatggtttcacctctggtttcactccaggcgccagaatatgcctggcgttgtgaaaggcgtaatcccagtcgggccgcatggcggactgtagcagaatcaccgcccgcccgccggtttgcgggtcgatgcgaaacaggaagttgtgttccgcatcgcgggggacatgaacaggacgttccgcggccgcaaccgcgcatgctcgcggaggcgctgcggtgccggtgctgacggtgcaccgctcagggcgggggtcctgaaagccgcacggctgatacggcaacaggaattcggggtctttctcgggttgcaccgcggagggaaacgccatgcacagacgctggtggacccggtagaggtttcgcaaccacagacgtccggggcgggggcggtcagggtcttcgcccacgttgatcaacaggtaggataggtacatgtctattccacctcctcggcgtcgagatgccggcgacgcgtctccaacgaccgaaacttgatgatctcggtacgctttgcgatgatttgctcgcgccaacgcggttcgcacgggttgatgcgatccaggcccatgccctgaccgtactcgatcatcgtcaccgcatcgtggcagagccggcagagcgagcgcaaatcgtcctgcgactcgccgccgccagcccggcggtaggtgacgtggtgcacgttcatgcgccgaggcgtgtcgtaggacttgcagaaaacgcacagtctctggtcagccttgaggcgggcatcgcgggccgtggcccactggctgctcctgtagttcgcgcgcgggcgctccggacgcggcgtgcgatgttgcagcggttctccgacgaccttggcaatgctgatgggttcccgcactacgagccgcggttcgtgtaccggcgggtcgaacgaaaccggcgagtcgtaccagacctcggcggcgcccggggctttggcttgggccgaaggccgccattcaatcagcccaggcgcttcaccccgatgaggttcgttgtcgatatcccacattcgtggccgccagggaatagctctcagcgccgcttgcagatcatcatatttctccgggttgtcccacgtttcaccgtcaagtgcccgtggtgctgccaggatgggggcgctgggcgggcacgacttgcggccgagaaaaaggggccacttcggcccacgcagagcggttgcgatctcggcgatcaaagcactttgatcgccgtcgccttgtagagccaccaggaagctggcgtccgctaagtactcgcggcggctgatcagcgttccctgggcgccggtcttggggttgccctccgccgtcaacatgccaatccccgcaccgaccgtgtgaaagtcccaccagcgcgtgccgggccggtcggcgcgcacgcccatgcgaagcccgttcaattcccgcagacgcttgcccgctgcctgccgcgacaatcccatggcgcagcagatcaggccgatgacgccggacttggtgggtgcctccatcgttcgccggatgacgaacttcgaattgtcgccccacgcctgaagcgggccttccagacgcaggaggatggtgttaggcaagttgttcatgtctacgcctcggtgctccccgcagccttggcggccgactgggtgtcagacaaccacttgcacacatcggcccattccaactcggaggtttccctgacaacggcctcaaccaattcatcgagcacctcaaatcgtcgtttcgtcagaggtttactcgttagcttcttgccatccggcgagcggtcccagtagtggaaggggaatcgcgacaagcttcggctgaaccacagcaggtttgagtcaaccgcgtaggctctgcggagagcctgcacgtggtccgctaggcacgcaacgctgcggccttcgaggctcgtctcatccggtgcgtcatcgtccggcttgccgattcgctcgaccggctcggcgaaggcgttcgcgtaactggtgggcgtcttgctcttcttgatttcgacgaggatgccgcacgggtcgcagttggaggcgaagctgttttgcttgccgctgggcgaggtctgcgccgcggctcgcaggaaatgaccgagcgcggcggcggcgagtcgttcggcgtgaggcttcaactcttccttccactttccgtggccttctgcgttcgccttctgatccggctcaggtccggcgaggttgtacacgagttgatcccagtcgagggagaagtacttatagaagcacgcagagttgaacatcgcttcgtcgacatgcgcggcgccgccaccggctttgcccaggtcgtccaccgccgtgaagtagtccacttcgttgaccgtcgcgtgcgttgagatggcatgcgcgacttgcatcgctgcttccacatcctggaaggcgtcggacgtggtcatacggccgaacagggcgatgtctaccgcgtcaccggagtggatagctgccagagaatcgaggaattcgccgtacttctttggcttgtcacgcttcgtctcgagcctgggctctccttttctacccttgctcgaagtaacagactcaaaacccttcgcgtcttcggctgctaggcggtcaagcccatcggcaatgagcttggccactgcctcatccgaatccgcaccgggttggttttcgtcagccggctgcggttcgccacctgccggcgggccttccgcagcttcggtctcctgttcgcccgcactgatgatcgtccgcagttcggccatccgagcttcggtgtgccggatgcgccatgcagcttccaacgcacgctcacgctgcttatccgtcagcgatgtggtggtaagttcttgcttaaacacagattcaaagacggtcgcagggtcgaggaagtgctcgcggtgctcgttgtcggcagtcagaagcgtctctatgaacttcttggcatgccccggacccagaaagatgagttgaggcgtctgcgggcgatcatctcgctttgacgtcttctccttcggtggttccttcccttccttgcgagcgatcgttttacacgcagcgacgatagcattcttggtgcttcgctcgtaatgctcctccgctaccccgagatcgaggaacttccgcttgatgctcggatcgtccaacacttgggcgaccagccacgggaatagtttggtgcgaaaaccgagatgccccttcatcgcttgcgcgaacatccccggctcacggttgtgcaggtcgtccggattgccggggttccggatgctgcgcttgaggcactggctggagatgcgcgcccgggtggcaccgccgaaaaagcacgtcttgggtgcgcccaggtcgtcccggttcaggttcgacgggctgtggttctggatcatgtggatttcaatcagcatggccggtttctcctttcggttttgaggcctccaggtattggcaggcccacttttcacgaacgtctccgcggcggcggtattcttcgccgcgatcccaacttgatacgtcatcgagcagttgtgcccaatcagggccgctcaccctgccggccgtcacggcatcggccacgacggacaatgcccagcgcaggtgcggctccagggcggcaagcggcgactggagcagcgcgtcgaatcgctgccggtagcgcttgcggccaaaatcattgcgaggctcacacctgccaagcaccgctggcagcgacgcgcacttttgtcgaacgggcgccgggcaccttgcgcatgagcaagcttcgcccggcgccgctggagtgcacttctggccaacgtacggcatcggtctcgcgcaatacaacttggcgaccagccaactggtctcgcggcgcggcgcagcctggtttctcttcctcagcggccaccacaggccggtaaagagatcaaagccgggtacggacccatccaactgttgaccgcccagccggcggagcgaggagcgctcgccttccttcagcgcttccaggcgttgaatgaatttcacagtttgagtcatgctcggcctcgctttcgcggttcgcgtttgggtttcttgccggttgccggatttgccgccttcatatcgttcgccgccaacttttcgatcgcctgatttaacatctggcgcgccatttcggccgcttcgcgccggcgcagtggcgagccggcggtggtggagtcaacaacctgccgaacatggcggccgataattcgaagcgcctcatctctccactctcctaatacctgtccctgcacatcgctatcggtctggtcacaaatggctaagcggtgcatcagtttaaagaagctgctctccaattcgcgttcggctggcgggctgagggcgcagagacccgagcggattgcgtgccctttcgctctgggcgcacacagtgccccaataacaaaatgaccccttggcgggtcaccccaattgcgggcctgtgccgaagccgtgccctgtgtaagtttcctaagccactccatttcagttaacaaacgacgcctcacgccagagcccatttcggggagcgtggtcgtgtgcgtcgcagcgtgcttgtaaagtgcttggctgttcgcaagcagcgtagtgtggaactctcttgtgccggtgtcggagccagcaggacgccgcaggtgtccctccaatagggaacgccagacaccggcatgctcctccagtggctcattggggtttgggcacgacgggacgatgttcttctctttggcgctacgagcatcttttcgactgacccgcagaaggtgaggatcgtccggccacggctctttggatggtctcgcccaaccagggcggaagcgaatccaccggaccaaacggtcggtcggttcggcgcagtagcaacagcgtccgggggacaagtctcgcttgccatctgcgtgaggcggcgccaacaggacgcaccgggatcgccaagtcatgcctttaagaaagcccagcggggactgttcgttcgcgccatgccaaaccggcgcgtcgcccttaaccgcgagggggcttggccatgtaaggaggaacgtgcagagcaagttcgcgccaacgtgaacagagtaggctggcgcattcccattaaggctggcggtcatgctctgcccgcgtccggcggttcctgccgaggcgacgccgggccaccgtgcaagccccagcgcgcagcacggcaaacacattccgtcccggccgtcgcgggtgtgccgaaagtgggcgatcttggaacccgacgggagatcatgcagcaggttcgtcaccgcgaccttgggcccctccgccgaggcatcctggtagaacccgcccttgtcggtaagcaaatcgaactccctgtttggttccttgtcgcctccaaggttctccttgagccaatcgtccgggacgccgccctccctttcaagcctctcgcgatccgcgccggtcaggcttgatttgcaccattgcaacacgaccagcaggaagcgcagcaacgccacattgtccattgggttcgacgcggcgatctgacggatgcggcccgcctctatcagcgcggtcctgatgctcacgcgctcgggcttcccatgggtccagagaatgggaatccacggcttcacgagcaggttgtaattgtcggctttgtcggtcatgccttcctcgttgacgctgcgagttgtaggaaccgcgctgccccagactgctgcctagattcaaggaggagcaacgccgcttcggccttcccctcgcccacgacggcgtcaacgatgacgaagccagggcctcgctcggaccgggcgcgctcccaaataaggttgacagaaccagcaacggccgcggtgtcgagcatgtggcagaaaagcgggtgggaagcgaaagatttctcgtcgctcgggcggctcttcgcccaaagcagaagaagactatcgaatgcgcgttccgggggtgaggaagacgcgctcatagcgcaagcatgatagaacggactgaagtaagtctcaagcggtcattttccgccaagcgttcaccgggaggatagcgccgctttgggccgagaaataagtttgcagcaaacgcgcgccagcagcggcggtgaagccggaagggaccgccagacggctttaaaacaccggcgcccgcaagttgcgcccctacagcgctttagcgccctcctccaagaacaagccaattttcaaaaagtg

SEQ ID NO: 779 - DNA, 6631 bp, Artificial Sequence
  Synthetic Oligonucleotide
cgatctgcggcaacagcgccgcgcgcgagggcgagcccaacgccgccgcagccgccccgaccaacagcagcgcgtacatccagcccacggaaaggtcgctccacgcggccagcgccagccccaacgagaccacgctgctcagtcccagcatgaccatcatcacggcccggcggtcccagcggtcggcaatctgcccgcccgggatggccaacagcaccacgggcaccgcctggaccagcccgatccagcccaaggccagcggatcccgggtccggtcgtagatgtgcaccccgatcgccaccgtctcgatcattttgccaaaggtcagcaggaaccagccgccggcaaagcaccggtagttcggattccgccacgcggcgtagggatccggtcgatggctcgggtcgtgcatgccgggaccttccaagagcggcgaaaccatggattatcggctgaagagggcacgccggcaaggaagttcggccgcatgcccccttgtggcgccctcgatctcccaccataatacgggggcccgggacccaggaggcccccatgtccggcgacccgccgagcccgcccgagggaatcaacatgaactacaacctccttgaagaaaaatggattccggtgctctacgccgacggtcgggtcgagcccgtcggcatccgcagggcactgaccaacgcccgcgccatccgccagatcgccgcgtcgaaccctatggacaacgtcgctctgctgcgcctactgctggcggtgctccagtggtgcaagcccagcctgtccgacgataaacgcgcgcagctcgacggcggctgcggtatctcggacgactggttgaaagagaaactcggcaccgaagacagccccaacgcggcgttcgatctactgggcgcaggcgagcggttttatcaatcgcacactcaggcacacgaagagccgaagcgccatgtctctgaccttttcgcttaccttccggctgcgaccgagattagtcattttcgccatgtgaacgatcagaatatcgcgctctgtctgaattgctgtgcggtaggattagcccggcttccggcgtgtgccatgcagggtgggcaagggaagtcaccatccatcaacaatgcgccgccgatttattttctgcccgctgggaagacgctgctggataccttcctactcaactggccgctaacacgcaaggcagacggtcatccagcatgggagaacaaatcacaaccggacggagaaatcggcactctcgaagggcttacttggcaaccgcggcaagcttggctcggaacgtttgttcaagaccccgagggcaggtgtgctcgttgcggcacaacagaacacctggtctcaaaagttgtgttcaagaaaggtcgcagtcgcaggggtgagagtcgtacatggcgtgatccgcatgtggcctggtctgttgcgcaggaagactccgacaacaacggcacggacatgaaggaccaagccttgcgtgggccagacccgctgaagttcacaacaaaagaggcctcgctttggcgcaagacggcttgcgcggtgctgaaatcatccggcgagcactcgttcattccaagcattgcagacgcgatcgttcgtctgacacccgaatcggacctgcaagtggcgtgctttgaacccttcaccaagcaggcgaaatcattcgacgagcacagcgatgcctggagcttctctcgtgatcttctacgaaacgatgatctgcggagccgaacactcgcggagcttgaacgcctcgacagcctgaggttggacaaactcattctcaaagcgctgcctcgcaacacgaagcagcgtcccgaggtcaaggctgcgctggcggatatagcggctgagacggagcgtcggttgcgaaagcggttcgagcgattcgtggcagaactaaccacagccgacaccgacgagaaggtcggacgctacagtgaagattggtgcggagatgttcattccatccttggggaagcgttgcatcacgcgtgcgcggtgttctcctccgggtcgcccttgcgacgacgcgaagctatcacgagtgcgcaacaagcgttgtctacgttgatgagcggtccgggtaagcgcgaagagaagacaacgagtttggaggacgcgcaagtcccagcgccgccgcggcaagcgaggtggcccgtgagtccgagcgagacgttcattcgacggttggaagcgcttaacgaaggtgagcgatcgcgcctgcgtcgtcttgccgggaaaccgctcgatcagacgctgccgggcttcgacctattcaccggcttgtggtggccgctgctgcgggagaagagtccatgcgcacccgaacggggaatcgcttggctggtggccaagctctacggcgcttttcctgtgctgcacgttcggggtgggcgggcacaactcgtacgggtgttgggaagctgcgagagagctttacgaaacgagtttgatcgcgatcgcttccgccgacggttcgatgccctcctgcaatcaccgctgtccggccttgagccgcacctacactgggccctgtcaaccgtgcgtcgcgctgtcgcacagaggcgggtggagggagtcgattgggtccgattgctggacgacctgcgcctctgggtccgaggtcctgacagacaagatgaagacctggagcgccgccatcgtgacattcgcgacatctgggccgaggagtatcttaacgcaacacctcaaccgcaaggagcaagccatgctgattgaaatccacatgatccagaaccacagcccgtcgaacctgaaccgggacgacctgggcgcgcccaagacgtgcttgttcggcggcgtcacccgcgcccgcatctccagccaatgcctcaaacgcagcatccgcaacccgggcaacgcggacaccgttcacaaccgtgagccgggtgagtttgccgaggcgatgggcgaacacgttgcaactcgctcgaagttcttccctgatcgcgtaaaggccgcgctcgagcaaatcggcgaggccaacgggatccccaaagatgattttcccaaactggtgcaatccgccgccaagataactcaaaagaaagacaagaaacaaactggatccaaagacgatgacgatgatgatgatgtattggacgatcggtccaaaacatcacaactggtgttcttcgagcggttggaggccgagcgcatggtccgcatcctgggcgcgcgaaagaaagaggacaaaaggcagtatgacaagttcctcaattggaagtggggaaaagaaaagggcgatgggcacgcggctgatactaaaggaggtagtacgggcgaatccaaggcgaagaaggagaaggctgacttcctcacgcggttgcgggcagcatacgggcgaggtgccgtggatattgccctcttcggtcggatgacaacctcggaagcgttcgaggacgtgaaagccgctgtgcaggtggcgcacgcgatctcgactcacgcggtggtcaacgaggtcgattactggacggccgtggacgacctgggcaagagccaagccagcggacacttgggcgaggcgatgttcaattccgcgtgtttctacaagtacttttgcctcgactgggctcagttggtgagcaacctggctgggccggagccggatgagaagaaggacgcagccgcgcacaagaagtggaaggatgaaatcaagcccgaagccgagcgactcgccgcctgcacgctgggatatttcatccgcgccgcggcactgaccacgcctagcggcaagcagaacagcttcgccgccaacaatgagccatgcgccatcctggttgaaatcaagaccggcccaaagatccccaccagctatgccaacgcattcgcggagccggcccgcaagatcggcgacccgcccgacgacgcgccggattgcgtcagcctgatcggccgcagcatcgcccaattcggcgatcacgtctatcagctccgcaatgcgtacagcatcgactcaaccctcttctggtacgcccttcccctttaccgctatcccctccagggctggcagcgcgaggacgacggtcgcaaggccaaagtccggatcgaaaagggcgagccgacggataaggacaagccgccagtccagttcgccaccgagtccttcgaagccttggaccgagaggaagggaagccgagcgaggaagggaagccgcgtgaggaacggaagccgagaggcttggtgcaagccgttgtcgacaagcttgaccttgagcttcaccttggcttcaagtggtcggacgtgaaggacgccggcaaggcccctgcaaaggagccctcaccgtgagcgatgcacccaacaccctcttcctccgcctggaggggccgcttcaagcctggggcgacaactccaagttcgtcatccgtcggaccatggaagcccccacgaagtccggcgtaatcggcctgatctgctgcgcgatgggggcaaaacgcagcgcggcaagtgagcatccggtaccggaccccttcgcacacctgcgtacgctggccgaccgtttggtgcccaagagaacggaggacggcactcgcgagactcggacgatcctcggcctgctgaacacactcatgatgggcgtccgcatcgaccgccccggcacgcgctggtgggactaccacacagtcggcgcgggtatcggaatgctgacagcgcagggaaaacttaagaccggcgctcaaggcacgctcatcacccggcgcgagtacctttgcgatgccagctttctcgtcgcacttcagggcgataccgaactgatccaagaggtaaagaacgccgtggtgaatccgaagtggccgcttttcctcggccgcaagtcgtgcccgccctccaggccgatcttggcaggcgagactcaatgcgacgaccctgcggccgcgttgcgacatcaaccttggcgcccccgcctggagcgcgatgtgccgcgcgagaacggcaaaccccgcaacacaatcgacctggactgcctggtcgagtggcgccgtgcccacgaaggcgacatcgcccccgccgtctggtacgacgccgcggtctccttcgatccgccggtgcatgagccgcggctggtgcagccgacgtgcatcgaactacccatcggtaagccactccagtatcgcaccccgcctccgtcgcgcccacgagcggactatcaagaccctgagtataggaagcgacgcctggagcgtcttcaccatgaccatggcctctgcgtcttttgcaagtcccctgccacaaccgtgcaacatgtcacctatcgccacgccggcggggacgaacgcctcgacgagttgcgctcgctctgccgcttgtgccacgacgccgtgaccatgatcgagtacggcctgggcatgggcctggaccgcatcaatcccgaggatccgtgctggcgcgacagcatcatccgtaagcgcgacgaaatcatcgaattccgttcgctggaaacccgaaggcgacgcctgagccccgaggaggtctgagccatgtacctgtcctggctactgatcaacgtcggcgacaatccagatcgtgaggactggcggaaccggaactggctccggaacgtctaccgcgtccaccaacggctgtccatggcattcccctccgccacgcgacgaaccgcttacgcccccgaggactttccagagcaagcacaagcagaccagatcatgcgcggcagcgccgatgtgcatgaggaacggggcgatcaaggaggattcctctatcgcattgatttcggcgtgcccccacgccccaacacgggccggcagtcagcgtgttcctgtgctaaagctgaactccctccccccgtcgttctcgtccagtcagccaagtggcctgattggaactacgcctttggtctcgacaaggatgctcgagatcccgtcaccggtcgaccggtgggtagcgccggacctctcctcgctgccgcgccggaagtgaaggagctcaaactcggatttcaagcgggggacatctgccgcttccgtctgaacgccaacccgacgcgcaggctgaatcacggaccattcagcggcaagcgagtctccgtagggcaaggacgcaccgccgtattggactggctgtggcgcaaggcatctgagggtggctgggacccgctctttgatcgcagggacaatgactgggatccgaactggcggatcgagaccggtttggtccatgcctggaagaaggaggatgcggaggctgaccggatgtcgtttgcatgtgccaatatcgacggcctcctcaaagtctgcgatcccgagcgcttccgagagacaatctctcgcggcatcggtcccgccaaggcattcggcttcggactcctcaccgtcaagaagctcgaccaatggacgacctgacccaactgacccgcttcgacgaccgtttgaccttcctgtacctggaaaagggccacatcgagcaacatctccggtccatcgcctatgtgacagagcaggagtcgatccccatcccggccgcaagcctggccctgctgatgctcggcccgggcacgacgatcacccacgcggcaatcaagaaccttgccgactgcacctgcctcgtcgcctggggtgggggggacgggacgcg

SEQ ID NO: 780 - DNA, 6621 bp, Artificial Sequence
  Synthetic Oligonucleotide
atcgtgtcggaattcgcagggcacttgaggatgcggcccagattcgccagatcgcggcccccaaccccatggatcgcgtggcgattctccgcttcctgctcgcgttgctctattggtgcaaagggaacccgccggatcccgcagggaccgacccagacgactcgtttccccgggattggttctcgaaatgtgacgagaaccgcgagtgcttcagccttctgggcgggggcaaaaggttctaccagtgccatgtggcagcggacgcccggaaggaagagaaggaacacgaggtcgtcaccctcatccacgagataccgaatggagatgacaaatggcacttcaggcactcgacggacagagctgacggcctttgtctggcttgctgcgcgctcggcttggtgcgtctcccgatcttcactacgagcggtgggcgagggtggcatcaaggaatcaacggttctccacccatatacgtgctgcgccttggaaagacgctccagggcacgctacgcgcgaactgggccagatgccagctcgttggccatccagcatgggttggcccggagcttccgccaactccaggacaggatgttcctcttctcaccgggttgactcttctgccaaggcgggtgtggctgcatgagccgtctgcgcctggaagatgcatcgggtgcggagcggaacaggctctcattcggacatgcgaattccagacggctggcaggcaggggaacgaaatgtgggatgatccccatgttgtttacctggacacgacgccaagaaagtccgcgagagcccccgacctgacggcctcaggcaagttcaaaatggaccgcccgtggccgcatctggttgcgcgcatccttgagaccggcaagttcggctccaaagacagcccccgttggcttcttgtcgtcggatttgcgaccgataaggcgaagaacattgacgtgtgggagcggaagattgcgatgccgccggtggcatcactcgacaatgcatccgcatccctactgcatgaatggcaagaccagggggcacggcttactgcgagtctcatccgcatcgtcaggtcaccaaacgagagtatatctcgcaggcacgttgagatcccgcccgtgatctcggctgtccgaccccatgtggaagacagagtttccgaacacgtaggcgacttgctcgccgggggccgcgacgcctggcaacaagcggccctcgaataccgcccaatgatggccgtcattgccaaatcgatctgcccaggcttcacgacggcggccgtccaaaggcggcgccagattggcagcgtaaagccggacatgcaggcgaaggaagaaccggccaggaaaacgagccggaagaaaggaggtggaaagtgagcgcaacggaggagtacattgccgctctggcgaggctgaaaccgggcgatctgggcatgctgcgcacccacgcgggaagagggctagacgaatcagttggcgggtttgacctgttcgcgggtctatggtggcccctgcgccagaagaacaagtccgctcctcgccgccaagtggcctggctgatcgccaagctgtacgcctaccgacccatcccgcagtcatccaacgacactctcgcccgccaattgaggcgttgccaatcgggcgaagagcgggagcgagagcgcctgcggcagaagttcgacgaactcctggccctgccgctcgacaagatcgagccggcgctccaatgggcgcttgacgtgttggcctcacacgaccgcaagctcgattgggtacaactgacggaccacctgtccgtatgggagcgtgagtccactcggctaaagtgggctgaagaattcatcacaaccagtgagaggagcgagtcatgttgatcgaggtacatctcattcagaaccacaatcccggcaatctgaaccgtgacgacctgggcgcgccaaagacctgctacttcggcggagtcctgcgatcacgcatctccagccagtgcatcaaacgcagcatccgcatgagcgatgagttcaagaaactgctcggtggcattcgtacgcggcggcttgcacaactgatcgccgaaggggtcaagggcagggtcgatgtcaagaaacaggcggcaaagatcctcaagcaatgcggcattgccccgaaggatgagaacgcgagcgacatgatcgtctacaccacccgcgaggcgatccgcgagatggccgctctcttgcagaacggcgaaggtaagacagatgagcaacttgcagaggagttcggcagtcttatctcccagcggacggccgtgcccgatatggctcttagcggtagaatgctggagaccggcgttctgaaagacaccacagtcgaagccgcccttcaggtggcgcacgccatctccacacacgaggcacgcccagaagtggactactatgttgccgccgatgacattcccggtgatgatgcgggcgcgagcttcgtgggcgaagcgatgtttgcttctgcctgtttctacaagtacttctccatccactgggagactctggttggtaatctcaagggattccagggcgacaaagaccagttggcggctcacacggtcggcgctttcatccgcgctgcggccctggtgaatcccacagggaagcagaactccttcgccgcacacaacccgcctgacggaatcctgatcgagttcaggaacacaccgatcagctacgccaacgctttcgcgaagccggtagttcaaggggagcgcgacctcatctcccagagcatcgcccaactcgggcaatacatccacgaccttgacaccggatacgggaagccggagagccggttctggttctcaccgaatcttcgttaccccctggtggcgaacgtcacggttgaggagaatggaaagaagaaggaagaggaaatgcctcttgccaaagacgaggaagggatcaaacggaacctgggatcgctcgacggtctcatccaggccgtgctcaaggccaaaggctatgactgggaggcggttcagaaggtcgttgccgtcccagaggtgacgccatgaccgccaacaccctcttcctccgccttgagggccccctacaagcgtggggcgtccaggaatccaagttcgccatccggcggaccgccgaggcccccaccaagtctgggggcattggtctcctctgcgcggcgctgggcatttcgcggtccgaggccccggagcggtggctccccaagctcagcggcctgctcatggccgtccgtatagatgcccccggcgtccgatggtgggactatcacacggtcggcgccaagatgcagatgcgcattgccgaaggccccggcaagagcaagccaggcgccatgctcacgcgccgtgagtacctctgcgatgcctcttttctcgtcgcccttcagggccaaaccgctctgatcgctgagttggagaacgcgctaagacagcccaagtggactctctacctcgggcggaagtcctgtcctccaacgcgtcctatgttggagtatccgtccgggaactatccagaccctctttctgcgctttcatccatcccctggcgtccacggctgagagatgattcgcagccacagaccgtggattgcctcctcgattgggagccaacagccgaacaaccagaggcgcccgaagacgcgctgatctggtacgacgtaccgctgacgttcgaaccgccggctcatagacccagattcgtcatccgcaagcaattacgggtcggtcacaacggcgaggtcgtagtcgcggaaaggcccgcgcagagtcttaccccgcggcctctgcgtccgagagccgactacggaaataccgagtacaagaagcgtcggctcgagcgtctcggccatgaccagcacctctgcgtcttctgcaagtcccccgccacaaccgttcagcacgtcacctatcgccgcgccggaggcacggaggagcccgaggacctgcggtctctctgccgcctgtgccacgacgcggtgacgatgatcgagtacggcctgggcatgggcctggaccgcatcaacccggaggaaccctgctggcgagaaaggatcatcaagaagcgccgggagatcatccagttccgatctctggaaacacgccgacgccggctggagccggaggaggtggaatagcgatgtacctctcctgtctcctcattaacgtcggagaagacccggaccgcccaagaccagggcgactctggcttcggaacctgtaccgcgtccaccagcgcctgtgcatggcatttccgtcgagggggcgcaaggagcgggaccgagagtttcttgaaccatacgcccctgccgacttcggagaggcggacgtgcacgttcggcgctcagaggacggggggttcctgttccgcgttgacccgcaaccgggcgggaacccgatgatcctcgtccagtctgcccatcccccagattgggactacgccttccacaatgcccagtacctcctggctgcaaagcccgaggtgaaagcctaccagccccgactagagaaggggcgacgcctgcgcttccgccttaaggccaactccacgcgacgagcatgcaagaactcgcgtcacccgtccggccagccgctcgacagcaagtggattggcaagcgcatccccgtacgcgtggaggccctgagagattggctggaccgctgcgcccagcgcagtggcttccacgtcaccgccttgacaaagacggtcgccggctacgtgtatttcaacgagaccggtgagaaggggaagtcgaagcggctcagctctgtcctatttgaagggacgctggaggtagacgatccaaccgcgtttgccaccgcgctgagggcgggcatgggtcatggcaaggcattcggcttcggcctcctgagcctggcccccgtctagtttcgcgtgtttcgcgggcagagaagcggttttcggttgtcggtgtccggtgatctggtctgtgcgaatctgtgtccatctgtggacgagacagatgaaggacctccacgtcctcccgaagttcgcggatcgctggccgcatctctacctggagcatgggcggctggacgtggatggggccaccctggccttccgcaataaggacggccttagccccatcccgatctgccacctgtccgtggtgctcctcgggccggggactacggtgacccaggcggcgatgaaggcgatggccgagtacaactgtctggtctgctggacgggggaaaagggggtccgcctctacgcccattcgacgggcgggacgcattcgggccatcgcctgttgcgtcaggccgagctttactgcgacccggcgacgcgcctggcggtcgtccgccgcatgtatcagaagcggttccctcagccggttcccgagccgctcgacattcagcaggtgcggggcatggaaggggcgcgggtgcgcgccgcctatcagcgcctggcacgcgagttcaacgtcgaatggcaaggccgcctctacgatcaggacgagtgggactacgcggacccgctcaaccgcgcgctgtcgtgctccaatgcctgtctctacggcatctgccacgcggccatcctgacggcgggctacagccccgccatcggcttcatccacacggggaagatgctgagcttcgtgtacgacatcgccgacctctacaagacggagctttcgatccccatcgcgttcagcacggtggcgcagggcacggaggaggtcgagcggcgggtgcggctcgcgtgcagggacatcttccacgtgagcaagatcatggaccggattctgccggacattgcggaggtgctggatgctcgtgatgatcttggagaaagcgccgacgagcttgaggggcgagctgtcacgctggctgattgagccgcacacgggcgtcttcgtcggccacctctcggcccgcgtccgcgacgagctctgggccaaggcctgccgcaagtcgtgggacggctcggtcgtccaggtctggtcggacacgacgaatccgcagggctaccgctatcgggtcttcggcgcgccgaaccgcgcgttggtggacttcgagggcattgccctggctcggcacccgcccaagaagcagcgggacaagcagaccaagggcgatgagcccagccaactcgacttgggcgcgccggatggggcggacgagtcgccctcgtgaaccaggccgtcgccgctctttgacaagccgacaagtgatccgcttgaccccgacccgcgcgactaggcatagtcctcgccgcgcaaaaaatacaccacaccttggtgtcttccccacacacgtgggggtgaaccgatccgcggagtgccaatgtggtatgccgccccgtcttccccacacacgtgggggtgaaccaggcggtcatcgcggactcgggccagatgttcatgtcttccccacacacgtgggggtgaaccggatgccccaggacggcccgccgccccggccctgtcttccccacacacgtgggggtgaaccggccgtgcgggtgacggtgttctcgacctcggcgtcttccccacacacgtgggggtgaacctgaaacataagagataacggcggacgcgtacacgtcttccccacacacgtgggggtgaaccgcccacg

SEQ ID NO: 781 - DNA, 6617 bp, Artificial Sequence
  Synthetic Oligonucleotide
tatgtcggttcacccccacatgcgtggggaaaattggggaggattgatccaggatgaaaacaaagacggttcacccccacatgcgtggggaaaataaatcccgttattgatttatcgcgatggatatcggttcacccccacatgcgtggggaaaatacgcccttgatcggccaagcccagccgggaaacggttcacccccacatgcgtggggaaaatactgaaaattatcttgtaagtggggattttggaagcaaaagtccctcgaagtcaacaatcagacggcgagtgtcaccagtagtacgaatagaaaatccttgctcgttgttactatcgtaaatcagtatagccgcgccgcctttaacactacggtcaacgcgctgccaaagcaagtcgcgaacccgtgcagaagtatgcccgacaaacactccggttttaggctgaatcagccacctagttaactcaccccgcagtgacggacttacccgctccaaaatcatcactaccatctttgttctctttctgtaagtcgcccagtacagtctgcaattttaatatctgccctatcggcatatcggctttaagcgttaccggctgccaccagtctactggcctgctttcatctccggcaaattcctctatcaactgttcttcctgggccacggggacagacaagacccttgtaatatcgggcagaatcttttccatcagtcttgtcgcgttgaaacatcgccgacactccatccgcacctcacgttcaagctgcggcggatttgcctttgccaagttgaaggccaatggaataatatgctcaactttatacaggtcggcgatgtcatagacgaacgacagatgtttgcccgtgtgtacaaatccaagcgctggcgagtatcctccagaaataacagccgcatgcacaagtccatacaggcaggcatttgctgccgaaagagcacgattaacggggtccgccgcattccattcctgcctattatatgagcgaccttgccacttgatgcccgcggccttggcggcttcagcatacgcctgccgtacacgaatcccttccattccacgaagctgttgaagcgtcaggccggagtccgggacgttgggaaaacggatgcagtacatccgaacgaccacctggagccgtgttatctcattggtcaccagacgcgcctgcattaagagatttctcgcagagcgcgttccgccgcaaccggcagcataaaagcgaacggcatcttctccgcaccatgctatcagacaattgttgtccgccaatgtcttgacggcctcgtgtgtgatttttgtaccagggccgagcagaaggacggctaaactggccgcggggacactcgttacaccgtcttgctgccagagtgcaatggatttagcttcctgctcgatgactgctttatctacatagagatatgagagcttatccgagaacctcggcaactcctgaagatttattctcctattcacttgtcaaagaacctccttccggttttacttaaccggcgcaatagacaataatccgaagccgaacgccttgcccgagcctatgccggctacaatagttttgcggaattggtcggggtctgtaactgtcagcatcccatcgaatcggacagaaagcagacgtttgctttcaggtttatcgtcctgcttataaatgtagatatagccggattgaaccactgtatcatgaatagcaaatccaccctttttaccacgaacgataagccattctttaagcatatcaaaaggaacaggaatacgcttccctatatattgagggttaacaggatttccgttgctatctttggaattctttgtgcaccttcttgttggatttgctgtaagtcggaatttaaagaattgtccctttttgaaagaaggattgtactctttgatttgcggaggcgcagcaaggaaatgaccggcgttatgaaaagcatagtcccagttgggccttatagacgacgaaacaaggattaccacagtaccacccagttgagcatctatacgaaaaaggaaaccattccccgtccgtcggtcaatatgtacctgtccgccgccaaagtcttcgggcttgaacggatccaaaaagtcttcatctttgccttcgcgttccttagatggaaacgccatgcacaaacgctgatgcacacgatacaaatttcgcaaccaggatcgtgccggtcgtggccggtcaggatttgtccccgtgtcaatgagtaatgtcgagatgaacatcattccacctcctctgccgcaaaccggcgtcggcgcgtttcaagcgatcggaattcaattattttattacgcttttggatgatcctgttgcgccaatagcggtcttccggatttatacggtctaatcccatcccaagaccatattctatcattgtcaccgcatcgtgacacaggcgacataacgagcggaggtcatcgactgtctcatcgccgccggcatggcgataggtgatgtgctgaactgttgttgctggagatttgcagaaaacacaaagcctgtggtctaactgcaaccgttcttcccgccgttccctgtactgactatttgtataatcggccctcggacgaagtgggttcggggtatttttctgcaaaggggttccaacacatatatccccatcttttccaacagacaatgacttacgtatgacgaaccttggatggtgtgacggcggctcgaacgaatccggcacatcgtaccatataaacgcatcaggaggggcttcgggctgatcagccgaaggctgccaatccagtaagcaatctatggaatctcgacattcggccatatccaaccgcggctgccaagcgatagatcgcagagcggtattcagattgtcgaaatatccaattgtgtgccccaattccgctataggtcgcgaaggcggacaacatttacggccaagatacaaaacccatttaggattccgtaccgcacactccagctttcctatcagacccgcgtctccctgtaacgcaacgaggaaggacgcatcacagagatattcgcggcgtgtgagcatcgcgccttccttagatttgccctcagcggtgcgcattatcattttcgccccgacagtgtgatagtcccaccagcgaattccggggcggtcaatacgaacgcccattttaagcttagtgaacggaagccattgtttgacatcgaaacgggaaatacccattgccgcactgagcatgccgataacacctgattttgtcggggcctccgccgtccgcctcaccacgaacttcgattcctgaaccccccatgactgcatcggcccttcaagtcgcaggaacaaagtattgccatccattacgcgaccccctgatttataaccacctttttaacttcgttccagtcgtatccaagagcgttgataacagccggaaccaattcgtccagcgatttgaaatttttgtcagcaataccgctttctttcttgatttctgctatgattataggatgccgtaaattcggcgaaaaccagaaccgttctttcggttttccgtatcctgtgtcgatatcgtgaatatattgcgctaattgggcgatgctctgcgaaaccatgtcacgtgatcccttgcttggcaccggactggcgaatgcattggcatagcttatgggggagccctttatttccaccagtattccatccggcaaattgtgagcagcaaaagcgttctgcttgccggagggattggccatcgctgcagctcgaatgaatgccccgactgtgtgcgccgccaaattcttattcccattgaggtttttgaccaactgttcccaatcgatagagaagtacttataaaagcacgctgacgcgaacatcgcttcatccacaaagcctgccccagcgtcttgaccttttacatcatcagcagcgatataataatcgacctccgggcgcgcctcgtgtgttgagattgcatgagcaacttgcaaagccgcctcaacggtagtgtctttcagaacgccggtttccagcatcctgccgcttagagccatatccggaacagttgtccgctcagagataagcgtgccgaattcctgcgccaattgttcatcagttttcttgtcaccactctgcaaaagcctggccatctcttcaacagcgtctttcgtggtatagatgagcatcttgcttttatacgggttattaggctcactttcttcatcgcttttcttgtttgtcttcttgggcttgaggccacagagcgtcataattttttcagcccgctttctaacatctgttttcccagtgaccttatcggctatcagcgtcgcaagctgtctcgtacgaataccgccaagcaatttctcaaattccttgctcatgcgaatgctccgcttgatgcactgacttgagatgcgagatcgcagtactcctccgaaataacaggtcttcggcgctccgaggtcatcacggttcagatttgatggactatgattttgaattgcatgaatctctattaacatagtagtttcctttcgctccctaaaaattcctccgcccaccgaaggcggatcgtttcattttcccatcgcgacaaatcgtctgtcagctttacccagtctacttttttattattcgaagcaagttctcgcaaggcccattgcagggcaggctcaattttatcgagcggcaatgatagtaccttgtcaaaccgctctccatagcttttctggcattcgggtttgtccggcagacaaaaccctaactgacgggcaaatgtctgtccgggtgaatgctccaccggacagaatgcatagagtttcgcgataagccatgctacttctcgtcttggcgcccattgattcttctgcctcaatggccaccagaggcctgcaaacagatcgaagccatcgactgattcgtcaagtccctgaccagcatgagtccgcaacaatcctaaatcaccgtttttgagcgagccgagcgcctttatgtatgcttctgtcgagctcatgcttcttctcctttcttgatttgcatatccggtatcaaactggcgatatgtctccgccgctggacagcatcagtcataaagcccggcgaaagcgacttagcaataacagtcatcattgggttatactctttcgctaccttctgccatgctgcatcatccgcagtaaataattctgctgcccgcgtggataccgcatactcgacatgcggccgaacggaaacaatcatagcagtagaaagcgacttcgatctgctcacacgagattcgagccgcttattctctttccgccactgttctacgaacggcgttctgtcctcacccaaaggcatggtaacaacacgctcccacacatcgacattctttgcattatcagtagcgaacccgacaattagaaatgatgcaattttttttccattctgcttggcaatacgtgctaataagtcaggccatggacgatccatacgaaatttgccggcttcggtcaaatcggctgctttgtaggacttacgagtcggcgtagaaaaataaagcacatggggatcattccatcgtgcgttttccagtcgtcctgccgtttgaaattcacatgttcgaactaattgtgtttttaaaccgcatccaatacaggtgtcaataggtccatctatttcatggagccacacccgtcgtgataatacagttaaccccgtcagtaatggaacatcactgtcttcggaaggacgaagagtaggctgagtccacgatggtacgccaactgatgcaacgcgtatccagtttgcagcaagagtttctgttagtgtcaagccgacaggaacaacatatataggcggaacaccatttattcccgacttgaggtcgggcaacccgctaactgaaaacagaggcaagcgtagtaagcccaagacacaacaagataagcaaagtccatccttttcatccgtagaatgtctaaagtgccaaaagttgtttccggtaggaatttcctgtaacaaatctgtaattgtacgcgaacgctttgcatttggatcttgatagaatcttgcggtttcccccagcagattaaaacaattcctgtttttctcgagttttgagaaccagtcggcgggaagcgaatcgactggtcgcatactgtttccttccggtggatttcccttacaccaatataagattgccagtagaaatcgaatgattgcaacacgatccatcggattgctggctgcgatacagcgaatcttatttgcttgcgcaagtgcttccttgatgcctacgtggtcgaattttccgctggaataaagaaccggaatccacttttcatcgagcagattataattcacagatttctccttatgtctctatccctataaatcgaaaagcaggatacctctgtgtgcttgattgttttcttttctgaataaggaaataataccgaaatagtgtagacttggcaacaatcaatttctcttattttccgccaaacaaacctggtctgactgcagagataaaagatgcaaccccttttaattctctttgaaaaagggtaaacggctggttgcagacagagggtatctggaggccattaaccctttttcaaagagaattaaaa

SEQ ID NO: 782 - DNA, 6484 bp, Artificial Sequence
  Synthetic Oligonucleotide
ccggcttgatcgtggacggcaatggcccgctcttcctgatcgacgtggcaatgctcgacgtacagataactccacccgtcactgaacttgggtagaacgtggagatcttgaattctcacagagcctccagcccgtgctgtagcgtcgatctccgatcgacggcggttgtagcgtcgatctccgatcgaccggggttgtagtcgatctccgatcgacgttacggcggtcggagaccgccgctacaaaaccaggcgatggatctcaccctggtacggccaatcttccgggcgcttgactaaaccggcccggaccggattctgccggacatattcatatttctcccgataggattcttgcgatctcaggacgtgatcgaaaaagtctttctcccaatgtgtgccctcgccctcatcttcccggaggactttggataaatccccgcgcagcgccttgatccatttccctaaaggtggggactcacgacaaaagccggcgaaaagatggatgtgatcaggcatgatcatgaagaacccgacccaaacaagaaaatcgctcgcccgttcggagaatctcgtgaattcccggtgaatcgcaggatttgccaacgagcgtttgcggtcctgcgtacacagcgtgagatagtagattgggctgcccgtatagagccagtccagtcgccgcaagcggggtttgaatttcatattggctcgatctccgctcaagaaatgttgcacggatccccgatcgacaagggattgtagcgtcgatctccgatcgacgtaccggcggtcggagaccgccgctacagcgagagcggcgccacggaaagcaggccgaagccgaaggctttgccgtgcccaacgccgcccacgatggtttctctgaagctgtccgcgtcctcaaccgtaagcgtcccctccaataacgccgagcgaaatttcatgcggccgcccgtcggcctcgggtcggatcggtctcctgcgccccacccgatctgcaagacccggaaagtttccacttggaatccaccttggccgcccttgccggcgaaccattttcgtatcacatcgtcgcggttctggtccttgtcccaggtcagcgccacgcgtttgccttgggccttcgggcggccccgcttatctgtcccctctcgcgtcctcgtaagatcaacgccctctgtgctggtttttatcttcttactcagattggcgcggatacggaagcgaagccgctgacccttctcaaagcgggggtcgaattcctgcacctgagggggagcggctagaggattcagaagaaaacgggcgttgtggaaggcgtagccccagtcaggctttacggcagagttagactggacgaggatcacgacccgcccgcccggttgcgggtcgatgcggaagagaaagccggagtcgccgtcacgtcttacatggacctggttgttggcaaagtccgcgggtttgaaaggcttgaggaagtggggatcgtgggatattcggtctttggatggaaacgccatgcaaaggcgctggtggacgtgatggaggtttcgcagccagagccgcccgggcctggggcggtcggggttggtgccgacgtcaatcaagaggcaggagaggtacatggctattccacctcctcagcggcaaggcgtctgcggcgagtctccagagagcggaacctgataatctcttcccgcttctcgatgatcttgtcgcgccaacggggctcttcggggttgatgcggtccaagcccattccgagcccgtactcgatcatggtcacggcgtcgtggcagaggcggcagagggagcgcaaatcgtcccggagttcgccgccgcccgcgcggcggtacgtgatgtgctgcacggtgctggcgggagacttgcaaaaaacgcacaagtgatagtcgtcgtcgagccgctccttgcgtcggtttttgtactctgtgttcgtgtaatccgctcttgggcgcggaggcggtggcgtgtcgctctgcggtggctgcaccgcaagtgttacgtcgccgtccgctccgacgcgcaactgcctgcggatgacgaatcggggttggtgcgacggcggctcgaatgtcaacggcacgtcgtaccagacgagcgcatcatcgggcgcctcgggctgctcgttggtgggttcccaatcaagcaggcaatcgacgggtcgcggctggggatcgtccttcagccgccgacgccaggggaccgattcgagggcagaaagcaagtcggggaattcacctcccggatgctccagcagagggcggcaaggggggcagcactttctgccgaggtagagtgtccacttgggcgctttgattgccgcctccagttcctcaatgaggtccggttcgccctgaagagcgacgagaaacgaggcgtcgcaaaggtattcgcggcgggtgagcatggctccggacttggttcccccctcggcggtacgcatcggcatccccgcacccaccgtgtgataatcccaccagcggacccctggcgcatcgacgcgtacgcccatgcgcagccgggccagccttggaagccagccttcgcgggcctctggccgggaaacgcccaatgccgcgcaaagcatcccgatgacgccggacttggtcggcgcctcggccgtgcgccgaatgacgaacttggattgctgatcgccccatgcctgaagaggaccttcaagccgaagtagcagcgtctttgcgctcatggggcacctccggattcaggaccactttcttggcctcctgccagtcgtaaccgatttccttgagtacagccgctatcagttcgtcaagagacttaacatctttgtcggcaagcgggacctcacgctgtttctgttttccgtcttcgctctccgtggtggtagccgtcaacggatagcggagatttggagagaaccagaaccgcttcgtcggcttgccgtatcccgtatctatgtcgttcacataatgggcaagctgcgccacgctctgcgagatgatgtcccgttcgccctgaggagccgccggtttggcgaaggcgttggcgtagctgatgggagtgtttctgacttccaccaacatcccgtcaggagggttgtgcgcggcaaaactattttgttttcccgtggggttggccaaggccgcggcgcgaatgaaggcgccgacggtatgggccgccagtttttcgtgattcgtcccgaagggcttcaggtttttgaccagcgtttcccaatgaatggagaaatacttgtagaaacatgccgaaccgaacatggcttcatccacgtaacctgcgcccgcgtcctcgccggggacatcatcggcggcgacatagtagtccacctcgggccgggcctcatgggtggaaatggcatgggcgacttgaagcgatgcctcaaccgtcgtgtctttgaggactcccgtttcaagcatcctgccgctcagcgccatgtccggcacggcgacggattcactgatgagcttgccgaactccgctgccaaggcctcgtccgtttttccgtcgccctgctggaggagttcggccatgcgtgtaatcgcctcttgggtggtgtaaaccagcatcttgctcctctcagcactttcctgttcgtcttctccttcctgtttttttgctttcttaggctccagcccgcaggctttgagaatgttctccgctcgcttcctgacgtctttgcccgtcaccttttccgcaatctctttcgccaactggcgggtgcgaactccgcccagcaattgtctgaactcctcactcatgcggatgctgcgcttaaggcactggctggaaatacgggagcgcaagactccgccaaaaaagcaagtcttgggcgcgcccaggtcatcccggttcaggttggccgggctgtgattctgaatggcgtgaatctggatcaacatgactctcctcctcttggacagttcaaaaattcctcggcccatttgagccgggtggattcgcgttcccagatggaaagatcgttcgtcagccgcacccagtcgagttcgaggtgcttggaagctatgaggtcgattgcccactgtagggcgggttcgatttcagcaagcggcagcgtgagcatcctgtcgaagcgttgctcgaaacgctgccgcgctgttttctcgcccggccgggatcgcccgagctggcgagcgagggtctcgcggggtgaatgctcgaggggccggagggcgtagagtttggcgacaagccaggccacctcacggcgaggcgcccgttgggtttgcgcccgcagcggccaccaaaggcctgcgaaaaggtcaaagccctctaccgattcgtcgagcccttgcccggcatggttgcgcaagagcccgagctcaccgggtttcagtcgagtcagaacttcgacgtactgctccgttggagtcacttgtcccccccttcgtctttgttgtttctctttggccgcatgtccggctttacagcggcaatttcttgtcgcctccggagggaagcggttgtgtagcccggggaaagcgatttggcgacggcggccatcaacggacgatattcctgggccgcctcttcccatgccttaccgccttctgcgatcatctcgtcgatttttccggaaaccgttgcctcggcttggggacgaacagcggcgactgcggagagaatttcaaggtgtcctctgtttcgtgaagtctctcgcggtttggctctgccaacgagcttccagccttccttctgccacgcctggatttcttgcaaactcgcctgaaccttcacgtcgtcgagcgcggccaagaattgaatctcccgctcggctgcttccaggtatttgtcgttctgcactgtcgcaaagctgacgacccacaacttactgttccccttcggcttttccccgcacaggattcccgccacgaccttcgtccacttcccagccgcagcgtcggccgggccaagcgcgctgaaaggcttcacaatctcgtcgccttcgctgatggtgtgcgggtcgttccagattcgtgccagactgccttcgcctgtctttgtgctcccaatacccgcaaagacacattgacgtatcagagcctccctgcgcccgcaggcgatgcagttggactctggtgtctccggagtgtctaaccagacgcgccgcggtacccacgttaatcctatcaataatggaacattgccgtgttgagggaggcttatgtccggattttcccatgtgggcgtgcccaggttcatctccgacgtcttccgccatgagaggcgcagggtttcggaaaggcagtcgcccatcggcacgatgtagatcggcggtttttgattgacgcccgggggcttgccgcgcccggccgacgtagcaaagagcggaaggcgcaacaagcccattgcgcagcatgccggacataagccgtttctgaaatctgtcccatgccggaagtgccagaagtttgtgccggtcggcacttcttgcatcagatagttgacggacagcttcttctcaagtcggttaggcttgcgttggtaaaaccgcttcccatcgccctgaaggttgaaacagtctttgttgtcatcgagtttcttgaaccaatcagagggaaacgaagaaatcgagttcttgtcgtccgggggattccctttgcaccaatagagcaacgcaagcaggaaacgcaggatggccaggcggtccattgggttgctggccgcgatttggcgaatccggcctgcttgcctaagggcctcactaatgcccacgcgaccgctgtgcccatctttccacagaacgggaatccacttttcttcgagcaggttgtactccacggcttcctccttgcctgggcaagaggcgggtggcaggcccgtcgcgccccggggggaccggaccgtccgctgcgtagctaccacaggacaatcatggcgaaggtatacacccgggacgcggcaaaggcaaggcccgaagaccacgacaacggttatcgcgtccgcttagcccacacttcacaggctgcaaggcgcgccgttgactaagcgcagaagctttgatgcctccgcggcgttccgattcggagggaatcttgcgatcgatttcgcgggtggcgcatacgtcccgacgggtttttgtcgggatgtatgcgcccctcggcatgtcgacaccttcatagcctcttgtccatgctcaagatcgaaccatcattccagaaatagaacctcccgccgcagcgcgaccacggccagtcgcccgggtgcttgaccagcactcgtttgacgggattgtcgcgcctgtgattcaatttctcgtctcgcttcttggggctccagatgttcatgtcgtagaacccaccccaacaatatatcgtccctgtggcgcatacatcccgacaaaaagaagctgtgaaaaaatcaagaaaatcgaaaaattaagaaattttcttgtcttagctatacagctatgatatattagcctctgaccgcacttccggcgggga

SEQ ID NO: 783 - DNA, 6474 bp, Artificial Sequence
  Synthetic Oligonucleotide
agcaaatcccggctccgaagtaggtagtaggtagtagccagtagccggtagccggtagccagtgggtagtaggggttaggcgacagccctcgtcctcgtcctcgttctcgtcctcggtcttttcatgttttacggtgaaccgaaggttcatgtgcggccgcgccccaaacgggccttgtggccgcatgacgcaactggtatactctcccggcataaacacgggattcatttgatcgcggcgggaacacggttatgaagcaggcaaacgactccttgaaaggaaggcgcgcatgaacttcaaccttctggacgaagggtttatcccagtcttgtggtccgatgggcgggtgggccgggtgggaataaggaccgctctggcagaggcaggccgcattcgccagatcgccgcctccaacccgatggacaacgtcgcactgctgcgcttcctgctggcggtgctttattggtgcaaaggccccccgccggctccggacgagaaggacaaaatcatcgccacaggccaattcccaccgagctggttcaccaagcttgaccagcaagagaaaaaagactgcttcaacctgctgggcgatggcaagcggttctatcagtatcgcaactcaccaggggctcaagggaaaaccctaaccgccaactacctcgtacatgatgtgccgactgggactaacgcatggcatttcaggcattccaccgatggtgacgatgggctttgcctgggctgttgcgcaatgggcttggttcgtctgccgctattctcgacctccggtggcagtggcaagcccccaggaatcaacgcaaagccacccatctatgtctcaccgttcgggaaaacactgttggaaacgcttcagttgaactgggtgccggctggcgaccctgggacgcctgcctgggaagcccctgatatgcggctaccgacgagcggcacggtgccgttgctcgcgggattaagttggttgccgcggcgtgtttggatcgacgacccttcactgcccgcaggcacctgcatcgcttgtgggcggcaggaaggggcattggttcgtacctgcgtctttgcaggcgtcgctagcgcgaagttgagtgatgacgcaccagcacgggattggcgcgatccgcacgtcgtgtatgcaaaagacaaggacggcgtgctgctatctgctcatgcaagcaacgcgctgggttctccagacgcggcgtcgaatcagtgggcgaagtttctgcgcgatctgcttgcggaaggtgcagcacccttggccgtgcggcacgccgcagccttggcaaactcggcttcatcggccatttccgtgtcagtggtcgggttctcaagcgtccagaacgacaagtatcttgaggcgtgggagaggcgtctggtaataccgtcgaacatgctgctaatccaagcatccgtgccggcggccgcccacctggagcagtggaccaaagaagcgaagaagtgtctggccaaggcaagatcccacaaggcaaagtcgtctgcccgaatgcccgctgaactggcgccggccttcagcgccattcgcccgcacgtcgaatcccgcgtttcggccaacgtgaccgaccttctcacgcagcccgaattggcatggccgcaggcggtcgatgaataccgccgaatgatgccagtcatcgcacaatcgcttgccccaggtttcaccacgcgggcgttgcaacggcgaaaccagatcgccagcgccctgcccgatatgacggcaaaaccggcacccaagcccaagccaaagaaagggggcgacatatgacacccacggagcaattcatccaaacgttggaatccctcaaagccggggatttggggcggctccggaatctggccgatctgcccctggatgagtcggtggacggcttcgacctgttcgccggcctatggtggactctgaggcagaagagccaaagagcgccccgccgcaaggtcgcctggctaatcgccaagttgtatgccttctgtcccctgccgcaagtctgcggcgcgacgctcgcggggcaacttggcaaactgctccgccaagaagaacgggccaaagaccgccaccagcagcgattcgacgaaatgctcctgctgccgctttccgggatcgaaccggctttgcggtgggggctgaccctgattgcagacaacggcaagaagctggattgggtccagcttaccgatgagctttcgcaatgggagcgggaagaaacccgccgcaaatggtcaatggaattcctgggactcaaccgtagccaaaccctttgaaaaggagaacaaccatgttgatagagattcacgccattcagaatcacagcccatccaacctcaaccgcgacgacctgggcgcgcccaagacctgctactttggcggggtcatgcgttcgcgcatctccagccaatgcatcaagcggagcatccgcaccagcgatcagttcaaggctttgcttggtggggttgctaccaggaggctggctcagttgatcgccgcaaatggtccttcgtccgagtttgacagggcaatgcgcgttcttaagatatgcggcatcgcgcccaaagagaagaagtccggtggtgttgatgacgaccttaaggatgacaagagtgccggacgcgtgtacaccagttggcaggccatccatggaatgtccgcgctcctcaaggatggtgggaaaaccgataaagccctggccgcggaattcgccaaactgatcgctcagcacactgcggttccggatatggcactttgcggcaggatgcttgaacccaagaaatccaagaagagcaagtctggggcggcgaatgagccgaaggatgaaggcggcgagaagtcccaagacaagggtgtgtggaagggacttgatctgaccgtggaggcagcgctccaggttgcccacgcgatttcgactcacgaggcccgtcctgaagtggattacttcgtggccgccgacgacatccccggcgacgacgcgggagcggcttacgtcgacgaaacaatgttcgcctccgcctgcttctataaatacttctcaatcgattgggacgcgctggtgataaacctgcgtgacaaccgggaactttccgcccataccgtcggagcgttcctgcgcggcgcggccctggccaatccaaccggaaagcagaacagttttgcagctcacaatccgccggatgggatgcttgttgagatcaaacagacccccatcagctatgcgaatgcgtttgctaacccagtcccctgcaaggggccgcgcgacatggtctgccagagcattgcccaactcgggcagtacgtccacgacctggacgttggctacggcaagccggacaagcgattctggttctcgccgaatctgcgacatcccctgacggccatagatgacaaccaggaaattgccctggccaatcacaacctcaagtcactggacgaactggtcgtcgaggtggtccgggctgtcggcttcgactgggcacaggtgcaggccgtcacggtaaagtaaggaggtcgtgacgatgaacgcaaacactctctttcttctcctcgaaggtccgctgcaatcctggggcagccacgagtcgaagttcctcattcgaaggaccggcgaggccccgaccaaatcgggcgttgtcggcctgctttgctccgccctgggaattcccaggataaccgcaagggaacagctcccgaagctcaacgccctggctatggcggtccgcgtcgaccggcccggcgtacgatggtgggactaccataccgtaggagcgaaaatggaaatgcgtatcgctcaaggtgaaggcaagaccaaacaaggggcgatgctcacccgccgggaatacctgtgcgacgccagttttctggtcgcccttcagggcgatcccgaattgctgctcgcggcccgacgcgcattgctgcacccgacctggccggtgtttctcggtcgcaggtcctgcccgccgtcgctgccgttggtcggccggaatgaccaatccgacataggcgactttaccgatctgccgtcagcgctatgctcgatcccctggcgaccccgccttgccggcgacgagcggcccgagcgcgtcgagtgtctgatggaatggcggccgtccccctcagaacccgaggcgccgccagacgccgaggtctggtacgatgtcgccctgtccttcgacgtgccaggccacgaggcgaggttcgttgttcgcagccagttgaccgtgggcgatggaaaaggtgttcccacaggcccgccgcgccaaaccaggaccccggccccgcctcgcccgcgcgccgattaccgcaacaccgagtatcgcaaggcccgtcaacaacgcctcgacgccgaccatggcctgtgcgtgttctgcaaggccccggccaccacggtccagcacatcacctaccgccgtgccggcggcggcgaagaacccgacgacctgcgcgctctctgccgcctctgccacgacgccgtaacgatgatcgagtacggccagggcatggggctcgaccggatcaacccggaggatccgaaactgcggaaaaagatcatcgccaagcgtgatgagattgttgccttccggtcccttgaaacccgccgtcggcgacttgcccccgaggaggtcgagtaatgtacctgtccacccttctgatcgatgtcggcagcaaccccgaccgcccccgccccggccggctgtggctgcgcaacctctaccgcgttcaccaacgcctttgcatggcgtttccttccaggccccgcgtcgacgccgacccggagttcctcaaaccttacgacccggcgcagttcggcgatgggcaggtccacgttgcgcggggcagcaaagcggggttccttttccgcgtcgatccccagcccggcggcacggccgtcatactcgtcctgtcggccagcgagcctaattgggactacgccttccacaatgcgcggcatctcttggccgggccgccagaaaagccccggcccctgcaactgctcatcgagcccggaaggcggttccgctttcggctcctggccaacccgacaaagcgcccgcccctggccaaggcccagcggatcgagaagaagcaggcgggcgaaaaggtcaaacgaccccgcatgcagattacatggaaagagggcgacgaccccgccgaggccttcgccgactggctctgcgccagggcggaaaaggccggctttaggattgacccgaaggacctcacaatctccaacatcggctacgtgtacgtccacaagggtgggcgggaggacgccgcccagcgcttgcgctccgcacgctacgaaggcatcctcgaggtaaccgacgccgacgccttcgcccaaacccttgccgcgggcatcggcccggcaaaggccttcggcttcggcctgttgtctctcgtacccgtgcgggtttgagttattccgcttcggcgatgaggccgataccgctctttgacaagtgcatacataagggaaacgggaatgaaaaaccttcaggaactgcctcgcttcggcgacaagctcagctacctctacatggagcatgccagtatcgaccagtgcgacaaggccgttgccgcgcacgatgctgaaggctccgtccccatccccgccgccggcctggctgtgctcatgctcggcccggggacctccatcacccacgccgccatcaaaaccctggccgacaacaactgccaggtcatctggaccggggaggacgccgtacgattctacgcccagggcctgggcggctctcgacacagccgaaatataatccaacaggcccgcctggtcagcaacgacatcacccgtctgcaagtcgtcatccggatgtactgcatcaggttcagagaagccatcgatcccgacctcaccttgcagcagttgcggggcaaggagggcattcgagtccgccaggcctacgccgaggccgctcgcacctttggcatcaactggcaggggcgttcctacaaacgtcagcagtgggactacgccgacccgatcaaccgtgccctgtcggccgcaaacgcctgcctctacggcctggtccacgccgcaatcctctccggcggctacagcaccgccctgggtttcatccacaccggcaagcaactgtcctttgtgtacgatgtggccgacctctacaaggccgactacaccattcccacggccttcgccgttgtcgccggcggggcaacacaactggaacgcgaagtccgcctcacctgccgggaaaccttccgcaaggccaagctcatggaacgcatcctgcctgacattgagaaggcgctgaatgttccgcccctcagcgcagccctggccgaccaggacgatgcctactccgatgacgccgccctgccggcagacctgtggcaaccggcctgcctgggacccgatacgcccatcggaaccgttctgaaactggacccgcttaacttccccgtgcaggagaaa

SEQ ID NO: 784 - DNA, 6437 bp, Artificial Sequence
  Synthetic Oligonucleotide
gtgaattacactctgtatgcatcggttgctcctgcttgaggtgtcaagaaccccattataacaggataaagcagccgatgcaccccttcccccctaaatctagtgagaaatacgggctaaagcacttcctggctaattatcgtcgctccaaggcaactctagagcacggctgaaaaatcatatttcacccccacgcccgtggggacgacgctaaaaaaatcctttatctacggcacacgggccaaaaaaagaccgtcgaagtcttcgattgatctagctgtccttccccagcttcgcaccttgtacccctgctcattgtcgctcgaatggagcagcaaacaccccccgcccttcgcctgactgcacgccttttcccaaagcttatcccgtaccatagccgaaactcggcccgtgaacacaccgggcttgggttccaggtaccaacgggtcaattctccccgcaaacttgagggaacacgttcaagaatcatgaccaccatcaccatcctccatatctccaaccgaaactgagtagaactgaccgccttcaacttcaccgcagactggatcccacaacttacccggtgcagcttcgtcttcagcatatctatcaggaatggtctccattccatccatcagcaatactcttttgatatccgggatgatccgtgccaatatacgtgtcgaaacaaactggtctcggcaggtcaagcgtacctgtcgctctagtcccggctgatttttcgctgccgcccgaaaagcgatggggatggtcacctcggttttatacaagtcggcgatatcataaacaaaagacagcatcttcccggtatggatgaatcccagggcggtcgaaaacccagccgaaacgatcgccgcctgacaaacaccgtagaggcaggaattggccgcagatagtgcccggttcactgggtcagcattgatccattggtcgcgcttgtagctccttcccttccagggaatcccggtctctcgagacgccttggcataagattcgcgaaccctgactccctccatcccccgtatctgctgaatgctcagaacggggtcaattttttcagaaaacctcgtctgataaagactgcgcacaaccttcatacggagggtttcattggcccacaatttcgcctggtgcaagaaattaactgcattacgcgtttcacccatgccgaccgcatagaaccggacgccttcctctccgcaccaagctaccaggcacccgtgatcggccagaacggaaacagcggcatgggtgattgaaacccccggcccaagcatcagcaacgccagattggcgcaaggcaccggcaccttgcctgtggtgtcgtgaatggcgatcgccttagcttcttgatccacacggcaatgttcaacatagaggtagctccagccatcgctgaacttcggaagaatgtgaagatccttgactctcaattcttattctccgattgttttctttaaaagagctacagatagcaaaccgaaaccaaatgccttcccgctcccgatgccgtgaaccagcgcttccttaaatcggactaaatcttcaactttaagaatcccatcgtaacgtgccgagcgaagccgtctgccttgccctttgccccctttattgatgtataggtagcccggttgtacgacaatagtttccttgtcgatggcaaatccatgcgatagggtgcggcgatccagccagtcacacaaccgatcatccgggaccggaactcgctttccgatgccattttcaattggttttccatcgggtccaagggagcacttggagagccgcctggtgggattccccaagagacgaaacttgaggttctggccatgctcgaaaggcaaattgacgcgtttcacttccggcgggcctgcaagaaaatgaccggcattgtgaaaggcatactcccaatcagggcaagtggcagactggacgatgatcaccgctcgaccattcggtataatatcgatgcggaaaagaaaacctgagtcagaagcacgctccacatggacttggccgttcgcgaactcttccggtttgtatggctttaggaaatcattatcgccatctttccgggaagcggagggaaaggccatgcaaagcctctggtgcacatgatagcggtttcggagccacagccgcccgggccggggtcggtcgggattatctcccagatcgatcaacaaataggattggtacatggctattccacctcctcggcggctaagcgccgacgtcgggtctccagtgagcgaaacttgaggatctcggcccgcttttccatgatccggtcacgccagagaagctcctccggattgattcgatccagccccattcccagtccgtattcgatcatggtcacggcgtcatgacacagaccgcaaagtgatcgtagatcatccagagtttcgttgccaccggctcttcggtaggtgacgtgctggacggtcatctgcggaccgggcgacttgcagaaggcgcacaaaccagcatcggtttggatccgttcttcgcggcgcttccgatactctttgttttggtagtccgctttaggacgcggcattgccggggtaggcttatggagtggcttgccgatcatagttgaaaccatgtcgcgcaagacaaaccgcggtttgtggaccggcggatcaaaggaaaccgggatgtcataccagatttccgcgtcatctggggcaacatcgttctcggaaacgggccgccattccaagagtgcttccactttaccgttttccggcgtcgggtcgtctttgttccggggataccaggggatggcccgtagtgcggtggataaatcggggtaatggctgggattggtccacaattcgtcctcttggggtctaaccaataccggaacagatggcgggcaggacttgcggccaaggaaaataggccacaccggcgacacaagtgcggcattaatactttggattaaactcacatccccctggagcgcgaccaggaaactcgcatcggccaggtactctctgcgcgtcacgagagtgcccttggcgccagttttaatatcacctccggcggtagtcaatccgattccagcccctaccgtgtgatagtcccaccagcgcataccaggccggtcgatgcgcacacccatcgcaagcccgttcagactgggcaggtgttcccgcaccatctgccgcgaaagccccatagagcaacagatgagccctaatataccggacttggtgggcgcatccatgctccgccgcatcacaaattttgaggtgtcgccccaggactggagaggcccttcaaggcggaggaagagcgtgttggctggggtcattccatcgccccctccaccatcccttccaccttcacttttttcatgattgcttcaacaaacttttcgaaactcccaaattcgttgggaccaaccatggattgcacttgctcgtgagtactcttggccttatcgatccaggtcagtcgccggtgctgattcggtgagaaccagaaacggtcggccttgatgccgtagccttcaaaaagatcgtgggcgtattggccaagcctggcaatgctttcgccgatcaaaccccgttcagatttatccggcaccggatcggcaaaggcgttcgcatagctgataggcgtggccgacttggttttgacctcaactaggataccatcaggagggttgaaagccgcgaacgcatgctgtttgcccgatggattggccttggttgccgcttccaggaagcactgtactgtggtaatggcgagttctgtatcagttgccaggttcttctttaactgctcaaagtcaatgacgaagtgcttgtaaaaacaggccgagttgaacatggcttcgttgacgtgacctgcgccggcgtcctgaccgggcacgtcatcagctgccgtgaagtagtccacctcggtcacgaccgcgtgagtggagaaggcatgagcagcggatagtgcagcctctacagagaacttacctttaagtcctgagaagggtcctttcgcatcgaactcagtcatacggccacagagcgcgatgtcgggtgttttggcgaacttcccgataatctcggcgaagttcttgcccagatcgccgtttccttggcgcacggccgcgcccatttcctttatggcggattgaggcagaaagaagagaatgtcgaaagtgttctcatccttcaggccaacccctccgtccgtaaatactttccgaatggcttgtaaatgttgctcattcggttgattgccttcgctggccgctgccttggcgattaactcgattagccgccgtgtacgcacgccgccatctttctctaaagcagcagaaaattccgggctgcggcggatgctgcgtttcagacactggctggatattcgggcgcgggtggcgcctccgaagatgcaggtcttgggtgcgcccaagtcgtcccggttcaggttcgccgggctgtgattctggatcatgtggatttcaatgagcattttttgccctccttccttttaataaatagctttgatatatatttcagcccagatatctctaacatcgcgtccgcggcggtggtcctcgcctcggtcccagatggagagatcgtcgaggagttgcacccagtcgatgccctttacatcccgcgcctgcggcaggtgccccttaacagtccgggcgacctctctcagcgcccagcgcaaatgcggctccagagatgacagggacgagcagagcagagcgtcgaatcgggtccggaaacgatttttggccccttcgtcgcgcggttcacagcggcccaggatttcaggcaaaaccggaccagcgcctgtatccggtcggacgtgcggtaccttgaaagcactgaatagtttggcgacaagccatgatggatcctggcgcggaacagccggattcttggcgcgcaatggccaccacaaaccggtgaagagatcaaaacccggaagggtggaatcgaggggttgcccagccagtcggcgcaagcgtgagagttcgccctcatgtaattctgataattttttgatgtatttgttgctctgactcagataaagcaacatcttttctgtaaattcatgctgcgggcacattgacttcgtcgagtctgacgtacactctattggtttcccattcctgggacgtttccatcaacagcgcggagataagccgttggatcgacttttcattggggaagaccatgacgacccgggttctgcgcttgatctctttgttcaagcgttccatcatatttgtggttcgccataacctgcggattttgtacggatacttcattacggcgaagccgtcaggtatattgtcttccatccattcagccaactttgatgcggtcttgctgtacttttcaaccgtttcattcaacaagttctgggctctgtcagcgtccttggcattgaagatctgtcggatgtcttcggccacttctttacgcatggacaccttgggaacataagccacggcattgcgctgcaggtgaacatgacagcggttccaactgacaccattaaacaccggttgcattgcttcccgaaggccctgatggtcatcgcttgtgatcagctccacgccgtgaaggcctcttttggtaaggctttgaaggaactgacgccagtggacttccgcttcgctcagcgacacacttgtccccagtacggaacgatatccatccggactgacgccgatggcgatcagaacagcgcagcttcttacctctccatccacccgaaccttgacgtaggtggcgtccagttgaagaaagcgcatccgtccaagcggccttctacgccacttttccagctcgtcatccaggagggccgcgcagcggctcacttcactgctgctgatatcaaggccgcaaagctcttccaggaccctggttactttgcgggtagatacgccctgcacgtacatctcggccagggccactttcaacgctctctcgctgcgtatgcccttttcaagagccgacgggtaaaacgaaacaccttccccgcgtacctggggaacagacaaaaacagcttccctatgcgactgttcaaagctttgggcttgtagccattggcataccccatacgactgctgcaacgctcgtaaggaccagcctgaagtgccctggagcgctcaaccttcattgcctcgttgattacgatgctcaacgcatccgccagtccatcaagtccgttttccaaaatcacttcaattacttccctgaatacagtatcattctcaatacgggccataacttgttcctccttagtgtcgtcacacatcaagaaggtcaattatggcccgcctctcaacttaagggcaagtgcccttaacaacccaaatacaatttacagaaagaatggtacactaccaaaaccgccaagaccataatcaggccc

SEQ ID NO: 785 - DNA, 6437 bp, Artificial Sequence; identical to SEQ ID NO: 784
  Synthetic Oligonucleotide

SEQ ID NO: 786 - DNA, 6437 bp, Artificial Sequence; identical to SEQ ID NO: 784
  Synthetic Oligonucleotide

SEQ ID NO: 787 - DNA, 6421 bp, Artificial Sequence
  Synthetic Oligonucleotide
cccacaccggttcacccccacgtgcgtggggaatactcataggcccgtctactagtctgagtatggcgccggatcgcacgcgacgcccggcaagcgcggctgcgccgggattcttaccagaataactccttctatgtctaccagttctcgggtggtgtcgccgaaagtgtccacggcgaacccttgctcggttggcgcgggaaagatcagtatgccaccgccgccgtcggcctcctgccgggccttgttccatattctctcccgcaccatggccgagagtttgccgacgaacactcctgcccgaggctcgatcatccaccggctgagctcgccccgcagccctgcaggcacccgttcgagcatgagcacgaccatggggtcagtctcgttcgatctgctcgccttggggagtccagaggtccgtcggcagagcgggatcggaatctggcgggaaggacgccccgagcacgtcgtcgggcgcatcgagcgcgcgcttgatgtccgggatgatccgctggagcaaccggcgttcacgaaactgatcgcggcacctgagccggacctgccgctcgaggtcggcgagattctctgcggcagcggtgaacgcaaggggaatggagatgtccaccttgtagaggtcggcgatatcgtagacgaacgagagctgcttgccggtgtggataaagcctatggcgggactgaacccggccgccacgatggcggcatggcagatgccgtaaaggcacgcgttggcgcaggagagcgcgcggttgaccgggtcggcgctgcgccagttgccgcggtcataggaccgacccgaccagcgcacgccggtagacttggaccagcgagcgtacgcgtcgcggacgcgcacgccctccatgccacgcagcgcctcgacggtgagcccggcatcgaactcctcggagaagcgcatacggtacatgcgcttgacgacatcaaggcgcgtgtcgtcgttgctcgcgaggcgggcctgcagcaggagcggcgccgcgcttcgggtgccgcccgtacccaatgcgtagaaccgcacattctcttctcccgcccagatgatgaggcaacagttgtccgcgagcacgcggacggccgcgtgcgtgatggtagtccccggacccaggacaaggacggcgagggatgcgacgggtacgggcgttttgccggtcttgtcgtggaccgcgatggcggcttcatcgcggtccactcgtcctttctcgatgaacaggatactgacgctgtcgcggatcttgggcagcgcatgcaggtcatcgagcatggcgtgtcactccttggtcgccacgaccgtgaggagcccgaagccgaacgccttctgcggaccgaggcccgatgccagggcggacccgaacgattgcgagtcggtgacgcgaagcacgccgtcgtagacgaccgagaacagccgaccgcgctggggctttcccttctcgaaggcgccgtcttgctggggcttgtccttctcgaagtagacatatcccgtatccacgcgcgagacgctcagcagctcgaatccggccctcgtcgccttgcgctccagccagtcgacgagtttctcgcgcggcaccggcacccttctgccatggcgccgtttgcggtcctcgctgctcttggtgtccacctttctggtggcgttggcctgcaagcggaatcgcagcacatctccgtcgcgccagcttgggatgagcgtgcgcacctcgggcggtgcggccaggaggtagtcggcgttctggaacgcatagtgccagtcgggcacgcgtgctgactggaccaggatgacagccccggctgccggaacgggatcgacgcgatagagaaatccgctctcgatgtcccgctcgatgtgcacgtcgccgacgccgaagtggcggggccggtatggctctagaaacagcgggtcgcgctccttacgctcctgtgacgggaacgccatgcagagccgctgatggacccggtaccggttccgcagccacagccggcctggccggggcctatcgggattgtcgccggtattgacgaggaggctggaaagatacatggctattccacctcctcgggcgtcagccgtcgccgacgcgtctccagcgaccgatactgaatgatctgccgacgcttctcaatgatccgctcgcgccaatgagggtcttcggggttgatgcggtcgaggcccatcctggctccatactcgagcatcgtgactgcgtcgtggcagaggcggcatagcgcccggaggtcctccggagcttcatctccgcccgcccgccgatacgtgatgtgctggactgtggtcgcgggacacttgcagaagacgcacaggtaccggtcttccacgagccggtccgcccgtttcgcccggaatagcgcgttgcggtagtccgctcgggggcgcggaggcctcggcacaggcgagaccattgcggccttctctccggcgatgtccctgccatccccgacagccaggcgtcgtcgtacaacgaacctgggaatatggtagggcggctcgaaggacaccggcacgtcataccagacgtcggcatccgccggagcctccggctcgttgggcgtgggtgcccagtcgaacagcgcctcgaccgactcgggcacaggatcgtctttgagccgcttctgccacgggaccgcgcgcagagcgtcgaggagatcctcatgatggccgggttggcgatccatgacgggtcgggagggcggacagcacttgcgtccgaggtagaccggccatcgcgggtcgctgagcgcgctatagagatcatcaatcagcttgccgtcgccctgcagcgccaccaggaacgatgcgtcgcagagatactcgcgacgcgacaacatcggtccgggtttggttttgccttcggcctcggcgatgcgcatctccattccggcgccgacggtgtggtagtcccaccatcgaatgccaggccgatcaatgcgcacacccatacgcagggaagccagaggggccagaaagtcgcgcgcctgtacccgcgatatgccctgagccgcacagagcagtccgatcaccgccgacttgctgggtgcgtccagcgtccttcggaccccgaacttggactcgtggctgccccacgcctggagggggccctccaggcgcaggtacagggtattggcgtccattactttcctccggcgattgatttggacgcgagtgtcgcccaatcgtgccccatgtcggcgaccacccgggagacgagctcctcgagagacctgaagtcggcgtctgccaggttctgctctgtcttcccgtcagcgacggtcagggggtagcgttggttcggcgagaaccacagtcgtgtcgtgggcctgccgaagcccacatcgaggtcgcggacatacgaggcaagttgcgcgatgctctgggcggtcagatcgcgctgtgacacgtccacaggcttcgcgaacgcgttggcatagctgacgggcccagaccgatactcaaccagtatcccgtcgggcagattgtgcgcggcgtagctgttctgcttgccggtaggcgtggtgagcgcagcagccgtcagaaaggcgcctacggtgcgggcggcagtctcgcttgcgcaggccttcgcgccgccgaggttggcttccagttgcttggtgtcgatgctaaagtactggtagaagcaggccgatacaaacatggcctcgtccacgaagcccgctcccgcgtcttcacccttgatgtcatctgcagcaacgtagtagtccacttccggtcgggcttcgtgggtcgatatggcgtgggccacctgcagagccgcctccacctgggtatcgaggcctttccatatctccttggcggacttgtccggctcgagcatcctgccggaaagcgccatatccggtacggcgacttcctcagcgatgatccgcgcaaagtcggccgccagttcctcaggcttccgcgacatgccggatgcaaaaagctcggtcatcctcgcaatcgcggccttagtggtatagacgagagccttgcttcgctcggccgctcccgccgcgtcctcgtcctcttcctgctgcttcttctcccgtttgggcaggaaacccgcggccttcatgacttcctcggcctttgcgcgagctttggcgtcgagaccctcggtgatcagtcgcgccagctggcgtgttcggacgccgccgcacagctcggcgaactccttgctgaggcggatgctacgcttgatacactggctgctgatgcgcgagcgtaggacgccgccgaagtagcaggtcttgggtgcgccgaggtcgtcgcggttcaggttggcgggacagtggttcctgatggcgtgaatctggatcaacatggtgctctcctttctcaagcgtcaaggtagtggtcggcccatttctggcgtaccgacaggtcttcccagcgggacaggtcgtctgttaggtgcacccagtcaagggactccgtgttctgggcaacgatggcgagtatgtggcgcaggtgcggttcaatcaggttgagcggcgacagcagaacccgatcgaaacgttccatcgctcgctgggttgtcgcacggctcaggccgcgcacgcttcgggcgaaacagaacggcaagagccgccctcgttcgtggggtaccggcgtgaaggcatagagcttggcaactaaccatgcgacatcgcgccgtggcgccgccgccgacttctcacgcaagggccaccagagtccagtgaagatatcgaagccggtcagcgtggcatcaaggggttgccctgcgagagaacggagcagtccgaggtcgcccgctttcagtccggatagggtcgcgatgtacacttcagtggctgttggcatggtcttcgtccttggggtccgagacggacgcctccagatcacggatacgcggcttcgttgcgccgatctggcgtcgccgtctcgtcgcagccgccgtaactccgggggcaagcgatcgtgctatggcatccatgaagggccggtactcgtcacaagcgcggctccaggctaccggatccggcttgagcagctctcctgcgtgttgcgacaccacacgctcgacgtgaggtctgacgagcgataccgccgcagaggcaaggcacttgcctcgggcaagcgggcgggcaagttcgcgtgcatgccggctccactctatgaggaccttgtgcgcgcgttcaatgctgtctacttcggccggggctcgtagggtccactcccaggcatcgaccgccgcggcctgattcgtcgcgaacgcaccggcgtagtgctcacagtcgcgtcgttcgccagtgaacctcccgctcgccagcgcgctggcgcacagacgtgcccatggtcggtccgtggcgaacttgccggcatccatggggttcggggccgtcgcggcctttcgcgtcgggccgctagggtcgtataccacgtggggatcgcgccacgcgtcagtcttctgatcgggcgcgccagccaactcgcaggcggtgacgaccggaagatccacgcgtccgcagcgaatgcagatgccgccgccagtattcgctacgtgaagccacacaaggcgcgagagtgcggtgagaccggtcaagaccggaacgggatcctcgtcgggtatctcatataaggccgtgacccacgaagggtgcccgatctgctcggatggtgtccagttcgtgcagagcgtctgccagagcgatgaactgactgggatcaggtagatcggaggagtcccgttgatgcccgccctaacgccgccgagaccgctcgtcgagaacagcggtagcctgaggagccccattgtacagcatgcggcacacaagggcgtctgatggtcctgcacatgggcgaagtgcgcaaagttgttggcagtcgggacctcttggatgaggtcggtagccgggcgcgggcggtcgacctccgcggtctggtagaacctcggaccttcgccgaacaggttaaacagcgcttcgttctctcgaagcttgtcgagccagcttgttggtagcgcctcgggcaagctatcgggagggttgccccggcaccaatagagcagcgctagcaggaaccggagaagcgccacccggtccatgggatttgaggtcgcgatctgtcggatgcggtgcgcatccttcagagcatcaaggatccccgtcctgagaaccgaaccatcgtggtagagcgccggtagccacggcgcgtagagcaggttgaacgtctcgtgctgatccgccatgtgcacctcctgtcaagagtaacctaggctgcgcgcgatgcctaacaagttcgccatcctgctgcgtcgtttcctgttactcgtcccgatcccccatatccggaaagccgcgcggaaggccatgtccgccgatctcgcgtcgccccgatcgcctcgccctcttggctgcg

SEQ ID NO: 788 - DNA, 6421 bp, Artificial Sequence; identical to SEQ ID NO: 787
  Synthetic Oligonucleotide

SEQ ID NO: 789 - DNA, 6358 bp, Artificial Sequence
  Synthetic Oligonucleotide
  misc_feature (2678)..(2678): n is a, c, g, or t
  misc_feature (3556)..(3556): n is a, c, g, or t
  misc_feature (3558)..(3558): n is a, c, g, or t
  misc_feature (3593)..(3593): n is a, c, g, or t
  misc_feature (3601)..(3601): n is a, c, g, or t
  misc_feature (3610)..(3610): n is a, c, g, or t
  misc_feature (5383)..(5383): n is a, c, g, or t
  misc_feature (5490)..(5490): n is a, c, g, or t
  misc_feature (5888)..(5888): n is a, c, g, or t
  misc_feature (5916)..(5916): n is a, c, g, or t
  misc_feature (6151)..(6151): n is a, c, g, or t
caaaaggagcatgttatgtacaatcttctttgtgataattgggtaaacgtggtctatctttcgggcaaaccagatagaatatctttagttcaaactcttaaagacgcacactgtctgcaactggcatacagcaatcctatggaccggttcgctgtcttcagattcctgcttgctcttggctactggtgtttcgccaacaccaacgtggagcctgaacctgataagccgcttccggtctcctggataccctggctggaagaaaacaaggagtatttcgagctttttggtgatggaaagagatttttccaagccgatcccagttccaggatcagagccattaccgaccttattcatgagataccaacagctcacaacctatgccatttcaaacatgtcaccgactatatcgatgggctctgcgaagcttgctgcatcaagggactgctgagattacctgtctttaccactgtcggtggcagagggataggcgctggaatcaacaacactcctccattttacctgctctggcatgcaaatgatctcgctggcatgctggctcaaaattggcaaccctgggataatatggggattccggcatggttgggttcttttcaaaaagaaagcagggaagtaggcttacttgctggaatgacctggctgccgcgcaaggtgtatctgcatgatcctgtcccaggtcaggcagcatgttgttcctgcggcttaccctccgaagctctcgtctattcctgcagcatagaagtggagccagtgccaaagggacttgagtggaaagaccctcatggtgtttacaccgatcagggaaaaagtctccagtccaaaatcaaactgatgtccaatgatagatacactttcgcggaccgggattggtatagcccgttgttcagctatttgcacgcggaaggaaactccagacaaggaaaactatggttggttggatttgccagcgataaagcaaaaagcatagacatctgggacaagatcatcgagcttgagggaactgatacaaatgatgagctactggctcaattggcaaacagggctactgcccttaatgccatgcgcaagaagcctctcagaggtgatttcaaaaagtcagtgggcactccccagattgctgacattatcccccacgccgaaagcagaattgccatcaatgcgggtaaaatgactgagaacaggggctattcctggcaggatgccgatactgaatacggagaactgctcaccaaggttgcatactctttggagccggctcaaacagtggacgccaggctcaagagaggtaacttcatttcccgcaagccctggccagttataccagaatccaaaacaaaacccgcagagggggaccagaatgaatagaggaaccgttgacttcattgcaagcttggagaacctcaaagaaggcgatttgggcattcttagaaaactcaggggagcccggcttgatgaaaagcttcccggatttgacctgttttccgccctatggtggcctttgcggcaaaagaatcaacgcgctcccaagcgtgaagtggcttggttgatcgccaaactttttgctgaattccgctttgaacagcgcgagggagctacattgcccattcttatgggaggcatctgccggaagttggaacccaaaaaggaattaccccgggtattggcacgctttgatcaactcgcatcgcttgacattatgcagatggaagagccgctgtcggtcatcatgggtattttgcgcaagcaccagcaggtctgcctggactgggtagggcttactgatgttctgtcattttgggagcaggaacctgtcaaaagagaatggtcggattcatttattaaagcatacaagatcaacaaggaggattcagatgttgattgaaattcatatgattcagaatcacagcccggcaaatcttaaccgggacgacttgggcgcccccaagacctgttatttcggtggagtattacgttctcgcatctccagccagtgcatcaagcgcagcatccgttttgccccggaattcgcggaccttagaggaggtatccgaacaaggcgtctggcagagaaacttgaagaaatgctggaaaacaaagataagaagctggttgccaagtttcttgaagcctgcggaatcaaaaccaaatcttccaagaaagctgcaaaaaagtccgaaaagatccccgcggaagccgatgaagatcaggatgagcagcaggcggctgatacatctgacatgctggtttttaccacttatgatgccctgcgccaaatggcagagctgctttccgactccaaactaagtgaaagcgaaaaactgctgcagttcaaagatttgctcacaaactgcgtccattctccggatatagcactttgcggcaggatgttggagaccaaagagcttaaaaacactggcgttgaaggcgccctacaggttgcacatgcgatctccacccacattgccagacctgagatagactattttgtggcggccgatgatgttcccggtgaagacgccggggcgggtcatattggcgaatccatgtttgcctcagcctgtttctacaaatacttctccattgattgggaacagttggtcaagaacctgaaaggggacacgaatctggcagcccacaccgtgggtgcctttctcctcgcngctgccaaaaccaaccccagtggcaaacagaacagcttcgccgctcataactatcccgatggcatccttgttgagttcaagaattcccctattagctacgccaacgcattcgtcaggccagtttccgtggtcaaggaatcggacctggtggaacaaagcatcggccagctttccaactacgtgaacgacatcaggcttggctattatgatgagcaatccccagttatcagcttctggttttctccaaacaatcgctattcccttggctataagcattccaaactggcttccagaaacattggcaacctcaatgagcttgtaggcgctgtgttggattatattggcggcttcaagtgggaagaagttcagaaaagcaaggcttatattggcggctaacatgagtgcgccacccaacaccttattcttgcgcttggagggggctttgcagtcctggggcagcaacgaggctaagtttgctttgcgcaggactaccgacgctcccacaaaatcaggtgtcctggggctgctttgtgcggccatgggaattgggcgcgcggaggctgctgattcatggctcccaaaactcgccaacctgcgcatgggcgtgcggatagaccgccccggcatacgctggtgggacttccatactgttggagcgggacaaagaatgcgcatggcagagctgaaggcacccaaaaaaccttccatggttggagctgccctggctgaaaccctgacaccaagcaaagtaaaaaccagggcagagaccttgctctcacgccgcgaatatcttgccgacgccagttttctggtcgccttgcagggtgagccggaacttgtggcaaagctctccgccgctctggccaagccggtctggncnatttatctggggcgcaaatcctgtcccccttcacntcccgtgngcgagcatnctccgggcttttacaacactttggaggaggcgctgtccgcggttcccctgcaaaagcgctggcacaatgaacccctgccgcaaatactgccttgcgtcatggactggattcccagccaggacggagaacatgcgcctgatgacgcggagattcattacgatctgccggtttcttttcagccgccccgccatttgccgcgcttcgtgatcaggcgtgaactggttgtgggagaggatgtgcaagtgagcagggaaaccggaaccagcgtttggaggcccaaaggaacccgggcggattataacaattccgagtataagaaggtcagggcggagcggcttgtgatggaccatgccgcgtgcatggtatgcaaagctcccgccacgactgttcaacacgtgaattaccgcagggcgggaggcaaggaaataccggaagacctgcgggcgctgtgccgcctctgccacgacgcctgcaccatgctggaatacggttccggcatgaccaccgaccgcatcgacccctgcgaccccatctggcgggagcgaatactggcaaagcgcaaagatatagtcgagttccgttcgcgcgggcagcgtttccgcaaaatgaagccagaggaggaaaacggatgatctacttgtccaagctattgatcgatactggaggcaatccagaccgtccccgccccggcagaaagtggctggacaatatctataacgtccaccgccgcctttccatggcgttcccttcaggtttgcgccgggagcaggatccgcatttcctgaagcccttttcgccaaacgacttccaaaaaactcccttccttttccgggtcgataacaacatcgacggaaatgataaaagggcgattattatcgtccagtccgttcttgagccggattgggattattgcttccaaaacgcgtttgatttcctggccgcgccgccggaaacaaaggagtataatccagagtttcaagcgggacaactgctccggttcaggctgcgggtaaacgccagcgtacgccgtcatattcctgagaaggtgcaacaggacggtcaaaccatagaaactggcaacatcctgcacaaaagggtttctctcacctgggatccctcttccaccccggatcaggcccttgccgactggctggctgccaaaagcccaaagctgggcttcacccttcagcgctgtgagcttcttcaactgggttgggtttatggctccaagcctgaacctaaaaatgtcaaagcaaaggaacagggacagggctactggcgtgaacacacatacaatcctctgcgcttccgttcggctctactggagggaattctcaaagtggatgacccgaaactgttcctggaaacgcttagaagcggcattggaaaagcgaaaagcttcggctttggcctgctgtccgttctgccaatcaggaatgatgaataaagacctgcactctatcccccggatcagagatcggcttagctatctctatgtggagcatgccaaaattgatcagaacgggcaagccatcgccattcacgatgccctgggagaaaccccggttccttgtgccggcttggctatgctgatgctgggaccgggcataaccatcacccatgcggcaatactttcactggctgcctgtggctgtctggtagcctgggtgggggaacatggcgtcaggttctatgccgcaggcacaggtacaacccgtagcgccgtcaatcttatgaaacaggcaaagtactgggcagacccggttttgcatntacgggttgtgcgctccatgtatcagttgaggttccaggatgagctttctcctgatttaactttgaaccagatcaggggcaaggaaggtgcccgggtgcgcgatacntatttccaactctcccaaaagtatggtgtgcccatgcagggcagaaactatcaaagagacaactggaataaagcggatcccataaaccgggcattatctgtggcaaactcctgcctctacggcatatcgcacgctgccattgttgctgcaggattctctcccggattgggctttgtccacactggcaagcaactgtcatttgtctatgatatcgcggatctatacaaaatggaaatggctgctcccgccgcattccgggcgaccgctgaagggatcggcgaactcgaccgcagagtcaggcttgcctgccgtgatgaattccacaggcagaatctactcaaacgcattgtcgcggatattagttctctcttcggtgatattatgccagaggatagccnggatgactgttttgccgaagaaccagcnttgcctggaggactctggtctccagatggagaagtttccccaggcggcatatcttacgggcaggatgatctgccaaaggaagattgatggtggttttagtattggaaaatgtgccaagctccctgaggggtaagatcacacgttggctgctggaagtaaaagccggggtgtttgtgggtaaagtctcagcaatggttagagataaactgtgggataaggttagaagcaattgcancggtggaacttgcctgatgatctggagtagtcagaccgagcaagggtttgatatcgaattctggggtgccgcatcaagagtcgttacggaatgggagggtatcaaacttatgaccaagcatccttaaactaaggcttgaaggagttcaatgacctcttagacctctattgatcaagtgtattccccatgcatgtgggggtgaaccgg

SEQ ID NO: 790 - DNA, 6343 bp, Artificial Sequence
  Synthetic Oligonucleotide
aggcggcggtggggaagctcgcagggctgtttgggagacggcgagccgatccaggctgcacaacgcggcgcgccgttcgcgccctccctggccgggcaggcgtgtgcaccccgatgctactctgcgaagtagcgaagctccttcgctacgaagcacgagcctcctgacggtggcgatccgcggccactttgccgagcggatgcaggaactttccgttcgccctggaactgcacctgagacgacctgtggtccgactcccggaattgctggtggcagcactggagtcgagataggacctgaggccggcacctcgtgcgatcttgggatagacgcaccatgcgagggggttcagccgtgagcagcgtcggacggaacgtagtacctgagtcgttgctactgcgtctctgggcgaagaccgatcaagccgaccctgagcgttaccaccccctgctgttccacatgttagacgtggcggcggtgtgcgaggcgctcgcgccacgcttcgcacgggccatccccatcccctctgcgtggctggcctacctcgtcgggctgcacgacgtcggtaaggccggcccgcgattcctgggaatgcccccgaacaggcggaaaaactccacgccgcggccgctacctgacccgttagcaggcaaggatcggcggaagtctccgacaagaggcccacccgcacgcacctgctcataacggttgcgccgccgtgcgcacatgacgcaagacaaagtcggccaattgagtggagcaagtgcatgaactataaccttctcgtggagccgtggattcccgttctggagaacaatggcaaggcgcatcgcgtagccatcaagtacgcgctcgcgcaagcaggccggattcgccaaatcgcggcctcaaacccaatggacaacgtggccttgctgcgcttcctgctggcggtgttgcagtggtgcaagccgagcctggccgacagagagcgcaacgcgctcgagggtgccgatggcatcccgaatgattgggtgaacgcgaagctgggcactgatgaccagcccaacgcggcgttggacttgctgggcactgctcaccgcttctaccaggatccgaggctattgacggaactagtgaaggcaaagcagaatcagtgggacaatagccagaagaaacgcaagaagcaagcgccatccaatactcctcggccaacggaattggcggaggatgactaccgccccgtcggcgacctgcttcaggagtttcccaccgagacaaaggttgcacattttaggcacgttcacgacgggcaatatggcctatgcccggcatgttgcgccattggcattgtccgattctgcacgttcgccaatgcctacggtggtggcagatacacctccgccgtcaacgggccgaccccagcgtatgtcatctctcaaggaacaacgctgctgcaaacgctgctattgaactcgccgggagacgctgctatgaaacgcaagcccccgtggctgttcgatcagactcccgccgaggcagacctcgacatagtgaccgtgttcgcttggaggtcgcgtcggctgtggctgggcgactgcgggagcagtgacgagccttgctcatattgcgggcagccggatcggctcatcaagcggctagcgtttgccggcaactggaagccgccgttccaggccagaggcacccagaagaaattctgggatcaggacccccacctgatccttgaggaggtctccggcaacaagagcgaagccgacgatgactccgagcgcaccgacggcgacaaggatcacgagaccaaggcgactggcgagggagccgccggcaagaggaagacggttaccacgcttgggtttcctgctccaggttctccggctgcagcgcatgcgcgattctggcggcgggcgctctccgccaggctcgcgcgaagggaaggccaggcctaccatgctacaccgttgacgatcagcattgccggcccggcggcgaataagggtctgtatcaggacgccgccgcgattttgctgccgggcgttccgcccaacgcgagcgatcacgcgcgagatgttctgggcctcatcaggagcgcgacgcagaagctcatcggtgtactgcggcaaagcacgcccaatcccgacgcgcagcaccccaaccgtagggcagccctcgatactctgtcgccttcgctggaggcacgtctgcgtgaggagttcgatcagtggctgagaagtccgttgtctccaacggaggacacatcacctgttgtcgatgtctggcgcgaccaattgaccgtacgactccggcgcgtcgttgaagcggtggttgcgaccgccacccctggctcgcccctacgccagcgcgaagcggctcaatgggccttgcgggcgttggatcaagcgatggataggctggcgaagattggcgcgagacagccaactccacacgctaccgacaaacgcaaacgcggacggcgaaagcgaggcggagcatgaatcagactgagcgattcatcacacgactcgagggactgaagcaaggcgagcgctcgcggctgcgtcggcttacgggcaggccgttggacgagaccttgcagggctttgatctcttcaccggcctttggtggccgctgcgacagaagaaccaagctgctccgcgccgggaagtcgcgtggctcatcgccaagctctacggtgcatgtcccgttccgcacgttcgaccggacggagggaagggggcgccattggcgcaggttcttggccgctccgaaccgcgcgagccgcacctgaaagccttccgccgacgcttcgacgcgctgctgcaatccccgctgtcgggactggagccacacctgcggtgggcgctgtcggtcgtagcccatgcggtaaagcgtgatcgcggcaggggtctcgactgggtccaactgctcgacgatctatcggtctgggaccgcggcgacgagcaccgccgtgaacgcgacgtccgcgatatctgggcggaacaatacctgaacgcagtcaacaatccgaaaggagctgaccatgctgattgaaatccacatgatccagaaccacagcccgtcgaacctgaaccgcgatgacttgggcgcgcccaagacctgcctcttcggcggcgtcacccgcgcccgcatctccagccagtgcctgaagcggagcatacggaatcccggtagcccggatgacgtgcataaccgcgggccaggcattttctttgaagccatgcaagcgtatgtcggccgccgcaccaagttcttccctgaactggtcagcagggcactggattcctcgaccattcctgacgacgaacgacaaaagatcattaacgcctgcaccgggatcgcgaagaaggaagacaacaagcctggagcatcggctgaggaagtggagcttgatgaccgccccaaactcccccagcttgtgttcttggagcgttcagaagcacacgagtttgttacaaagttggcggagatgcgacaagcgaagaaatggaaggatagctatagcaagtggattgaaggtgaactcgaaaagaaggctcttgcagatttcctgcgcgagttatcccgcgcgtacaagcgccgttccgttgacatcgctctcttcggccgaatgacgacatctgaagcgtttgaggacgtggaggccgcgatgcaggtggcccatgcgatttccacgcacgctgtcgtcaacgaggtggactatttcacggcggtggacgacttgggcaagaccggcggcggggccgggcacgtggatgaggcgacgttcaactccgcgtgcttctataaatacttctgcctcgactgggaccagcttgtgcacaacctggccgggccggacccggacaaggcaaaggacgagaaggcgcatcagcagtggacgagcgagatcaggccgaacgcggctagactcgccgcttgcacgctcggtcatttcctacgcgccgcggctctgaccacccccagtggaaagcagaacagctttgccgccaacaacgagccctgcggcatcctcgtcgagatcaagaggaccaagacgcccaccagctacgctaacgccttcgccgatcccgtggagcggatcggcaagccggacgacgacgcgccggattgcgtcagttgggtcggccggagcatcgcccaactcggcgaccacgtgtataacgtacgcaaagcgtacggcatcgattcaaaggttctctggcacgctctacccctttaccgctatccgctccaaggctgggaacgtgaggacgacggacgaaagagcaaggagaacggccaggagaaaccgccggtgaagttcgcgcaccagtgcttcgaagcactcggcggcgagaatggtaagcccgaaggtttggtcgaggcagttgtgaaagagcttggcttcgactggttggagatcaaggacgccggcaaggcctctgcaaaggaggtatgaccatgagcgacgcgccaaacacgctcttcctgcgcttggagggtccgctccaggcgtggggcgacaactcgaagttcgtcatccgccgaacgatggatgcgcccacgaagtctggcgttatcggcctcatttgctgcgcgatgggactgtcgcggcaggcggcgcgcgagcttctgccggagctgaacgacttagcgatgggcgtgcgcctcgaccggcccggcacgcgctggtgggactatcatacggtcggcgccggctacgggctgctgaccgccgagggcaagatcaagaagacagccagcaccggcgaatacgaaacgcttgtgagccggcgcgagtacctgtgcgatgcgagctttctcgtggcgcttcatggctatacggagctgctccagcgcgtgaagtatgccttggggactccgaagtgggcgcttttcctgggccgcaagtcgtgtccgccgtccacgccgattcccgcaggtgaggcgcgaagtgacgatctcctgagcgcgttgcgacaccaactttggcggccccgttacaggaccgacgagcgaccgaaggaagcgggcgtgccgtgcctgatcgagtggcgaccatcgaaagaggaaccgaccgccccctcggacgccgaggtctggtacgacgcgccggtctcgttcgatcccccggtgcatgaaccgcggctggtcatgaggacggccgtgcatgcggaagtcggcgacgcgacgcagcgtcccacgccccctccgccgcgcccgcgcgcgaactaccggaacaccgagtatcgcacggcccgcgctgcccgcctccgcgcggacgatgggctctgcgttttctgcaagtctcccgccactaccgtgcagcacgtcacctaccgccgggccggcggaggcgagaccagagatgacctgcgctcgctctgccggctctgccacgacgccgtgaccatgatcgagtacgggctgggcatgggcctggaccgcatcgacccctgcgacgcccgttggcgccagcagatcattgcgaagcgcgacgagatcacccgctttcgctcgctcgagacccgccgccggcgcctcagccccgaggaggtggaatagacatgtacctgtcctgcctcttgattgatgcagggggcaatcccgaccgccctcgccccggccgcctgtggctgcggaatctctaccacgttcaccagcggctctgcatggcctttccatcagcgtccaagatatccgatgacgcggactttctcaaacccttcaagccggaggactttggctccaagcaagtccatgtccctcggggaacgcaggcaggtttcctgtttcgcatagacccccagcccggcggccgggccgtgattctcgtgcagtccgccgtgaaacccaactgggattacgccttccgcaacgcgtgccatctgctggcgtgcactcctcaagtcagaccattcgacccgcacttcgagtcccaccagcgcctgaggttccgtctggtcgcgaatcctacgaagaagactggtacgctgtccagggaagagaggcaagcgaagaaggaagggcgtcacggaacacgtgtccccgtgccgaccgaccggctctatcaatggctcgccgatcgggccgagtcggccgggttcacggtcgagcaggattccaccgctgttcagccgggctacatctattggagcaagatgcagaacggcagcgggcaacgcctgcgctctgtccgttacgacggggttctcactgtcaccgacccggcccgctttgaggagactcttgtcgagggcatcggctctgccaagggattcggtttcgggctcctgtcagtggctccggcctgatcgcgggagtgacgacccaagacggtcacga

SEQ ID NO: 791 - DNA, 6306 bp, Artificial Sequence
  Synthetic Oligonucleotide
ctccgatcgaccggggttgtagtcgatctccgatcgacgttacggcggtcggagaccgccgctacaaaaccaggcgatggatctcaccctggtacggccaatcttccgggcgcttgactaaaccggcccggaccggattctgccggacatattcatatttctcccgataggattcttgcgatctcaggacgtgatcgaaaaagtctttctcccaatgtgtgccctcgccctcatcttcccggaggactttggataaatccccgcgcagcgccttgatccatttccctaaaggtggggactcacgacaaaagccggcgaaaagatggatgtgatcaggcatgatcatgaagaacccgacccaaacaagaaaatcgctcgcccgttcggagaatctcgtgaattcccggtgaatcgcaggatttgccaacgagcgtttgcggtcctgcgtacacagcgtgagatagtagattgggctgcccgtatagagccagtccagtcgccgcaagcggggtttgaatttcatattggctcgatctccgctcaagaaatgttgcacggatccccgatcgacaagggattgtagcgtcgatctccgatcgacgtaccggcggtcggagaccgccgctacagcgagagcggcgccacggaaagcaggccgaagccgaaggctttgccgtgcccaacgccgcccacgatggtttctctgaagctgtccgcgtcctcaaccgtaagcgtcccctccaataacgccgagcgaaatttcatgcggccgcccgtcggcctcgggtcggatcggtctcctgcgccccacccgatctgcaagacccggaaagtttccacttggaatccaccttggccgcccttgccggcgaaccattttcgtatcacatcgtcgcggttctggtccttgtcccaggtcagcgccacgcgtttgccttgggccttcgggcggccccgcttatctgtcccctctcgcgtcctcgtaagatcaacgccctctgtgctggtttttatcttcttactcagattggcgcggatacggaagcgaagccgctgacccttctcaaagcgggggtcgaattcctgcacctgagggggagcggctagaggattcagaagaaaacgggcgttgtggaaggcgtagccccagtcaggctttacggcagagttagactggacgaggatcacgacccgcccgcccggttgcgggtcgatgcggaagagaaagccggagtcgccgtcacgtcttacatggacctggttgttggcaaagtccgcgggtttgaaaggcttgaggaagtggggatcgtgggatattcggtctttggatggaaacgccatgcaaaggcgctggtggacgtgatggaggtttcgcagccagagccgcccgggcctggggcggtcggggttggtgccgacgtcaatcaagaggcaggagaggtacatggctattccacctcctcagcggcaaggcgtctgcggcgagtctccagagagcggaacctgataatctcttcccgcttctcgatgatcttgtcgcgccaacggggctcttcggggttgatgcggtccaagcccattccgagcccgtactcgatcatggtcacggcgtcgtggcagaggcggcagagggagcgcaaatcgtcccggagttcgccgccgcccgcgcggcggtacgtgatgtgctgcacggtgctggcgggagacttgcaaaaaacgcacaagtgatagtcgtcgtcgagccgctccttgcgtcggtttttgtactctgtgttcgtgtaatccgctcttgggcgcggaggcggtggcgtgtcgctctgcggtggctgcaccgcaagtgttacgtcgccgtccgctccgacgcgcaactgcctgcggatgacgaatcggggttggtgcgacggcggctcgaatgtcaacggcacgtcgtaccagacgagcgcatcatcgggcgcctcgggctgctcgttggtgggttcccaatcaagcaggcaatcgacgggtcgcggctggggatcgtccttcagccgccgacgccaggggaccgattcgagggcagaaagcaagtcggggaattcacctcccggatgctccagcagagggcggcaaggggggcagcactttctgccgaggtagagtgtccacttgggcgctttgattgccgcctccagttcctcaatgaggtccggttcgccctgaagagcgacgagaaacgaggcgtcgcaaaggtattcgcggcgggtgagcatggctccggacttggttcccccctcggcggtacgcatcggcatccccgcacccaccgtgtgataatcccaccagcggacccctggcgcatcgacgcgtacgcccatgcgcagccgggccagccttggaagccagccttcgcgggcctctggccgggaaacgcccaatgccgcgcaaagcatcccgatgacgccggacttggtcggcgcctcggccgtgcgccgaatgacgaacttggattgctgatcgccccatgcctgaagaggaccttcaagccgaagtagcagcgtctttgcgctcatggggcacctccggattcaggaccactttcttggcctcctgccagtcgtaaccgatttccttgagtacagccgctatcagttcgtcaagagacttaacatctttgtcggcaagcgggacctcacgctgtttctgttttccgtcttcgctctccgtggtggtagccgtcaacggatagcggagatttggagagaaccagaaccgcttcgtcggcttgccgtatcccgtatctatgtcgttcacataatgggcaagctgcgccacgctctgcgagatgatgtcccgttcgccctgaggagccgccggtttggcgaaggcgttggcgtagctgatgggagtgtttctgacttccaccaacatcccgtcaggagggttgtgcgcggcaaaactattttgttttcccgtggggttggccaaggccgcggcgcgaatgaaggcgccgacggtatgggccgccagtttttcgtgattcgtcccgaagggcttcaggtttttgaccagcgtttcccaatgaatggagaaatacttgtagaaacatgccgaaccgaacatggcttcatccacgtaacctgcgcccgcgtcctcgccggggacatcatcggcggcgacatagtagtccacctcgggccgggcctcatgggtggaaatggcatgggcgacttgaagcgatgcctcaaccgtcgtgtctttgaggactcccgtttcaagcatcctgccgctcagcgccatgtccggcacggcgacggattcactgatgagcttgccgaactccgctgccaaggcctcgtccgtttttccgtcgccctgctggaggagttcggccatgcgtgtaatcgcctcttgggtggtgtaaaccagcatcttgctcctctcagcactttcctgttcgtcttctccttcctgtttttttgctttcttaggctccagcccgcaggctttgagaatgttctccgctcgcttcctgacgtctttgcccgtcaccttttccgcaatctctttcgccaactggcgggtgcgaactccgcccagcaattgtctgaactcctcactcatgcggatgctgcgcttaaggcactggctggaaatacgggagcgcaagactccgccaaaaaagcaagtcttgggcgcgcccaggtcatcccggttcaggttggccgggctgtgattctgaatggcgtgaatctggatcaacatgactctcctcctcttggacagttcaaaaattcctcggcccatttgagccgggtggattcgcgttcccagatggaaagatcgttcgtcagccgcacccagtcgagttcgaggtgcttggaagctatgaggtcgattgcccactgtagggcgggttcgatttcagcaagcggcagcgtgagcatcctgtcgaagcgttgctcgaaacgctgccgcgctgttttctcgcccggccgggatcgcccgagctggcgagcgagggtctcgcggggtgaatgctcgaggggccggagggcgtagagtttggcgacaagccaggccacctcacggcgaggcgcccgttgggtttgcgcccgcagcggccaccaaaggcctgcgaaaaggtcaaagccctctaccgattcgtcgagcccttgcccggcatggttgcgcaagagcccgagctcaccgggtttcagtcgagtcagaacttcgacgtactgctccgttggagtcacttgtcccccccttcgtctttgttgtttctctttggccgcatgtccggctttacagcggcaatttcttgtcgcctccggagggaagcggttgtgtagcccggggaaagcgatttggcgacggcggccatcaacggacgatattcctgggccgcctcttcccatgccttaccgccttctgcgatcatctcgtcgatttttccggaaaccgttgcctcggcttggggacgaacagcggcgactgcggagagaatttcaaggtgtcctctgtttcgtgaagtctctcgcggtttggctctgccaacgagcttccagccttccttctgccacgcctggatttcttgcaaactcgcctgaaccttcacgtcgtcgagcgcggccaagaattgaatctcccgctcggctgcttccaggtatttgtcgttctgcactgtcgcaaagctgacgacccacaacttactgttccccttcggcttttccccgcacaggattcccgccacgaccttcgtccacttcccagccgcagcgtcggccgggccaagcgcgctgaaaggcttcacaatctcgtcgccttcgctgatggtgtgcgggtcgttccagattcgtgccagactgccttcgcctgtctttgtgctcccaatacccgcaaagacacattgacgtatcagagcctccctgcgcccgcaggcgatgcagttggactctggtgtctccggagtgtctaaccagacgcgccgcggtacccacgttaatcctatcaataatggaacattgccgtgttgagggaggcttatgtccggattttcccatgtgggcgtgcccaggttcatctccgacgtcttccgccatgagaggcgcagggtttcggaaaggcagtcgcccatcggcacgatgtagatcggcggtttttgattgacgcccgggggcttgccgcgcccggccgacgtagcaaagagcggaaggcgcaacaagcccattgcgcagcatgccggacataagccgtttctgaaatctgtcccatgccggaagtgccagaagtttgtgccggtcggcacttcttgcatcagatagttgacggacagcttcttctcaagtcggttaggcttgcgttggtaaaaccgcttcccatcgccctgaaggttgaaacagtctttgttgtcatcgagtttcttgaaccaatcagagggaaacgaagaaatcgagttcttgtcgtccgggggattccctttgcaccaatagagcaacgcaagcaggaaacgcaggatggccaggcggtccattgggttgctggccgcgatttggcgaatccggcctgcttgcctaagggcctcactaatgcccacgcgaccgctgtgcccatctttccacagaacgggaatccacttttcttcgagcaggttgtactccacggcttcctccttgcctgggcaagaggcgggtggcaggcccgtcgcgccccggggggaccggaccgtccgctgcgtagctaccacaggacaatcatggcgaaggtatacacccgggacgcggcaaaggcaaggcccgaagaccacgacaacggttatcgcgtccgcttagcccacacttcacaggctgcaaggcgcgccgttgactaagcgcagaagctttgatgcctccgcggcgttccgattcggagggaatcttgcgatcgatttcgcgggtggcgcatacgtcccgacgggtttttgtcgggatgtatgcgcccctcggcatgtcgacaccttcatagcctcttgtccatgctcaagatcgaaccatcattccagaaatagaacctcccgccgcagcgcgaccacggccagtcgcccgggtgcttgaccagcactcgtttgacgggattgtcgcgcctgtgattcaatttctcgtctcgcttcttggggctccagatgttcatgtcgtagaacccaccccaacaatatatcgtccctgtggcgcatacatcccgacaaaaagaagctgtgaaaaaatcaagaaaatcgaaaaattaagaaattttcttgtcttagctatacagctatgatatattagcctctgaccgcacttccggcgggga

SEQ ID NO: 792 - DNA, 6306 bp, Artificial Sequence
  Synthetic Oligonucleotide
cgtgaactacaacctgctcgacgaaaagtggattccggctctatataacaatggcattaacaagcgtgtgaacttgatggaggcgctgatgcaggcgagccggattcgcgaaatcgcgtcagccaatcccatggacagggtggcgatcctgcgttttctcctcgcgcttctctattggtgcaagggaaatcccccggacgcagaggatgagatcgcgcgaggcccgtttcctcgcgattggttcaagaaactggatgacaacaaagattgtttcgaccttctgggcgacgggaagcgcttctatcaggaccttactgcaaagcgcccccgcccggcaacggttctgattcaggagttacctgctggccataacttctggcactttaagcactcaaccgataacaaaagcggtctctgctcggcctgctgtgcgacggggttgttgaggctgccactgttcgctgtgagtagcctaagtggtcctggagagccaaacctgatggccggcatcaatggcgttccaccagtatatgctgcaccgtggggcaaatcgctgcttgaaaccctgcgcgctaattggacggcctgcgggaacatcggagaaccttcgtggggtcgctaccgagctacccaagaaccggatgccgatgtacccctgttaacaggcctgacgctcttgccccggagggtgtttctgcatgaccccatcaagacaggctacgcgtgtgccggctgcgccgcacgcgaattaccgttgatattgggatgtgagtaccagacggccggcaagcaagagaacgctaaatggaacgatccccatgcactctactcaggaagcggaccgcgaaaggcgatgagagcggcggacctgacggcatcgggccggttcaggctggaccgaccgtgggctgacctccttgtccgcatcctcgaaacacgtaaacctacagctctgcttgtcgtcggtttcgctacaaacaaggcaaagaacattgatgtctgggagtgcacgatcgatattccgccaacaacgtcagttcaggaagtcgccccagctttggcgaggaaatggcagttagaaggacgagtcttggaggaggagatcaagaaggtaacaagatcgaaaggcaagggggccgctatcattgccgccctacgcccgaccgtggaatcaagtgtttccgagaaagttggcgaattgatttctcaagacagcgacgcatgggaacaggcgacgcacgactactctccaatgatggcggccgtcgcgagatcgctttcaccgggttacaccatcgcggctctgcagaggcggcgacagattgccaacgtaaagccggacatgcggctgaaggtcggaggggctgagaaaactgaccggaagaagggagggggcaagtgagtccaacagaggaatacatagtttgcctgacgaacctgaaaggcggggacctcgggctcttgcgcagccatgcggggcaggggatcgatgaatcagtagatagctttgacctcttcgcaggcatctggtggccgttgcgggcaaaaaaccagcgggcacctcgacgcgaggtcgcatggcttatcgccaagctatacgccctgcggcccattgagcattcacccggcgagaccctcgcctgccagctggggcgttcccggcccggcgagaaaacagaccgaaagcgtttcgagcaaaggtttgacacgatgctcagcctgccgctcgacaaaattgaacccgccctgcaatcggcgcttgatctgctcgcctcaaaagacctgaaggtcgactgggtaaggcttaccgatgacctttccatttgggaccgaccgaccgctcggctcaggtgggccgaggtttttttggaatcttcaaaggaggttgcacatgcttattgaaattcacgccattcaaaatcacagtccggccaacctgaaccgagacgacctgggcgctcccaaaacttgcttttttggtggggtcttgcgctcacgcatctccagccagtgcctcaagcgcagcatccgcatgagccccgagttcgagcggctgcgcggcggagttcgaacccgccagttggccaaggagattgccgagagggtcacgggcaaggatgtcagaaagcgagctgagaacatcctcaaagcctgtggacttgaaccgaaaaaggcaaagaggaaggagggggaagaccaaaatgaaaatgctgaacggagcaagatgctcgtttacacgacgcaggaggcaattgcgcggatggcggagctcttgcagaacggcgatgggaaaaaggacgatgtgctagcagcggagttcggaaaacttataagtgagtccgtcgcagtcccggacatggccctgagcggcaggatgcttgaaacgggagtactcaaagacactaccgtcgaggcagcgcttcaggttgcccacgccatttccacccatgaggctcgccctgaggtggattactacgtcgcagccgatgatgtcccaggcgaggattcgggtgcaagttacatagatgaagcgatgtttggctcggcctgcttctacaaatacttctcgatcgattggggaaccctggtcaggaacttaaagccctacggcactaatcacgaaaagctggcggcgcacaccgtgggagcgtttatgaggggggcggtgctggcgaaccccacggggaaacagaacagttttgctgcgcacaatcctcctgacggagtgttggtggaaatcagaaacactcccctcagctatgccaacgccttcgccagaccggtggccgtggcggccagcattaaagaagaggggcgggacgtcatctcgcagagcgttgcgcagcttggtcagtacgttcatgacatcgataccggatatggcagaccaacagcgcggttttggttctcgcccaatcttcgctatcctctcaccggcatggaaggtaaaacagaaatcccgctcgcagaaaacaattttgagtccctcgacaaactggtaccggctgtggttcaggcaattggccaagactgggaggaggtcaagaagataaccgtcaatctggaggtgtctgatgagcgcaaacacgctcctgcttcggcttgaagggcctcttcaggcctggggcgatcagcagtcgaagtttgtcatccgccggactgccgaggctccgaccaagtcaggggtcatcgggatgctttgcgcggcactcggcgtctctcgcacagaggctgccgaacgctggctgccgaggcttggttccctgcggatgggcgtccgcatcgacgtgccgggagtccgctggtgggattatcacacggtcggcgcagggatgcagatgcaaactgccgagggtgggaccaagtccggcgctatgcttacccggcgggaatatctgtgcgatgcatcgtttctcgtcgctctgcaaggcgagccggacctgatctctgaactggaaatcgcgatcagaatgcccaaatggacgctctacctcggcagaaagtgctgtccgccgtcgcgcccactgctggagcagccagcaggcgaacttcccgacttgctttgtgccctaaaatctattccttggcgcagacgcctcaagaccgatcccacgccgctagcggtagactgcctattggattgggggccgacccaagatcagccggaagctcccgacgacgctctcgtttggtacgacgtgccgttgacctttgagccgccttcgcaccaacctcgattcgtcattcgcaggcaattgagcatctctgacagcggcgacataacggttgcagaccagtcggcgcagaggggcacaccgtcaccgcagcgtccccgggccgattacggcaactcagagtacagagaccggcgaaagcagcgattggacgctgactttcgcctttgcgttttctgcaaggcccccgccaccacggtccagcatgtcacctaccgacgcgccgggggaggcgagacgcaggatgacttgcgctccctctgccgcctctgccatgacgctgtgaccatgattgaatacggcttgggcatggggctggaccgcatcaatcctgaatacccgcgttggcgcgagctaatcattcagaagcgcgaacagatcattaaattccgctcgcttgagacgcgccgccgcaggctcgccacggaggaggtggagtagaaatgtacatgtcctgccttctaattgacgtgggcgagaatcctgaccggcctcgcccagggcggctttggctgcacaacctctaccatgttcaccaacgcctgtgcatggcgtttccgtccgcgtcccgaaaatgcgacgatgtggagttcctgaagcccttcgagcccgaagactttggcaacggccaagttcatgtaacacgcgcggaggacgccgggtttctcttccgcattgagcctcagttcgcaggccgggcaatgattctcgtgcagtcgcccataaagcccgactgggattacgcctttcacaacgccgggtatcttctggcggctccgtcccaggtgaagccgttcgacccctccttcaaggtcgggcagcgtctccgcttccgccttctggcgaatccgacccgccgtctctccaagcattcactcggagccaacggacagccgatcaagaaatgggccaacaaggaaggcaaagggatgcgcgtccctgtgcctgaggaccgcctcatcgactggctcactcgtcgagctgaaaaggccgcgttctctgttgagaaggaatccgctagcattttgtcaagttatgtctacgtcaacaaggcgcgggaggaaaatggggttcgcctgcgctccgtccgttacgatggcactctcactgtctccgatcccacgcgctttcaggacgcaatgctgcaaggcatcgggcccggcaaggccttcggcttcggcctgctttccgtaatcccatgccgctcgccactcgtgggcgagaccaagtgagaattcaagacctccacgttctaccgaaattcagtgacgggtggagctatctctacgttgagcactgccgcgtcgaccaggaggaccgggccattgctttccacgatgaggccggaaagacgcccgttccctgcgcaaatcttgctttgctcatgttgggtccgggcgtgtcgatcacgcacgccgccatttccgtgctcgcagaccatgggtgcctggtggcgtggtgcggagaagagggggttcgcttttacgcaacgggcatgggcgagacccgcagcgccgctaattttttgcatcaggcgcgaatgtgggcgcacgagggcttccgcatgcaagtggtgcgccgcctctaccagttgcggttctccgagaagttcgacctatctttgactcttcaacaggtccggggcatcgaaggtgtaagggttcgcgaagcgtatgcaaaagcggctcgggaaatcggtatcacgtgggaaggccgcaattacgaacgccaggactggcacaaggcggacccggcgaaccgggcattatctgccgcaaattcctgcctatatggtatctgccatgcggccatagtgtcggcagggttttcccccgcacttggcttcatccataccgggaagatgctttccttcgtgtatgacgtagccgacctttataaaactgaaatcaccgtcccggtcgcgtttcgcgccgtcgccgagtccgaaggacagttggaacggcgggtccgcgtcaaatgccgcgaccagtttgtatccacgcggcttctggaaaggatcatccccgatatccagtccgcgctgatgttgtcaaaggggactgccttcgaaactgattttgacctcgatgccgccgccccaggtttcctctgggacgatgtggaaggaaaagtcgaaggcgggcgcatgcaagcagcagaggctggcgaaacggagcccaacgatggtggtcctgattcttgagagagtcccgccgggattgcgcggcgagttgacacgatggtttcttgaaccgcaggcaggtgtctttgtggggcgtgtctctgccctcgtccgcgatcggctgtgggaaaaggcttgcagcaaggccagcggcggcgggtgcttgatcatctattccagcgacaatgaacagggttttcgaatccggacttggggccgaacgacacgccagatcgatgacttcgagggccttttccttgtccgcataccgcagaatcagtgacttagtaagtgttgtccccacacgcgtgggggtgaaccgtcgagcttgacgaatactgccgaaagctgctcgttgtccccacacgcgtgggggtgaaccgatcatgg

SEQ ID NO: 793 - DNA, 6296 bp, Artificial Sequence
  Synthetic Oligonucleotide
ccgaagcggcgctgctcacccttcagtctgggcggcagtctggggcagcgcggttcctacaactcgcagcgtcaacgaggaaggcatgaccgacaaagccgacaattacaacctgctcgtgaagccatggattcccattctctgggccgatgggaaccccgctcgcgtgagcatcaggaccgcactcatagaggcgggccgtatccgtcagatcgccgcgtcgaacccaatggacaacgtggccttgctgcgcttcctcctggcggtgttgcagtggtgcaagccagacctcaccggcgaggatcgcgacgagattaagaatgccgacgggattccggagcactggctaaggaaacgtggcgccgagggcgaggcgtacgcagcgttcgaactgctgggcgcgggtgcacggttttatcaggaccagtcgctgtccggggaaaagcccaaacgccccgtctccgacctgttcgcgtatcttcccgcggacaccgagatcaatcattttcggcatgtctacgaccgcaccatcgctctgtgccctgcatgctgcgcggtcggcttggttcggctctcggcagcggcaacgagcggcggatcgggattatctccctcggtcaataacgcgccgcctgtctattccgttcccataggcgactcgctgttggagacccttaggctcaactggccgctgcatccttcagaggaggatgattgcgctgcatgggaaacagggaaaccgcgggcaaagcggatcggcgtacttgaaggttttacgtggcagccgcgcgccgtctggctgggaccgttggttgaagaagaccggcgaaaatgtgctcgctgtggttcgtctgggcgtgttgcctgccaaatggtcttcaagaaggggcgcagccgcaaggctgatggccgcgcatacagcgacccgcatgtcgcttggttggcaaagaagaatcgaccgaatgacgggggctccgatgcgaaagaccccgctttgcgggggcctgacccgctcaaacgctcagttcgcgaggccgcgctttggtgtcagaccggtcgggcagtgttggacacagtgggcgatgatccgcccataccatcgcttgcgtgcgcaatggaacggcttcctaagggcctgagtttgcgcgtcacgtgcttcgagccctttaccaagcagaaaaagacattcgatgaacatcgtgacggttgggacgtctctctcgacctcttgcgaagcgattacctacggggcttagcaatcgaggagattcgctgggtcgaaggcctcgatttgagcaagtgtctgccggcccgtcaggattgtcagaacgcttacgacgccgcccggcagcggggggcgagcgcccgcagcgacaagaccaaggacgccgctcaatcgatcattgcggcggacgtacaacatcggctttgcgaccttttcaggaacttcgtgaaagatctggcgaaagaacacaccgaggacgcagccgggcgatgcgtaacccgctggcgggatgcggccgtgtcgttactccgggacgtgcttgaccgggcgtgtttcttcagcaccgccggctcgccgcttcgccgacttgaagcggctgaaataactcgcaagaagttggatcagacgttggagaagctggcggagagcgataggaagctgccttccggacctgcctccaaacgagaaagcgaaccacagaagcgaggccgagcatgagtcagactgagcagttcattcgacggctcgaagcgcttaaggaaggcgagcgctctcggctgcgccggctcgccggtcaacggcttgatgaatcggtgccgggcttcgatctgtttaccggactttggtggccgttgaggcagaagagcccggtcgcgccacggcgggagacgagttggctggtcgccaagttgtacggggcggtgcgggtacggcacgttccacaggactgtgcgtttctgccagtggtgctgggcaagtgcgagccgcgcaacgctttcgcccgccagcgataccgccggcggttcgacgcccttctccaggcgccgcttgctgctatcgagccgggcctgcgctgggcattgtccgtcgtggcccgccgggcgagcggcgtcgattgggtgcgactgctaaacgatctgtccaagtgggaccgcggcgaagagcaccgccccggcaaagacgtccgtgaagaatgggcctgccaatacctggaggccgcaaaagtgaaaggagaaaccggccatgctgattgaaatccacatgatccagaatcacagcccgtcgaacctgaaccgggacgacctgggcgcgcctaaaacgtgcctgttcggcggcgtcacccgcgcccgcatctccagccagtgcttaaagcggagcatccggaacccgggtaaccctgatgacctgcataaccgaggaccagggatattcgcgcaagcaatgagggatcacatcggctgtcggaccaagttgtttccgtggttggtcgagaaagccctgaagaaatccgagattcccgagggagagcatcgccgcgtcgtgctggcggcgcaacgaatcgcggcccgcaaggagaaggacgagaagaatacagcagccggcgcgaaaactgaccccaggccgaggacgcggcaattgatccatcttgggccagggcatgcaaccttctttgtcgccagacttgctgaacttcggagccaggccaaagaccagtacgagtacttcctcaaccctatcgtgggctttcaagagacggtgcgcgagcttctcgcggaatcagacttgaacgagaaggaacaagagaagatcgtgaaagccagttgggtcatcgccaactgccgaatgtccaggctgctcgaagttcccgggggggaggaaccagaacctgagccggcgatggaggacgaccaaccgggcgccgagcacgcgggagttgtcgccaaacgcctgttcgaactctatacatccgatccaagccgtttcaagaacctgacgaaaggccccacgaaagacgaggagagccaacttaaggaagacgcccctgccaaaccgaggaagggaatggatgacttcatggccgccttgaaagcggccaaccgttgtggcgcggtggacatcgctctgttcggccgcatgacgacatccgaagccttcgaggacgtggaagccgcgatgcaggtggcgcatgccatctcgacgcaccagacggtcaatcaggtgaactacttcacggcggtggacgacttgggcaaggccggcggcggcgctggccacgttgatgaggaaatgttcaactccgcctgcttctataagtacttctcgctcgactgggaccagctcgtgcacaacctcgccggaccggagccggatcagaaagaggacgcagaacgtcacaggaagtggaaggatgaggtcaagcctcaagcggaacgactcgccgccgccacgcttggtcatttcctgcgcgccgctgcactgtgtacgcccagcggcaagcagaacagctttgccgcaaacaacgaggcgtgcggcatcctcgtcgagatcaagaagagcaagatacccaccagctacgccaacgcgttcgccgagccagtcgagcggatcggcaagccggacgacgacgcgccagatgagaagagcatcgaaggccgcagcgtggcatgtctggcagaccacgtgcacgctcttcgcacagcctacggcgttgactcaacactgctgtggtacagcccgaagctgtggcgattccccttgcagtattgggagcgggcggaggacgggaagaagctcaccgccaaacccgtggaagcacagcggttcgacgtgctggccggcgagaaaggggagctggaaggcttggtcgaagcggtggtgaaagcactcgcactcggcttcgactggtctcaggtcgaggacaccgggagggccgcggcgaaggaggccggatcatgagcgacgcgcccaatactttgttcctgcgcctggaaggtccccttcaggcctggggcgacaactcgaagttcgtcatccgtcgaaccatggaggcgcccaccaaatccggcctcatcggcctgacctgctgcgccatggggttgtcgcggcaggcggcgcgccggcatctggcggagatgaacgagctccgcatgggcgtgcgcatcgaccggcccggcacgcgctggtgggactatcacaccgttggagcgaaggtcgggattctcaacgccgccggtgttatcaagatcacccagacgacaagggagaaggaaacactggtgagccgccgagagtacctttgcgacgcaagctttctggcggcgcttcagggccaagccgatctgatccggcgggtcaaggatgccttggggaatccgaagtggccgcttttcctgggccgcaagtcgtgcccgccatccaggccgatcctcgccggcgagactcaatgcggcgatcttctgaccgcgttacagtaccaaccttggcagccccgttatgagaccgacgaaccgccgcgcgaaggatgcgtgccgtgcctgaccgagtggcagccatccccggatgagcccacggccccggccgaggccgaggtctggtacgacgcgccgatgtcgttcgatccgccggtacacgaaccgcggctcgtggtgcgcgggagcgtcgtcgttccggtcggggaaccgacgcaacgtcacacgccgcctccgccccgtctccgcgctgactacgggaacagtgagtaccgcaaggccgccgttgcccgccgcgatgccgactgcgggctctgcgttttctgcaagtcttacgacaagcgcatgaacgtgcatcacatcacttaccgccgggccggcggaggcgagtcgcaagacgatttgcgctcgctctgccggctttgccacgacgcggtcaccatgatcgagtacggtcagggcatgggcctggatcgcatcaacccgtgcgaacctcgctggcgcgagcagatcatcgcaaagcgtaccgagatcatcaagtttcggtcgttggaaacccgccgccggtatctcgaagccgaggaggtggaatagacatgtacctgtcgtgcctcttgatcgacgtgggcgacgacccagaccgtccccggcctggacgtctgtggttgcgaaacctctaccgggtccaccagcgtctgtgcatggcgtttccgtcggcggccacgatctcggaagatgcggactttcttcgacccttcaagcggcaaggctttggcgaggttcatgtccctcgggcgaccgacgccggattcctgtttcgcatcgacccacaacccggcggccgggtcgtgattctcgttcagtccgccgctagcgccaactgggactatgcctttcacaacgcgagctatctgctggcggctcccccgcaggtgaaatcattcgttccctgcttcgcaaaggaacagcgtctccgattctgtctggtggcaaacgcgactcgcagaatcgacacgaagagcgggccggacgggcgccggcgccacggaaaacgcgtccctgtaaaggcggaccaactcggtgaatggctcgctggccgagcggaggcggcgggtttctccattgacaaggatttgctcaccgttcagccgggctacatctatgtcaacgaccccgagcggcaagaacctgaagcgccttcgtcacagaagggcagggggtatcgcctgttctctgtccgttacgacggagtcctcacgattaccgactctgcccgttttcaggggaccctcgtacgcgggatcggcccagggaaggccttcggcctgggtttgctgtcggtcgccccggcggcggttccggccagtgcgccgtaggactggatctgcgcacggccgcgcgccggtgattcgcgggtgccgccaatttggctcgcactcgcagacaacgtcgaaggagtgctatgaaggatctccatcttctccccaaggtccgcgatagctggagttatctgtacgtcgagcattgcagggtcgaccagcaggacaaagcgatcgcgattcacgatgccgaggggcgcaccgcggtgccctgcgcgatgcttgccctgctgatgcttggtccgggcaccaccattacacatgcggccattcgggccttggcggacaacggctgcatggttttgtggtgcggcgaagaaggtgtgcggatatacgcctgcggcatgggggaaacgcgttcttcgcgcaacctgctggcccaggtgcgtctttacgccgaccccgccagccgcctcaaggtcgtccaccaaatgtaccggatgc

SEQ ID NO: 794 - DNA, 6242 bp, Artificial Sequence
  Synthetic Oligonucleotide
  misc_feature (1418)..(1427): n is a, c, g, or t
gtcttcggatccgggggcggacggttcacccccacgtgcgtggggaatattttgcccaattgcggatattttcatgggctttcggttcacccccacgtgcgtggggaatatactggatattacgctgatttcggggtttttggaagcaaaatgccttcgaagtctgtaatgaccttgctggtatcgccgtagctctggatggcgaagccctgttcgctgttatcggaatggatcaggagggcggctccgtccttgaccgagcgaatgactttgaaccacagcagttgtcgaacgcgggcggagacatggccgacgaagacgcccgtctttggctgaatcagccagcgggtgagttcaccccgcagtgacgcctggactcgttccagaatcaggatggtcatggtctttttcctcctttgctatcgggtcggggttggggcagagtttgagtatctttccaatcggcacggaagcgggaatgctctggggcgtccaccactcggcgggcagagccgcgtcgtcggcgaattcgtcgggctgggcctccaacgccttgatatcgacgtccagcaccttggcaatatccggaataattttttccatcagacggctttccttgaagcggtcgcggcaggcgattcggacctcgcgttccaggttcggcgggttcgcggcggcgagtttgaatgccatgggaatggtcagatcggccttatacagatcggcgatatcgtagacgaaggacagttgtttaccggtatgaatgaaccccagggccggggaatacccggcggagaggattgcggcgtgaaccagtccgtacaggcaggagtttgccgccgacagtgcgcgattgaccgggtcgctgtagtcccacttttcgcggttataagatcggccttgccacgtgacgcccgcttcgcgggcggcgtcggcgtaggactggcgaacgcggataccttccatgccgcgaagctgctgaagcgtcagattcatatccacgggttcacggaaccggaggcagtacattcgcacgaccacttgcagccgcgtgaggtcgttgctgacgagtcgggcctgatggatcatattacggctgtgacgcgagccgccgagtccctgggcgtagaaccgaacgccctgttcgccggaccagatgaccaggcaattattgtcggccagcgtttgaacggcggcgtgggtgatcgtggtgcccggtcccaggacgagcacacccaacgcggcggatggaacgggcgtcgtcccatccgcctgatgcagggcgatggccttttcgtggcgatccacgacggcatgctcgacgtagaggtaactgagcttgtcgccgaacttcggaatctcctgaaggttttttttaaaaggtggcacgtgttattcctttgtcaaagagcgattcnnnnnnnnnngaggtagctgagcttgtcggcgaacttcggaatctcctggaggtttttgagtcgcacgtgttattcctttgtcaaagaacgattttacagtcccccccgaatcttacggcctaaggccgatcaaacttcgccagtgaaagcagcccaaagccaaaggccttggccggtccgatgccggagataagagtcttgcggaatgcttcggggtcggtaacggtcaggatgccctcgaatcggaccgacagcagtcgcttgctttcgaggatgccatcgcgtttgtcaacgtagacgtagccggattggattgccacgtcgtcgataccaaaaccgcccttcttgccacgggtgaccagccagtccttgagtttctcgaacggaacgggaatacgcttgcctatccatttgccgtctagaggattgccccggatatccttggagttcttcgaacatcttcttgtggggtttgcggacagcaggaacctgaagtgctgcccttccgtgaaggatgggttgaattccttgacctgcggggagtgggccaggagatgctccgcattatggaaagcgtatgcccagttcggctcaatagccgagagcacaagaatcaccacattcccgcccggttgaggatcaacgcggaaaagaaacccggtttcctgcgtccggttgacgtggacatgcccttgggcaaattcctgaggatcatacggacgaagaaagaatttatccttctccagacgtgccttcgaaggaaacgccatgcacaatcgctgatggacgcggtagaggttccgcagccagagccgaccggggcggggccggtccggattgtcgcccacgttgatgagcagcgtcgatagatacatcattccacctcctcgggctgcaagcgccttcgacgagtctccagggaccgaaattcgacaatctctcggcgtttggcaatgatctgatcccgccattgcgggtcttcggggttgattcggtccaggcccatgcccaagccgtattcgatcatggttaccgcgtcgtgacaaagacggcagagggaacgcaagtcttcctgcgcctcattgcctccggcacgacgataggtgatatgctgaaccgtggtcgccggagccttgcagaagacgcaaagaccatggtccgcatctagacgctgttcccggcgtcttcggtattccgtattggtgtagtccgcgcgaattcttttcggccccggcgttcgattcaggaggggctcttgagccactttcacgtcaccgtctggtccgactgtcagttgccgccggatcacgaaccgcggctggtgggcgggtggactgaaacccaccggaacatcgtaccacacctcggcgtccgacggagcctccgtgtgattgtcgtcggactgccaatccatcaggcagtccacaacaggcggaacctcatcgtcccggaatcgcttttgataaggcacggatacaatggcggaaagaacgctttcctgacggctcggatcggccacccacacgggcagtgacggcgggcagcacttacggcccaggtacaacgaccatttcggcttctgaaccgctgcggccagttcgccgatcaggtccaccggaccttgcagggcgaccaggaagcgagcatcgcacaggtactctcgccgactgagtagcggcccttcccttgcttttccaggtccttccgagatcggcatctgcatcccggctccgacagtgtgataatcccaccagcgaacgcctggggaatcgattcggacggccagacgcaaggagtcgaatcttttccgatgctccgggaaggcatcccgcgaaattcccatcgccgcacacagtaggccgatgatccccgacttggtcggggcctccgccgtccgtcggatggcgaacttcgattcatgttggccccaggcttggagcggaccttcgagacgaaggaatagggtattggggcagttgtctgtcgtggtatccatcggaacaatctcccttagttgatggtgaccgtctgaaccttctgccagtcaaagcccatttcatgcaggagtcttccgactagcttgtccagcgattccacagattcgccgctcgccccctgggccccgtcgagttggagcttgtagcgaagattgggcgagaaccagaatcgtttcttcgggccgccaaacccggtgtccatgtcgtggatgtactgtccgagttgggcaatgctctgagtgaccatatcccgcggaccggtgaggggaacgggggcggcgaaggcgttggcatagctgatgggcgtatccttgatctcaacgacgattccatcgggcggattatgggcggcaaagctattttgtttgccggtggggtttgccagagccgcgccccgcaggaaggctccgacggtgtgggcggccagctccttgttgcccttgagattgctgacaagctggtcccagtcgatggaaaaatatttgtagaagcaggcggatgcaaacatcgcttcatcgaggtaggcggctccggcatcatctccgggaagatcatcggcagcgacgaaataatcgacttctggagtcgccgaatgagtggagatggcatgcgcggcctgcaacgccgcttccacggtcgtatcgtacttagccagttccttcgtctccagcattcgccccgtcaaggccatatcgggaacagccacttccgtcgcgatcagtttggcgaattcctgggcgagagcgtccgcgtcaccgttgtgcgttttcagaaggttcgccatcttgtcaatggcgctctgcgaaacatagatggccatatcagtggtgccgtcgtccttggcgtcaaagccgcacttcttgaggacctctgacgcgcgtttcttggcgtccttgttcccattcacttttccactgatgatctccgccagcctgcgggtccgaatgctgccgagtaatcggctgaactgctcgctctggcggatacttcgcttgaggcactggctggaaatgcggttccgcaggacgccgccgaaatagcatgtcttgggcgcgcccaggtcgtcccggttgagatttgacgggctgtggttctggatgatgtgaatgtcgatcaacatacgatgtctcctacaaaaagttaacactgtgaattccgttcgagaaactccttcgcccactggaggcgggtctcccggttttcccattgtgaaaggtcatcggtgaggcggatccaatccaccgacagtgaccggcgggccagcatgcggagaaactgttgcaaaggaacttcgagctgcgacaggggcagcccgagcagatcgtcaaattgctgtcgaagccgggcgttatccgatagtcgaccgagttgacgcgccacggttgcgccattctcctgatccagtggacaaaagctgaaaagcttggccaccagccatgcgacttcccgtcgtggggcaaattggcttttctgacgcaggggccaccacagtccggcgaagagatcaaagccgttcagcgagcgatccagcggcttgttagccagtgcccttaatcttcctcggtccccggtcttcagtgatcggatgttctccagaaaatcatgcgtcgcggtcatcgttccttcctttctttcttggcaagcgactttcgcggcctagccaatcttacggcctcctggagttgtcgttgccgatccagatgctccgaagtggcgttcggatatagagaggaggccagaatgccaatcgccttacggtactcctgcagcccctcttgaaagtctgtctcgccatcattcgccgtcagttcgggaattcggcgggagacctgagtctcgacatgcggggtcattgcggtgacaccggcccgaatcccggtgtacttgcggcccttcggctccattgcatcccagtctttcggcttaagccgccggagattgtcgacggtttccttccactgtcgcacggaatcggggttggttgccccaatcttacatgttcgctcccagacgtccacgtacttggctttgctcgtggaaaaccccgtaataaacagcgtcaggcctcggctctcgtcggggaacgacacttcggagaacaactggcaccacggtctatcggctataagctcgtcctccaagttaggagccttcaccgccttgtccgaagaggaataaacgacgtgaggatctttccaatgccggttctccagcgaacccgccgattgaaattcgcaggatagaatcaactctccaacccgctttccacaaccgatgcaacactcgtccgactccgagggatcatggaggtacactcgtcgggagagaaccgtcagtcccgtcaacaatggaacgggagcatccgtcggcggcgtcatgcggcaatcctcccatgcggggacgcctaagtcgccgccgtgctgtcgccagttgagacgcagggtctccaagagagtcttcccaagcggcataacgtagatgggcggtacgccgttgattcccgacttcaaatccggcaacccactgacgtggaacaagggtaggcgaagcaatcctcgtgcacaacatgccgggcaaagtccgtggtggtaatcaatggcgtgattgaagtgccagaagttatttccagcaggaacctcgtggatgagatcggtaatgggacgttttctttgggcggaaatatcttgaaggaatctctgcccgtctcctaacaggttaaacaactccttcttttgttccagcttcccaaaccagtttttcgggaattggccgtcggccagaatccgctccttctcatcttctgccggtggattgccttgacaccagt

SEQ ID NO: 795 - DNA, 6204 bp, Artificial Sequence
  Synthetic Oligonucleotide
aggtcacggcacgagatgcgtacacgtcgttccagcccgtctttctcttccgccgccgctcgaaatgccgctggaatagtaatttccgccttgtaaagatcggcgacatcataaacgaaggacagcatctttccattgtggatgaaaccgagcgcgggcgagaatcccgccgaggtaatagccgcatggcagatgccgtaaagacacgaattagccgccgacaaggccctgttcaccgggtccgcattggtccacttgtcacgccggtagctgcggcctgaccaaggcaccccggtctctcgagcggctctggcataagcatccctgacatgcacgccttccatcccgcggatctgccgcagggtcagcttcggatcgaacgtctcggcaaaccgcaactggtacaaacggtgcaccaccttcaaacgaagatccgcatccgcccaagcccgcgcctgatgcaggaagttcgccgcgctccgcgtctcgcccatgcccgccgcatagaaccggactccctcttcgccgcaccagatgaccaggcaaccatggtccgccaacacggaaatggcggcatgcgtaatcgatacgcccggccccagcatgagcagcgccagattcgcacaggggacaggcaccttgccggatgcatcgtggatggcaatggcccggacttcctggtcgacgcggcaatgctcgacgtagagatagctccagccgtccctgaacttgggcagaatctgcaggtcccggactctcatgtcgcctcgtccgagcccgcagtattggccggcgcgatcgaaagcaggccgaacccgaaggatttgccggaaccgatgccgcggataagggtctgccgaaaggcatccgggtccgtgacctggaggaggccttcgaaaagaaccgaacgcagacgctgccccttgccgtttttgttcatatagacgaaccccggctgaagggtcgtggcgtcttcctcgatatggaatcctgccgattcggcccggcgggcaagccagtcgacaagccggttggtcggaacgggaacgcgctttccgatagattcttcttttgcatccggtgaatgcttgcacagacgtctggtcggatttgccgcgaggcggaaccgaaggcaccggccttccgagaagcgtgggtcgaatggtttcacctcagggggcgctgccagcagataatccgcattgtgaaaggcatagcaccagtcgggctctatggcagactgcacgatgattaccgccctgccgccgcggagaggttcgatgaggaaaagaaatcccgagcccacggcacgcttcacatggacttggcctttaccaaactcatccggtttgaacggttggaggaagtccctatcttcggccttccgggacgcggtcggaaaggccatacaaaggcgctggtggacatgatagcggttcctcagccacgaccgcccgggccgaggccggtcggggttgccgcctacgtcgatcaatagacaggaccggtacatggctattccacctcctcggcggcaagacgccgacggcgggtctccagcgagcgaaattcaacgatctcggcccgcttttgaatgatcggcttgcgccagcggggctcctcaggattgatgcggtccagccccatgccgaggccgtattcgagcatggtgacggcgtcatggcacaggcggcaaagcgaacgcaggtcctccagggtttcgtctccgccggcccttcggtaggtgatgtgctggacggtgtttgccggggctttacagaagacacagaggccgtggtcacgctgaaggcggcgcggcctcatgcctttgggaaccttgcgagacggatcggcggggtcggcaatcagggtctcgcttttccattcagcgttgttgtagttcgcgtgcggacgggggggacgcggcacacgctcttgcgtggcaccgtcggtggacacaccgttcgctccgctggtgagttcggtgcgcgtgactaaacgcggatgatgtaccggaggatcgaacgcgacgggcgcgtcgtaccagacttcggcatcattgggggcttccggctcggtgtccgtcgcccgccattcgaggatacaggcgagcttatcaggcttcttgtcaggctcaaagttgggcaggcgcggttgccagggaacacacttgagggcatcaagcagggacctgcccgtttcgatatgcggctcgcaggtgccgtcctcgcgctttcgcgtcacgaggatcggcacgctcggcgggcaggacttgcggccgaggaaaaccggccacttcggcgacgcaatcgccgcggcaaggtcatggatcaacttcgcatcaccctggagcgccacgagaaagctcgcgtcggccaggtactcccggcgcgtgatgagcgtgccctgggcgccggtcttcacttcgttcccagcggttgtcatgccgattcccgctcctaccgtctgataatcccaccaccgtgtgccgtgccggtcgatgcgcacacccatcgcaagcccgttcaactccggcaggcgttcccgcgccttctcacgcgacaggcccatggcgcagcagagcaggcccagcaccccggacttggtcggggcatccatggtccgccggatgacgaacttcgacgtgtcgccccaggcctggagggggccttccaggcggaggaagattgtgttggcgtcggtcatttcgccgcctccgcaggcgccccggttgccccgagcttgtccatgaccttatggatgaactgatcgaactcgccgaactcgtcggaaccgaccacggattgttcttgctcgtgttccttctggcttttgtcgatccaggtcaggcgatggcgcagattcggcgagaaccagaaacgatcggcctcgatgccgtaacctgcaacgagatcttgggcgtactggccgagcctggcgatgctttcgccgatcaaaccgcgttcggacttttccggcaccggatcggcgaaggcgttggcgtagctgacgggcgtagctgacttggttttaacctcgaccagaactgcgtcgggcggattaaatgccgcgaaggcgtgctgtttgccggaggggttggccttggcggccgcttcaaggaagcaccttattgtcttgcgggcgaggtcggcatcgtccgccaggttcttcttcaactgctcgaagtcaatgacgaagtgtttgtagaagcaggccgagttgaacatggcctcgttgacgtgggccgcgccggcgtcctggccgggcacgtcgtcggcagcggtgaagtagtccacctcgttcacgaccgcgtgagtcgagatggcgtgtgccgcggacaacgcggcttcgacggtgaacttacccttcagatccttaaacgggcctttggcatcgaactccgtcatgcggccacaaagtgcgatgtcgggtgtcttgacgaactcgccgatgatctcggcgaagttcttgcccaggtcgccgtttcccgtccgcacagcctggcccatttcgttgacggcggattgaggcagaaagaagagtatatcgaaagtgtcctcatccttcaggccgaccccccccttcttgaattccttccggatggcctcgcgatgtcgctcttcctgtggattgccttcgcccgccgccgcctttgcgatcagttcgatcagccgccgtgtacgcacaccgccgtccttctccaaagcaaccgcgaactccgggctgcgccggatgctgcgtttgagacactggctggagatgcgcgcccgggtgacgccgccgaagatgcaggtcttgggcgcgccaagatcgtcccggttcaggttcgccgggctgtgattctggatcatgtggatttcgatgagcatgtttatgccctcctttcgagtaatttcgtagcgttgagatacgtctcggcccagatgtcgcgaacatcgcgtccgcggcggtgctcctcgccccggtcccagatggagagatcgtcaaggagttgcacccagtcgatgcccgtcacatcccgcgcctgcggcacgtgcccggcgacagccttggcgacttcccccagcgcccagcgcagatgcggctccacagacgacagggacgagcaaagcagagcgtcgaatcgagttcggaagcgcttgcggtcatcctcgtcgcgcggttcgcagcggcccaggacttcaggcaaagaaggccccgcgcctgaatcgggccggatgtgtgggacgcggaacgcgccgaaaagcttggcgacgagccatgacggctcccggcgcggggtcgccggactcttcgcccgcagtggccaccagagacccgtgaagaggtcgaaaccctggagcgttgcgtcgagcggccgtccggccagacggcgcagccgcgagcgctcgccttcctgcaaggctgaaagccgcttgatgtattcagcggtctggctcattttgagcctcccttcttgcggccacgtttcggtttgccaggcacggctgcaggcgtacctgcgttcgacagatgatccggcttctcaaccagctctttgatctttttgttcagcagggctttggcgtgctctttcgccgcgcggcggcgcaatggcgagcccttggtggtggatgcgacaatttgttcgacgaccggctcgaagatttcacgcagaaaattcttgtccgcttcggcgtcggtttgcgcccttgctgggggctgttcaagcgcggtccgaacgcgggcctcagcgtcggccgtcaacagcacaactgcggcgtcgatttcgtggtgatcgtacttgcccgtcttctggttgggcgtggtgtacttgacaagtccgcgcagcccgtcgcgaatgcttgcggagcgttcgacgcgctgattagccgcctcattcggaacggacacgcttgtcgcgtcttgaaacgtgaatttgtttacgacgggaccgatggcggatactttgccttggcgttgaccgcgaagacgaaaggcgtcgcgccagaaccgagaagagtgtgcggccacatccgccgccaatccgggcagggatataggctcaccctttttcttcaacagatggggatcagtgtcccagaactttttgacctgcgtgtcactcccgctcagatgcggcgattcctgttcggttgccttcttagtcagttcctcgatcgcccgctgattgtccgcagtgaaaagctggtgaaagacgcgggcgattttctgttcgtcgggttcaggatttggcgcagcggcggcgggggtgtcggccgcaccaagcgcttccattctgcatttgcggatgagctgcgcgaccctgactactttgtcggccagcttgaactcgtctgttttttttgacccgtaagcattgttgattttctggaactcggccaagacgtcctttccgaaccgttggccgtcggtgacgggagtggaccagccatacttgttgtacaggcgtttgaccaacactccgttgcttccgcagtaggcgcatgtgccccgatggtccgcgaacttcaaccacagtttgcgcggacgccacgtcaggcgggcaacgtcgtcaggcgcggtagggggattagtgagcagccacggaggaggttgcggcggggcagaggcgccttgggtttgcggcagattggcgcacagagtttgaagcaggttcttcccttcaataaatgcgtaggccgcagagcccgggttgactgatgcgggataatacttgttggccggagaccagaccgagagccgcaagattcccatcgcgcaacacgcggggcagaacccgtaggggtcgtcatgcacaacgtggcgcatgtgattcaccgaatccgctccagggaactcgacgagcagatcgctgatgggccgagatttcttgtccttcgacgaatcgtcatccttcaacgaatcgttgcccttcaacgaatcgttgcccttcaacgaatcgtcgtccttcaacgaatcgtcgtccttcaacgaatcgttgcccttcaacgaatccttgcccttcaacgattcgtcctgatagaaccttttaccgtcgcccagcagattgaacgcggccctgttttcctccagtttagccagccagttcttcggtatgccggcgctcttctcgtccagcgccgcgagggaagacttcgcgtcctctttgcaccacatgagcacggccaacagaaagcgcaggagcgccaccctgtccatggg

SEQ ID NO: 796 - DNA, 6147 bp, Artificial Sequence
  Synthetic Oligonucleotide
cggttcacccccacgtgcgtggggacaacgacgagctcttcgccgaggcgacgttcgacaacggttcacccccacgtgcgtggggacaacaactcggggcccgctcccatctcgtgcgcctgcggttcacccccacgtgcgtggggacaactccaccaccggcatcgtcccggtgagaataatcggttcacccccacgtgcgtggggacaacgcttgcatccctgttcggctgcttgcttgtccggttcacccccacgtgcgtggggacaactttaggtccgtgtcgtcggcgcgatcctgcaccggttcacccccacgtgcgtggggacaacaaccgcaaaggcggcggcgggaccacgctggccggttcacccccacgtgcgtggggacaacgtgccgtgcctgttcgtgagtatgacggattacggttcacccccacgtgcgtggggacaacgtcgcggaagatcacgcggtggtagccgatgtcggttcacccccacgtgcgtggggacaacaccggctacgatccgctcaccatccggccaaccggttcacccccacgtgcgtggggacaacttgcacctggcgcagggcggcggacgcctggtcggttcacccccacgtgcgtggggacaacgtgatctctgcgatgcgcagtaactcctcgagcggttcacccccacgtgcgtggggacaacagtgccagcggagacaaaggcacgatcacctgcggttcacccccacgtgcgtggggacaacagaaacagccgttcgccgccggatgcgtttcaacgcttcttggcgctcggcgggtcatcgcgctgcacgaggatcagcccgtcgagttcaacgatctggcgcgacgtgttaccgaagctgcgcacggcgaacccctgctcggtattggcgctgtgaagcatggttgcgccgccgtctatgcctgagcgggcgacacgctcccaaagcttgtctcgcaccatcgcggacatggtgccgacgaagacccctgcgcggggctcgatcatccaccgcgtgatctcgccgcgcaggctcggcggcgagttctcgacaatcaagacgaccatgttgaggtctcctgtgaggtgtcatcagcggcgggcggacgcgtgatgacggttccatgaggcggcgcccaccactcggccggcatggccgggtcctgcgcccagatgtcggccagcgcatcgccttcatccgttgcgccaagggcctcacggatgtcgggcacaatatgctggagcagccgcccctcgcggaaggcatcgcgacaggcaagccgcactcgccgctcgatgtcggcttcggatgcggcggtggtttggaaggccaccggaatggtgaaggcgaccttgtagaggtcggcgatgtcgtaaacgaaggacagttgcttgccggtgtgaatgaagccgagcgccgggctgaggccgacggagaggatcgcggcgtggcacagcccgtagagacacgagttggccgccgacagtgcgcgattgacggtgtcgcccgccccccagttgctgcggtcatagttgcggcctgaccaggcgatgctggtttcgcggctcaggcgggcgtaggcggccctgacacgcgaaccctcgatgccgcgaagctgctcgatggtggtatcgggcggcaggtcctcttggaaacgcattcggtacatgcgcgcgacgacctggagacgcagcttgtcgtcggttgcgagccgtgcctgatggagcagggccgcggagctgcgggtgccacccatgccggaggcgtagaagcggacgttctcctcgccgcaccacacgacgaggcagttgttgtccgcgagcgcgcggatggcggcatgggtgacggcggtgcccgggccgagcatgagcacggcgagcgaggcaatcggcaccggcaccttcccttgggcgtcatggaaggcgatggtcttctcgtgctggtctatgcggccatgctccaggtacaggtaagacaggcagtctcggaacttgggcaagcgatgcaggtcgtccacggccccctcccgtcgttcatggtgcgcctgtctgtattgttccgcacttcccggctgcttgcggggcatgtagcctgtattcagttgtcaaggtgcaggcgctggatcggtgttctacgacaccggcgccacggatagcaggccgaagccgaaggccttggcgggaccgatgccgcggacaagggcgttcttgaaggtcgccgggtcggtcaccgtaagtgtcccttcatagcggaccgagcgacggcggccgctgttcggcttcttcccgtcatcatgtgacccgtctccattcggcttcttcacatagacgtagcccggttgaatgctaacggcatcctgctctacgaggaacccggcgagcgcagctcgccgagcaagccattcgtgcaattgctcgggccgcaccggaacccgtgacccattgcggccctctttcttggcttgtcgttcatccttggagagcgtgccgatcttcttggtgggattggcaacgagacgaaaccgcaagcgctggttgacttggaagctcgggtggaactgctttgcctgaggggcgcaagccagaagataaccggcgttgcggaaggcgtactcccaatccggcctgaccgcggactgcacgacgatcacggcccgaccgccgggcttagggtcaatgcgaaacaggaagcccgcgtgtgatccccggacgacgtggacctgtccggccccaaagtgctgcgggtcgaaaggctctaggaagtccgcatcatcggcccttctgggcgccgacggaaacgccatgcacaggcgctggtggacgtggtagatgttgcgcagccagagccgcccggggcgtgggcggtcagggttgtccccaacgtcaatcaagaggcaagagaggtacatggctattccacctcctcagcgctgaggcgccgacggcgagtctcaagggagcgaaagcggatgatctcctcgcgcttcgcgatgatttgcccgcgccaacgagcttcgcacgggttgatgcggtccagacccatgcccaggccgtactcgatcatcgtcaccgcgtcgtggcagaggcggcagagcgagcgcaggtcgtccccggtctcgcctccgccggcgcggcgataggtgacatgctgcaccgtcgcggctggagctttgcagaagacacaaaggccccaatccgcgtgtaggcgggctgcgcgggcattgcggtactcggtgttccggtagtccgcgcgtgggcgcggcggagccggagcaggactctgcgcgggcttttcggcgatctggacctcgccatccgcgcccacgcgcaattgccgtcggatgacaaagcgggggccgtgcgccggcggctcaaaggtgagcggcacgtcgtaccagacaagcgcatcgtcgggcgcttcgggctgttcggacgtcggcccccagtcgagtaggcaatccacggtttctggtggacagtcttctctgagccgccgccgccacggcaccgacgtgagtgccgagagcaagtctggaaacgcgcccgccggatgttccagcagtgggcgagacggggggcagcatttcctcccgaggtagagcgtccattgtggatttcccatcgccgtttcgagttcagcaatcagcgtcggctcgccgcgcagggcgacgagaaacgacgcgtcgcacaggtactctcggcgggtcagcattgcgccgggctttgtctttccctcgccttccgcaatccgcatctgcattccggcgccgacggtgtgatagtcccaccaccgcgtgccggggcggtcgaggcggacgcccatgcgcaaagccccaagccttggcagcgactcctcggcggccttggctcgggaaacgcctaatgccgcgcagagcatcccaatcacgcccgatcttgtcggcgcctcggccgtccgccggatgacgagctttgactcctgatcgccccacgcctgaaacggaccttcgaggcgcaggaagagggtgtcgtaactcatgatacggcctctgagttcgcaacgaccgtctgcaccgctttccaatcatggccgatggcggcgacgacggcggggaccagctcgtcgagcgacctgatgttgttatcggcaagctcgatctcccgcttatcctcgacaacactcaaccggaaccgcagattgggcgagaaccagaaccggttctgcggcttgccgtatccgatgtccagatcataaacgtattgcgccagttgcgcgacgctctgcgagaccatgtcccgctcgcccttgctcggcacggggctcgcgaaggcattggcgtagctgatcggagtgtgcttgatctcaatcagcattccgtcggggggattgtgcgcggcgcagctgttctgcttgcccgtgggattcgcaagggccgcaccgcgaaggaacgcgccgaccgtgtgggcggccagctcttcgtggttctcgccatagccctttaggttctcgaccaacgttccccagttgatcgagaaatacttgtagaagcaggcggaggcgaacattgcctcgtccagatagccggctcccgcatcgtcgccgggaatgtcgtctgcggccacatagtagtccacttccgggcgggcctcgtgcgtcgagatcgcgtgcgccacttgcagcgcggcgtccaccgtggtgtcgagtcccttccacacatccttggaggccttgtcgggctccagcatacgccctgacagcgctatatccggcacggccactcgcttgccgatgagtctcgcgaactcaagcgctaggtgctcatcggtcttcgctttgctgccctgaagaagctttgccatctcctgaatcgcttggcgtgttgtgtacacaagcatcttgctcttgtctgaatcgccgagatcatcttcctcggcgttctgcttcttcgtcttgggctcgaatccgcaagcctggaggatcttctccgcacgcttctgcgcgtcgggcttgccggtgacttccgccgcaatcagcttcgccaactgccgagtgcggacgccgccgagcaatgccttgaactgctcgctcatgcggatgcttcgcttgaggcactggctggagatgcgggagcgcagaatgccgccaaagaagcaggtctttggcgcgcccaggtcgtctctgttcagattcgacgggctgtggttctgaatagcgtgaatctcgatcagcatgactgtcccctttcgttgtgcccgatgaactcataggcccacctggtgcgcatggattcgcgttcccagatggagagatcgtccgtcaatcttacccagtcgagttctcgacctgttgacgcgattaagccaagcgcccatcgtagcgcaggctcgatcttgtcgaggggcaggacgagcatcctgtcgaacctttgcgggaaacgctttctcgctaggtcattggtgggctggcaccgacgtagctggcgggcaagcgtgtcatcgggcgactgcggaatcggacggaaggcgtagagcttcgcagtcagccaggcgacctcgcggcggggagcacgcggactatcctttctcaacggccaccagagacccgcgaacaggtcgaacccgtccaccgtcttgtcgagtccctgccccgcgtgcgtgcgcagcaatccaaggtcgccagacttcagacatgtcagggcctcaatgtaccgctccgttgccgtcacctctcgcctcctttcttacggcctggtttcttcgccgattctgtcctgggccacatgtccggcaacacgtcggcgatctcccttcgccgttgcaccgccgccgtagtgaaacctggggaaagagatctggcgatggcctccatcattgggcggtattccgccgccgcccgattccaggcttcgtccgtgccgacaatcaactcgcccgccttcgcggagactctgccttcgacatgggggcgggcggcagcgatggcagccgcgccctggtcttgagacctcactatccgcgctatccgcctctccagccgtccaccctccctctgccattgctgcatcgaggatgtccccgtttcttgggttgaccctgttgatggcgcggcaaggatgcgttcccacacgtcaatgttctttgcttggtcag

SEQ ID NO: 797 - DNA, 6140 bp, Artificial Sequence
  Synthetic Oligonucleotide
ctggtgtcaaggcaatccaccggcagaagatgagaaggagcggattctggccgacggccaattcccgaaaaactggtttgggaagctggaacaaaagaaggagttgtttaacctgttaggagacgggcagagattccttcaagatatttccgcccaaagaaaacgtcccattaccgatctcatccacgaggttcctgctggaaataacttctggcacttcaatcacgccattgattaccaccacggactttgcccggcatgttgtgcacgaggattgcttcgcctacccttgttccacgtcagtgggttgccggatttgaagtcgggaatcaacggcgtaccgcccatctacgttatgccgcttgggaagactctcttggagaccctgcgtctcaactggcgacagcacggcggcgacttaggcgtccccgcatgggaggattgccgcatgacgccgccgacggatgctcccgttccattgttgacgggactgacggttctctcccgacgagtgtacctccatgatccctcggagtcggacgagtgttgcatcggttgtggaaagcgggttggagagttgattctatcctgcgaatttcaatcggcgggttcgctggagaaccggcattggaaagatcctcacgtcgtttattcctcttcggacaaggcggtgaaggctcctaacttggaggacgagcttatagccgatagaccgtggtgccagttgttctccgaagtgtcgttccccgacgagagccgaggcctgacgctgtttattacggggttttccacgagcaaagccaagtacgtggacgtctgggagcgaacatgtaagattggggcaaccaaccccgattccgtgcgacagtggaaggaaaccgtcgacaatctccggcggcttaagccgaaagactgggatgcaatggagccgaagggccgcaagtacaccgggattcgggccggtgtcaccgcaatgaccccgcatgtcgagactcaggtctcccgccgaattcccgaactgacggcgaatgatggcgagacagactttcaagaggggctgcaggagtaccgtaaggcgattggcattctggcctcctctctatatccgaacgccacttcggagcatctggatcggcaacgacaactccaggaggccgtaagattggctaggccgcgaaagtcgcttgccaagaaagaaaggaaggaacgatgaccgcgacgcatgattttctggagaacatccgatcactgaagaccggggaccgaggaagattaagggcactggctaacaagccgctggatcgctcgctgaacggctttgatctcttcgccggactgtggtggcccctgcgtcagaaaagccaatttgccccacgacgggaagtcgcatggctggtggccaagcttttcagcttttgtccactggatcaggagaatggcgcaaccgtggcgcgtcaactcggtcgactatcggataacgcccggcttcgacagcaatttgacgatctgctcgggctgcccctgtcgcagctcgaagttcctttgcaacagtttctccgcatgctggcccgccggtcactgtcggtggattggatccgcctcaccgatgacctttcacaatgggaaaaccgggagacccgcctccagtgggcgaaggagtttctcgaacggaattcacagtgttaactttttgtaggagacatcgtatgttgatcgacattcacatcatccagaaccacagcccgtcaaatctcaaccgggacgacctgggcgcgcccaagacatgctatttcggcggcgtcctgcggaaccgcatttccagccagtgcctcaagcgaagtatccgccagagcgagcagttcagccgattactcggcagcattcggacccgcaggctggcggagatcatcagtggaaaagtgaatgggaacaaggacgccaagaaacgcgcgtcagaggtcctcaagaagtgcggctttgacgccaaggacgacggcaccactgatatggccatctatgtttcgcagagcgccattgacaagatggcgaaccttctgaaaacgcacaacggtgacgcggacgctctcgcccaggaattcgccaaactgatcgcgacggaagtggctgttcccgatatggccttgacggggcgaatgctggagacgaaggaactggctaagtacgatacgaccgtggaagcggcgttgcaggccgcgcatgccatctccactcattcggcgactccagaagtcgattatttcgtcgctgccgatgatcttcccggagatgatgccggagccgcctacctcgatgaagcgatgtttgcatccgcctgcttctacaaatatttttccatcgactgggaccagcttgtcagcaatctcaagggcaacaaggagctggccgcccacaccgtcggagccttcctgcggggcgcggctctggcaaaccccaccggcaaacaaaatagctttgccgcccataatccgcccgatggaatcgtcgttgagatcaaggatacgcccatcagctatgccaacgccttcgccgcccccgttcccctcaccggtccgcgggatatggtcactcagagcattgcccaactcggacagtacatccacgacatggacaccgggtttggcggcccgaagaaacgattctggttctcgcccaatcttcgctacaagctccaactcgacggggcccagggggcgagcggcgaatctgtggaatcgctggacaagctagtcggaagactcctgcatgaaatgggctttgactggcagaaggttcagacggtcaccatcaactaagggagattgttccgatggataccacgacagacaactgccccaataccctattccttcgtctcgaaggtccgctccaagcctggggccaacatgaatcgaagttcgccatccgacggacggcggaggccccgaccaagtcggggatcatcggcctactgtgtgcggcgatgggaatttcgcgggatgccttcccggagcatcggaaaagattcgactccttgcgtctggccgtccgaatcgattccccaggcgttcgctggtgggattatcacactgtcggagccgggatgcagatgccgatctcggaaggacctggaaaagcaagggaagggccgctactcagtcggcgagagtacctgtgcgatgctcgcttcctggtcgccctgcaaggtccggtggacctgatcggcgaactggccgcagcggttcagaagccgaaatggtcgttgtacctgggccgtaagtgctgcccgccgtcactgcccgtgtgggtggccgatccgagccgtcaggaaagcgttctttccgccattgtatccgtgccttatcaaaagcgattccgggacgatgaggttccgcctgttgtggactgcctgatggattggcagtccgacgacaatcacacggaggctccgtcggacgccgaggtgtggtacgatgttccggtgggtttcagtccacccgcccaccagccgcggttcgtgatccggcggcaactgacagtcggaccagacggtgacgtgaaagtggctcaagagcccctcctgaatcgaacgccggggccgaaaagaattcgcgcggactacaccaatacggaataccgaagacgccgggaacagcgtctagatgcggaccatggtctttgcgtcttctgcaaggctccggcgaccacggttcagcatatcacctatcgtcgtgccggaggcaatgaggcgcaggaagacttgcgttccctctgccgtctttgtcacgacgcggtaaccatgatcgaatacggcttgggcatgggcctggaccgaatcaaccccgaagacccgcaatggcgggatcagatcattgccaaacgccgagagattgtcgaatttcggtccctggagactcgtcgaaggcgcttgcagcccgaggaggtggaatgatgtatctatcgacgctgctcatcaacgtgggcgacaatccggaccggccccgccccggtcggctctggctgcggaacctctaccgcgtccatcagcgattgtgcatggcgtttccttcgaaggcacgtctggagaaggataaattctttcttcgtccgtatgatcctcaggaatttgcccaagggcatgtccacgtcaaccggacgcaggaaaccgggtttcttttccgcgttgatcctcaaccgggcgggaatgtggtgattcttgtgctctcggctattgagccgaactgggcatacgctttccataatgcggagcatctcctggcccactccccgcaggtcaaggaattcaacccatccttcacggaagggcagcacttcaggttcctgctgtccgcaaaccccacaagaagatgttcgaagaactccaaggatatccggggcaatcctctagacggcaaatggataggcaagcgtattcccgttccgttcgagaaactcaaggactggctggtcacccgtggcaagaagggcggttttggtatcgacgacgtggcaatccaatccggctacgtctacgttgacaaacgcgatggcatcctcgaaagcaagcgactgctgtcggtccgattcgagggcatcctgaccgttaccgaccccgaagcattccgcaagactcttatctccggcatcggaccggccaaggcctttggctttgggctgctttcactggcgaagtttgatcggccttaggccgtaagattcgggggggactgtaaaatcgttctttgacaaaggaataacacgtgcgactcaaaaacctccaggagattccgaagttcgccgacaagctcagctacctctacgtggaacatgcggtggtggatcgccatgaaaaagccatcgccctgcatcaggcggatgggacgacgcccgttccatccgccgcgttgggtgtgctcgtcctgggaccgggcaccacgatcacccacgccgccgttcaaacgctggccgacaataattgcctggtcatctggtccggcgaacagggcgttcggttctacgcccagggactcggcggctcgcgtcacagccgtaatatgatccatcaggcccgactcgtcagcaacgacctcacgcggctgcaagtggtcgtgcgaatgtactgcctccggttccgtgaacccgtggatatgaatctgacgcttcagcagcttcgcggcatggaaggtatccgcgttcgccagtcctacgccgacgccgcccgcgaagcgggcgtcacgtggcaaggccgatcttataaccgcgaaaagtgggactacagcgacccggtcaatcgcgcactgtcggcggcaaactcctgcctgtacggactggttcacgccgcaatcctctccgccgggtattccccggccctggggttcattcataccggtaaacaactgtccttcgtctacgatatcgccgatctgtataaggccgatctgaccattcccatggcattcaaactcgccgccgcgaacccgccgaacctggaacgcgaggtccgaatcgcctgccgcgaccgcttcaaggaaagccgtctgatggaaaaaattattccggatattgccaaggtgctggacgtcgatatcaaggcgttggaggcccagcccgacgaattcgccgacgacgcggctctgcccgccgagtggtggacgccccagagcattcccgcttccgtgccgattggaaagatactcaaactctgccccaaccccgacccgatagcaaaggaggaaaaagaccatgaccatcctgattctggaacgagtccaggcgtcactgcggggtgaactcacccgctggctgattcagccaaagacgggcgtcttcgtcggccatgtctccgcccgcgttcgacaactgctgtggttcaaagtcattcgctcggtcaaggacggagccgccctcctgatccattccgataacagcgaacagggcttcgccatccagagctacggcgataccagcaaggtcattacagacttcgaaggcattttgcttccaaaaaccccgaaatcagcgtaatatccagtatattccccacgcacgtgggggtgaaccgaaagcccatgaaaatatccgcaattgggcaaaatattccccacgcacgtgggggtgaaccgtccgcccccggatccgaagac

SEQ ID NO: 798 - DNA, 6134 bp, Artificial Sequence
  Synthetic Oligonucleotide
gaccggaggcgctgccccttcgcggcgtcgcgcgtcttgttgaagtagacgtagccggtctgaatcacggtgatcttgtctttatcaaggcgaaaacctggcggctgttgtttgtcctcggaattacgcgcggggcgccagtcgggctctgcccggcgttccagccaacggcgtaagtgcttctcgtccgaggggactggaacgtgtttcccgatccaccctccatccaaaggctgctcctgagcgtccgtcgattggcggctgaccttgcggaccggattggcggtcagaaggaaatggaagcggctgcctgcatggatggtcaattccataggacgcggttgggagggcggcgccgccagcagatagtccgcgttatggaaggcatagtcccaatccggctcgatagccgacaagacaacgattgccacagatgcgccgggcaacgggtcgacccggaacaggaaaccgctgtcggaattgcgtggcgagtgcacgtggcgcagcgcttcagcgccggcctcttccgccttcttgtccgcaatatggcgagtttccgggaaatcgtcaggcgaatagggtttcagaaaatccgggtcgttttccttcttgcggcgttcccgcgagggaaacgccatacagagccgttgatgaacgtggtacatgttgcgcagccaaagccgccctgggcggggccggtcggggttcccccctacgtcaatcaggagatgcgacagatacatcattccacctcctcggcggccagtttgcgccgccgtgtttccagggagcggaattcgatgatctcgtttcgctttcggatgatctgctcgcgccactgctggtcttcggggttgatgcgatccagacccatccccaagccgtactcgatcatcgtcacggcatcgtggcacaggcgacacagcgaacgcaggtcttcgcgcgtttcatttccgccggcacgctgataggtcacatgttgaaccgtcgttgcgggcgacttgcagaagacgcagagatggttgtcatggtcgagccgctcctgacgcttcttcctgtattccgtgttgccgtaatctgcgcgtggccgaaccggccgtggggtttcgctctgcgcgggtcgttccgcgattcggacgtcgccctctgcacccacctgcaatgtccgccggataacgaacctcggccgatgcgagggcggctcgaacgtcagcggcacatcgtaccagatgagcgcatcgtcgggcgcgtcggactgttcggtcgagggctcccaatccagcaggcaatccactgtcttgggcggcctgtcgtccccaagccgtggccgccaaggaatggaggtcagcccggaaaccaaatcgggaaaagcgccgggcgcagattggagcaacgggcgcgacggcgggcaagacttgcgccccaagtagagcgtccacttcggattctccattgcttggcccagttcagcaatcagcgtcggctcgccctgcagggcgacgaggaaagaggcatcgcacagatactcgcggcgggtgagtatcgcaccgggcttggtctttccctcgccttcggcaatgcgcatatccatcctggcccccacggtatggtaatcccaccagcgcacgcccggtgcgtcgatccggacgcccatgcgtaacgcgctgagcttcggaagccactcggccccagcatcgggacgggacacgcccaatgccgcgcagagcatcccgatcactcccgattttgtcggggcctccgccgtccggcggatgacgaacttcgattcctggacaccccacgcctgcatcggcccttccaagcggaggaagagggtattggcgctcatgcagccacctccgagttgactaccaccctctgtacttcggcccaatcgagctttccagggagggccttgatcacgcaacgaaccagttcgtccagggactcgacattgttttccttctcggtcagcgcgacttccttctgtttcttttctccattcttatcagccttgatctgcgccaccaactcacatcggagattgggcgagaaccaaaagcgttgttgcggcttgccatatccggtgtccaggtcgtggatgtactgacccaactgggcaacgctctgcaaaatgatgtcgcgctcgccctgagtcaccggcttggcaaatgcattggcatagctgaccggcgtgttcctgatctcgatgagcatcccatcgggtggattgtgggcggcgaaactgttctgcttgcccgtgggactcaccatcgctgccccacgaatgaacgccccaaccgtatgggcggccaacttcttgtgatcggtgccaaagccttcgagattactgaccagcgtctcccaatggatcgagaaatacttgtagaagcaggccgaggcgaacatggcttcgtccacgtaggccgcccccccatcgtcgcccgggatatcgtcggcggccacaaagtagtccacttcagggcgtgcttcatgcgttgaaatggcgtgagccacctgaagggcaccctcgaccgtcaaatcgagtcctttccatactcccttatccttggacccctcgcctccttcctcctttgccatggaggcgtcgtctgatctgcctttcttgcttttctcaggtttcttcggctccagcattcggccacagagcgccatgtccggaacggcggtatgctcagcgatcagcttcgcgaactccgccgccagtttttggtcggattccttcccgccttgtttcaagagtctggccatctcttcaatcgctttgcggctcgtgtaaacgcgtccagcgctcttctcctcattcttgagattgtcctcatcgccgccacctctcttctctttgggcgcgatgccacagattttgagaatcctcatcgccctttcaaactgccctgaatccgcgtcacttccagcgatcaactgggccaatctcctcgtagctacgccgccgagcagcgctttgaactcgtcgctcatgcggatgctgcgcttgatgcactggctggagatgcgcgagcgcaggacgccgccaaagtagcaggtcttgggcgcgcccaggtcgtcccggttcagattggccgggctgtgattctgaatggcgtgaatttcgatcagcatgattatcccctttcgttatatcccaagaattgctccgcccacctcaggcgggtagattcgtgttcccattgccatagatcatccgtaagcttcgcccagtccactcttccgtcgttcgatgcgacctgcgccagcgcccaccgaaggggaggttcgatttgatcgagcggcagcgtgagtatccggtcgaatgccttctggaatcgttctttcgcagggtccttgttgggctgacagtgccccaactggcgagcgagagcagcaccgggcaaatgttcgataggacaacaggcgtagagcttcgcgaccagccatgccacttcgcgcttgggtgcgcgttcgttcctctgccgcagtggccaccaaaggccggcgaacaaatcgaatccagccaccgactcgtcaagtccgcgcccggcgtgcgcgcgaagcagtccgagttcgccgggcttcaggcgagtcaagacatcaacatattgctccgttgcagtcacttgtcccctcctttcttcgggttcggcttcttggactccttcgtcccggtctgcatatccggtactgcgtgggcaatctgccgtcgccgctgcaacgcggccaccgtaaagccgggagaaatcgattctgcgaccacctcgatcatggggcggtattcctgtgcggcccgttcccacgccgactcggcgttcgcgagcaactcgtccagtttctccgcgactctgccttcgacgtggggacgaatgcttgcgaggcttgccgaaatctctacatgctttcgggaagacttcttctcgccggatgggcggagtctacgcacaagacttgtaccttccttctgccattgctcgagcgcagcgacaagctcgtgaggttggccaggtggtcgggaacaaggcactaggcattcagtcgcctccaagtacttgtcgttctgcaccgttgagaaacctaccacccagagggctcttgcctcactcgattcttgtccttccaaaactccagccacgatctttgcccactggcccgccgcagcatcagccgcaccaagagtgttacccgcgtgcaaagaaatctcctcacctttggcggtcgtggcataaatcacatgcgggtcgcgccaaatgcgcccttccgtcttcgagcttcccttgccgtcgaaaacacagaaccgaatcagccgctccgtgcgcccacatgaaacacaaggcgatggcggttcttgagggtcatccaaccagacactgcgggggagccatgtcatgcccgtcagcagaggcacctcgccttgtcttgggagtgggacattcgcccgctcccacgctggcgttcccatgtttgtaccgattctatcccaggagagccgaagtgttgccgcgagtgaggccccaaccggtatgacatacaagggcggtttcgcgttgaccccgggcgatttgccagtgcccggcgtcattcctttacctgccgacgtggcaaaaacaggcagccgtatcagccccatcgcgcagcatgccgggcacaatccgtctaccgcgtcggtcgagtgtcggaagtgccatttgtttgtgccacttggcacttcgtgaataaggtaattcgtggtgtgttcggcggcccttttcttatatgcatcattttgacagaaccgctttccactgccgagcagattgaaggagtccctgttgtcgccgagtttcttgaaccactctgggggaaacgagacgcccaggttcatacgcgcattgtccgggggactccctttgcaccaatacagcagcgcaagcaggaaccgcaggattgccacgcgatccatagggttatttgccgcgatctgtcgaatccggccggcgtcctccaatgccttacgaatcccgacacgttcccatcttccatcgcggtaaagcacgggaatccattgtttgtcgagcaggttgtagtccatcgccgtctccgcctcaaagagtctcccaattcttccccgaccgcaattgactgggacttcccacgtcgcgacctcgcggcactgcaagcggtcttgcattccgcctgaatcctaccgccccaatgggacaagagcaaggggattcgatctttcgatttacgaattgtgatttacgattgctgatttgctccgtgacctccgtgtcctctgtggtgaaaaaggcagtagtcgatagtctgtagccggtagccggtaggcggtctgtcgtctgcctcccctccgtgtccccggccgcccgtcgctgggctacccctttttttcgcctttttgcgtttttggcggctaatccggtttgcttgcgacccgcgaggtttttttcgacggggtttccttagtcccgccgggacaatggtttaggaactaacaaaataatcgttctttgtggaaatttattattgacactctatcatggtggttgtaccattttaggcaaggctgcctgcgtggggcagccaatagtgaatcgtaaatagtaaatcttgaattcggagggatcatcatggctactgccgcacaagtcgaagccaatcgttccaacgcccagaagtccaccgggccgcgtacgccggaaggcaaggaaaaggcctcccagaacgccctcacgcatggcctgttcgcacgggagggagtcattcggggggaagatgagggggaatttgagatgcaccaggagaggctgctcgaccaactgaacccggtcggggcgctggaggagattctggcggagcggattgtcgatctctcctggcggctgaaacgcgctggccaggaccagagcgaggcctttgcggcgctgtacgaccggcagacggcgggggccgaggagcccccggagccggccgagcgtgcggggatgatcggccggatgatcctggaggacttcagccgggacgcggtcctggagcggctgctgcggtacgaacggcggatcgagagcagtttgtaccggaccctgaacgagctgcggcgggtgcacgaccaggtccagaaggcg

SEQ ID NO: 799 - DNA, 6086 bp, Artificial Sequence
  Synthetic Oligonucleotide
acaattcggttcacccccatgtgcatggggacaacgtcggcgtggcgggcggcgagtgactgacgttgcggttcacccccatgtgcatggggacaacacagtgcgtatgccactgtaccggcgccgaagtccggttcacccccatgtgcatggggacaacgtgtgcccagctcttttgctgccgtctcgaaccgcggttcacccccatgtgcatggggacaacctcatcgtcggccgccgcgtcatccggcggcccggttcacccccatgtgcatggggacaactttcgcccgttccccgccgagttttgatgtaagcggttcacccccatgtgcatggggacaaccccaacaagttgtggcgatgggtcgcgtcagccacaacgggtaggggtcaagaaggcaagtcgttcggctcttctgcggtctgcgctttgggtcgctttttcagggggggaatggccaccagccgcagcccctcgaaatcgaccatgcttcgggaagtgtcgccgtgcgtgcgcacgacaaacccttgctcgttgggcgagttccacacctgcaagcaggctccctccttgcagccctttacggcacgttcccaaagcttatcccgcagccgggcggtcatgtggccaaggaatatcccggccttcggctcgatcatccagcggctcaggtcgccccgcagacgcggcggcacgcgctccaggatcagtacaaccatcaagcacctcgcgaatatcaggcaggacgcgttccagcagccttgtccgctgaaacaggtcgcggcacgcctgtcgtgcccgcgactccacgtgttggtcgctttccgccaccatgctgaacactaggggaacgatcatgtctaccttgtaaaggtcggcgatgtcataaacgaacgacagggccttgcccgtgtggatgaaaccgatcgccggggagtagccggcactaaggattcccgcatggacgatggcgtgaaggcatgcgttggcggccgacagcccgcgattcagcggatcggcgttgttccagtcgttggcgtcgtaactgcggcccttccaggcgacgccggaggcttcagcggcgcggcggtaggcttcgcgcacgcggtagccctcgcgcccgcgaatctgttccagggagaagccgggggcgagcaactcgccgaatcgcttctcatacatccgccgaaccacggcggcgcgagattccgggttgcagtacagctcggcctgatgcaacaggttggcggcatgataggtgccgccgcgcccgtggctgtagaaccgcactccttcatccccgcaccaggcgaccaggcagttgcagtcggccagattgaggatggccgcgtgggtgatcgtggttcccggtcccagcatcaagagcgcaaggctggcggccgggacgggtacgcactccttttcggtcacgtaggccacggaggtccggtgctgctcgatgtgccccttctccaggtaaaggaaactcaagcggtcctcgaatcgcgtcaactgggtcaggtctttcattgcgaagccctcgctaggctgagcaggccgaacccgaaggccttggccgggccgatgccgcaaatcagggtctgccgaaaggcatccgggtcagtgacggtgagagtcccgtcgtaacgcgccgagcggaggcgcttcccttgccctttgccctccttgttgatgtagacgtagcccggctggacaacggtggcatccttgtctaggaagaaccctgccgtttgtgcgcggcgattcagccagtcaagaagctggtcggtcggaacgggaacacgctttccgatagactcctcttttgcatccggtgaatgcttgctcaggcgtctggtcggatttgtcgcgaggcggaatcgaaggcactggcctttggagaagtgtggctcgaaggggttcacctcagggggcgctgccagaaaacaattcgcattgtgaaaggcatagccccagtcgggctctgtggcggactgcacgaggatcaccgcccggccgttggggagagggtcgatgcggaaaagaaagccagctttgtcgttgcgtggggagtggacttgtttcaatgcatcgtggccgacttcgtgcttcttttggtcggccaggtgtcgttgctcgggaaacccctccggcttgtagggggcaaggaatttcggatcgcccttcttctgcggatcggacggaaaggccatgcaaaggcgttgatgaacgcgatagaggttgcgcaaccaaagccggccgggtcgccaccggtcggggttggcgcccgtgtcgatcaagagttgcgacaggtacatagctattcgacctccccgggcagtttgcggcccaaatggcggcggcgtgtttcgagggaccggaactcgatgatttccttgcgcttggcaatgatctgcttgcgccatttctcgtcttcgggattgatgcggtccagccccatcccgaggccgtactcgatcatggtgacggcatcgtggcacaggccgcaaagcgaacgcaggtcctccagggtttcgttgcccccggccctccggtaggtgacgtgctggacggtcatgcgcgggccgggcgacttgcagaagacgcacaacccggcgtcggcggcgatccgttcctcccgccgcttcccatattcgctgttgttgtagttcgcacgtgggcgcggcggtgcaggcgtgtgttgctggatcgggttgccaccagtcaccggcacctgatcgcgcaggacaaagcggggctcgtggaccggcggatcgaaggagaccggcacgtcgtaccacacttcggcgtcgtcgggggcgacgtcgccttccgaggcgggccgccattccacaatcgcttccgccgtcgcgttcggcaccttcgggtcggtcttgtaccgcgggcgccaggggatggcgccgagcgcggcattcaggccgtcatgtcgagctggattctcccacgcttctccatcgcggggcctggcaagcaccgggacggacggcgggcaggactttcggccaagaaagaccggccactttggcgacgcaatcgccgcggcgatatcatggatcaacttcgcatcaccctgaagggcgacgagaaaactcgcgtcggccaggtactcccggcgcgtgatgagcgtgcccttggcaccggtcttcagaccgcccccagcggttgtcatcccgatccccgctcctaccgtgtggtaatcccaccaccgcgtgccttgccggtcgatgcgcacacccatcgcaagcccgttcagctccggcaggcgttctcgcgccgcctggcgcgacaggcccatcgcgcagcagagcaggcccagcacgccggacttggtcggcgtatccatggtccgccggatgacgaactttgacgtgtcgccccaggcctggagggggccctcaaggcggaggaagagcgtgttggcttcggtcatctcaccgcctccgcaggcgtcccggctgcccccatcttgtccatgaccttacggacgaactgatcgaactcaccgaactcttcgaaatcgacgacggattgctcctgctcgtgttccttcttgctcttgtcgatccaggtaaggtggtggcgcagattcggcgagaaccagaaacgttcggcctcgatgccgtaacctgcgatgagatcgtgggcgtactggccaagtctagcgatgctctcgccgaccaggccgcgttcggacttttccggcactggatcggcgaaggcgttggcgtaactgatgggtgtggccgaattagttttgacctcgaccagcactccgtcgggcggattgaatgctgcgaatgcgtgctgtttgccggaggggttggccttggcggctgcttcaaggaagcagcagactgtcttgcaggcgaggtcggcatcgttcgtcaggttcttcttcaattgctcgaagtcaatgacgaagtgtttgtagaagcaggccgagttgaacatggcctcgttgacgtgggccgcgccggcctcctggccgggcaggtcgtcggcagcggtgaagtagtctacctcgttgacgaccgcgtgagtcgagatggcatgagcggcggaaagcgccgcttcgacggtaaagttcaagtcgctgaaaacgctattcttggcaacctcggtcatgcgcccgtttagagcgatgtcgggcacgccggggttttccgccacgtacttcttgaactgctcggcgaggtcctttgccttcgatgcggtcttcaggtccttcgccatcttctcgattgtcatcgtagagaggaagagaagcatcttggatagcgcctcgacagccgcatccccaccgtcggcttctcctccgtcgtcgctttttctcttcttcttgcttttcgccttcacgccgcccagttccaaggcttccgcagcaatggcatcgagcttcttgatctcttcgtcctcggcgggtttttctcggagaagcctggccaacttttcgggcgtcaggttggagctttcagcatgggcgatccgcgccagcagatttgccaacctgcgcgtacgcacacctcctgcactctgcaaagcggccgcgaactccgggctgcggcggatgctgcgtttgaggcactggctggagatacgggcgcgagtgacgccgccgaagatgcaggtcttgggcgcgccaaggtcgtcccggttcaggttggccgggctgtggttctggatcatgtggatttcgatgagcatgcttatgccctcctttggggttgatgattcgccgcattcagatactcgcaagcccacaagtcctgtggcgtccggtgagtctcttgacaatgtacaagccgttcatgagcgttcagccgactcttctgcggtgtgtggtcgggattatactgtcggtcccagagccagaggtcatcgagcagttgcacccagtcgatccctttcacatccttcgcatgcggcacgcgccccgcgacggcccgcgcgacctctcctatcgcccattgcaaatgcggttccaggcctgataggggcgagcagagcagcacatcgaagcgacggcggtacttgcgcgctgctatgaactggctcttggcaggttctgagtcaggcacggtggaactgagcagtcccgcgccccggcaagcagggcgcggcggttcgcagtggcccaagacttcgggcaaagagggcccggcgcctgaatcgggccggatgtgcgggacgcggaacgcgccgaagagcttggcaacgagccatgacggctcccggcgcggggtcgccggactcttcgcccgtagcggccaccagaggcccgtgaaaaggtcgaaaccctggagcgttgcgtcaaggggccgtcctgccagacggcgcagccgcgagcgctcgccttcctgcaagtctgaaaggctcttgatgtacttagcggtctggctcattttgagcctcccttcttgcggccacgtttgccctttttgcctgtgacttgttccgtgtcggacgagtggacagcctcctccgacggcgcttcactcttttctgccttcatcagtgcagactccaaagatgatcttgcccgggccaaggcatcccgccgacgcagcggcgagccggcaatagaggaacggccgacttgcccaatgacccgggtgagaagctccttaaccgattgtcgccagtcctcaacgttgtattgccgcaatagctccctgaagcagttttccatctcgacatgcgtctggccactgagcgcacacagactcgaacgtatctcgtgccccagggactttggtccatgcaaactctcaacaatcgcgtgccctttcggaggcttcccccatactgtttccttgttccttcctttgcctgtgcgcgcacttactgtggcccacgtcgctcggcgcgcccagtcgagttccgagcggacggcattcatgcagtcctggtcaagggcggccatgaaaagcgaatgtgatgcgatatgtttgtaaagcgcttgtacggcggcaacaaggaccgtctcatacttcgctccattctgatccgttgtccggttcagaatcccctgcatgactgaactccacgtttccgcgtggtg

SEQ ID NO: 800 - DNA, 6015 bp, Artificial Sequence
  Synthetic Oligonucleotide
gggcgtggggaaaaggtacacggatatctctgacgcgcagtacgagccggttcacccccacgggcgtggggaaaaggggtgctatgagcaaaaaaaaatccatgggtccggttcacccccacgggcgtggggaaaaggctaaagttgttttcagtagaatcgcatctattatacctgattcttccgtataaggtcatttttcgttgggctgtcgcggcaggatgataccgtcgagatcgacaaactggcgcctggtgttaccgaaggaacggatggtgtagccctgttcgttggcgtcggagtagatgaagatgacaccgccgttgcggatttttttacagcagcgttcccaaagtttttcgcgaacgagggcggagatttcagcgatgaatacgccagggtggggttcgatggcccagcgggagacttcgccccgcagggcgggcggggcggagacgaggatgataaccgtcatggcgtggtttcttccggggaggtgggatcttcggactgaccagtgttgggagggttctgctgttccatgagttcagggtcatagttctgggcggcggggcattcgccctcgtcgggatcccacagggccaggggagcgtcggcgatgtcggcggcggggtctcctttccgggtcatgccgagggcagcccggatatcgggaatgacccggcttagcagcctggtctggtagaaccactgcctgcaggtcatgcggaccacccgttcgagttcggacgggttttgcgcgccgagctggaaggcaatagggatggagtactcggttttgtacaggtcggcgatgtcgtaaacgaaggacagcatgttaccctgatgaataaagccaagggcaggcgaaaatccacccgcgagaatagcggcgtggcagagcccatacaggcacgcattggcgacagagagcgagcgatttactggatccgcatcattccagttgtcgaccttatagttacgccccgtccagttcacgccggtctgctgtgcccaggactcgtacacccgacggacgcggcgtccttccatggcgcgcaactgggccatggagatgcccggcggcacaggatcggggaaacgcacgccgtacaggcgcacggctacctcgaaacgggtctgtggattggcccacagggtcgcctggtgatacaggttccgcgcgtgacgggccttggagtgtccgaaggcgtagcagcgcacggcatcctctcccgtccacgcaaccaggacgccatgttcaatcagaaggctcatggcggcatgggttacgctgactcccggcccgaacaggagcaggttgatgccggcgcagggcacggcggttttcccactggcgtcgatcaggacgatggcgtgctcgtcccgttcgacgatgacgtgttccaggtaagcgtatgaccaggaatcggtgaagcggggcagggcccgcaggtcatcggaaggcgccattcgtacctgttcctttcccgatacgttacgtaccgtccacgtacgggccggacggccagttaccccaaggcatgcttcctgctcgaggcactaaccggatgagccggcgggggcgggacggatcccgcccccaccggggagaggtttcacggtttcgcgatggtgagtagtccacaaccgaaggcccgggctggcccgattcccgaggcgatggtggcgtaaaatgcccgcggatccgttacttccagcaggccttcatagcgcgcgcagaacaactggggaatacaggccctgcctggctgttccgatccgttggcattcgcgaaacccgcgcggttcacgtagtagtaatttacctggatattcagagcttccgggccgggcacgaccttgaagcctccggtctccccccgccggatcagccagtcgggcaactgttcccgtggtacaggcacgcgcgtgccattgcgggtgcgacggtcgcgtcgccaaggcccggagagatccccggggggctcgaggatcacgctgtccgggttttccctgcgttgcgccgccgtgagggtgccgacctttctcgtggcattggccatgagccggaagcggtagcgttgtccggactggaacaccgggttccaggatcgcacttcagggggggctgccagcaggtaatccgcgttatgaaaggcgtaatcccagtctggctcgatggcggactgcaccagaatgaccggattaccgccaggctggggatcgatccggaagagaaaacccgcctgccccgaccggggtatatgcaggtgttcgccgaagtcttccggccggaagggctggagaaactggggatcggtggttttgcgcgccggcgcggggaaagccatgctcagccgctgatgcacccggtacacgttacgcagccagtttcttcccgggcggatccggtccggatccttcccggcgtcgatcagcaaggtagacaggtacatgcccggatcctcctattccttgaccttttcgcccagcaggcgcgcgcgggtttcccgggatcggaaccggataatctctcttcggcgctgaatgaccaggtcgcgccagaagggatcttccggattaatccggtccatgcccatgttatggccgtactcgatcatcgtgcacgcgtcgtgacagagcctgcacagggagcgtaactcgtcgacccgttcgttaccccccgcgtggcggtaggtgatgtgctgtaccgtggtggccggggccttgcagaagacgcacaggccatggtcctgctcgaggcgccttgcccggatattccggtattcggcgttggtgtagtccgcccggggcctggggggtgatttaggaagttcatcttcggttttgttggtcagtcttacctgtccctcccctgttccacattccagaaacccgcgcgcgacgacccgcgacgtataggcgggcgcggggggaatgaagtgcacgggcacgtcgtgggcggtatccaggtcacaaggctcaaacgccacgttacccaggggccagtccatgtacacggtaagtacatccggttttttctcgaaagcgtaacgctgttcccacggcacggagagcagggcctcgatcgggttggccgtggctcgcaacgatccctggtccttcaggaagaggggtaccgaggggacgcaggactttcggccaaggtacaggggccatgtgggctcgagcagggcgtcatgtaactgccggatgagcgagggctctccccacagggccaccaggaacgaagcatcgccaaggtactcgcgaagggtcagcatcgtttcgccatgacggagcccgccttccgcggatcgccgggagatgccgcccgcgccgaccgtgtgatagtcgagccagcgggtgccggggcgatccacccggacggccatcttgagactggccataggtttcatgacttccggggtggcctcggaccggggaatgccccgggcggcgcacagcaggccaatcacgccagacttggtgggcgcgggggccacgcgccgaatcgcgaagcgggactccgcgagcccccacgcctggaaaggtccctcgaggcggatcagcagggtgttgtgctcggccatggctcaggcctcccccaccggcgaatggttcacaaccgccgcccgcgcctgggtccaggtcaggccgggatcaatggcgggaatgagggcgtttaccaggtcgttgaggctgctgaacgaggcattgtcgtcgaccaccgtggtaccgttgcactggaggggataccgcaggttcggcgagaaccagaagcgtttttctggtgctccgtagccgttatccaggtcttgcacgtgcatggccagccgggcaatggattcggcgacgaggtctttgcggtcctccacgtcgacgggttgcacgaaggcgttggcatagttgacggggtacttgcgcaactccacgagaatgcccagcggcggattgtgcgcggcgaaactgttctgcttgcccgtggggttcaccagcgcggcgccccgcagaaacgccccgaccgtgtgggcggccagttcgcggttgtcccggagattcttgagcagttgtggccaggagatagagaagtacttgtaataacaggcggaggcaaacaaggcctcgtccacgtatcccgcgccgcggtcctcggccccgggtacatcatcggcagccacgtagtagtcgatctccttgcgcgcggtgtgcgtcgagagggcgtgggcggcctgcagggcggcttcgaccgtgttgttcaggtctttccaggcccccgagtcagccttggcttcgagcatgcggccgaacaaggccatgtcgggcacggcggtgtttttactgatgatttcagccactttccgggccttctcatccttgctgcccgaagtttccgccaggaccttcgccatttcgcggatggcttccctcgtggtgtacacgagcatcttgccttcttcctgggattcggcgtcttcagcctcttccccggccttgttttttttgcctcccctggtcctctgctcgaggccgcaggcgttcagcacttcggagatgtccgcatcctttttccccaggcgctccagttcctgccggagcaactggcccaggcgccgggtgcggacgccgccgagcagggcgctgaactcgtcgctcaagcggatggaccgcttgaggcactggctcgaaatccgcgaacgcagcacgccgccaaagtagcaggttttgggcgcgccgaggtcatcgcggttcaggttggccggggcgtgattctggatgaggtggatctggatcagcatggcttgttctcccttggttctggccggttgggcacggttcatgatccggtttcttcaactggcaaggtttcttcttcctccgggttggcgtcacgggcctccccggacaaggtgttcgcgaattcctgggcccagaaaagccggacggaatggcgatgccagaccgacaggtgatcgatgagcttgttccagtcgataccgggattgtcgagggcatcggccacggtggcaagggcccattccaactcaggctcgattcgttccacgggggtgttcagcaagagatcgaaacgatccacgatcgattcgcggatttcgtttccccgtttcgcattcgcgcgggcctgttgcacggccgcgcgggcgagttgacggggcaggcggtttccgttttgctggggcaggggcgtccagccgtaaagtttgcacaccagccaggcgacatgccggcgaggcgtatccttgtggtgctgccgtatgggccaccagagccccgtgaacaggtcaaaagcgatggcatcgcgatcgatgccggtgcccgcgctgctgcgcaacagcgagatgatcccattcttgcgatctacgaggcgggaaacgaatttcttcacgcccgcggaggcttcgcgggtgtactccttcatgtccagaaaggggcgagactgcaggtcgcgctggccgatcacgtcacgaacggaaaccccagggaaaaagacaggcgccatggaccgctcgggaaccctgtacagcgcggcgggttgctgttccagcagttcgcgccagtcggcaatgcgccccacctccgatggataaccggcctgtaccagcgcgaattttgccaggcccgattttttgacctgaccggccctttttttcctggcctcttcatcccttgcctgggcctggacgattgcacactggaagtgatacaggtgttttttccggtcttggttccattttgtcaacaggatcttcagggttggggtggatgcctccggattcacgtcgtccggaattgtccctggtgctccaaggtcgatccggatggcccgcgcgtcctggaactttgcctggttggtgttgaaatcgaccaggagccatttccggtggtcgcgccacggcgcgatatgagagatggcatcgtgaattttgagcaggttgtcctgccattgccgggaaagagcgtccggatattttgacagattgaacaagtcga

SEQ ID NO: 801 - DNA, 5957 bp, Artificial Sequence
  Synthetic Oligonucleotide
ggcctgaccgcggattgcacgaggatcaccgcccggccgccgggccgtggttcttcccaacgctggtagggttgaaccggaaaatcgatgcgaaagaggaagccggaatccgcctggcgttctacatgaacctgttgatcgccaaaatctttcggttggaaaggttggaggaagtgggcgtcctcggattttcgggaggcggacggaaacgccatgcacaggcgctgatgcacatgatagaggttgcgcagccacaagcgcccgggcctggggcgatccggattgtcgcccacgtcaatcaagagagaggacaggtgcatagctattccacctcctccgcggccagacgccggcggcgggtctccagggagcggaatcggatgatctcgtcccgcttccggatgatcaggtcgcgccagcgcggctcttcgggattgatgcggtctaagcccatgcccaggccgtattcgatcatggtcacggcgtcgtggcagtagcggcagagggagcgcaaatcatccgggtcttcatggcccccggccccccggtaggtgatgtgatgcacgtgttcggctagagacttgcaaaaaaggcacagatgatggtcgtggtcaagtctttcctgccgccgcttgcggtattccgtgttgcgataatcggcgcgggtgcgtgggggcgcgggcgtgtatttctgcactggctcatctacaggccctacctcgccgtcgtcgcccacccgtaattccctgcgcaggaggaagcgcggctgatgcgccgggggctcgaaggaaaatggcacatcataccagatgagggcgtcatcgggggcgtcgtcctgtgcggacttcggctcccagtcgagcaggcaatccacggtgggcggcggctgatctcccttgagccgtcggcgccagggaaccgcttgcagcgcggcaagcaaatccggaaaatggccggccggatgctccagcaaagggcgagatggggggcaggactttctgccgaggtaaagcgtccattggggcgcttgcatggcggcctccaattgggcaatcagtcccggttcgccctgcagggcgaccaggaaagaggcatcgcagagatactcgcgccgggtgatgagggtttcaatttccttggtcgtggcggtgcgcttgatgccttttccatctgccgtaagcacaccgattttcgccccgaccgtgtgataatcccaccagcgcgccccgggccggtcaaggcgtacgcccattttaagaccgcgtaaatccttcaggtagccgcgtacctcctggcggggtagacctttggcgcaacatagcaaaccaaagatgccggacttggtaggcgcctccatggttctgcggataacaaacttcgaggtgcctccccaggcctgcagggggccttccaggcggagaaaaagggtgttggctgccacgctcatggtcaggcctccgttgcagcggctttgccgacgtccttaatctgcgcccagtcgaacccgatttcttttaccagcgcttctaccaagcctcccggtttcccttccttaccgccgagaatgggaaatcgccattccgtcaccagcttggcggtcttctttttcccatcctccgatcgctcccaatattggaaagggaatctccacaacttcgggctgtaccatagcagagtagaatcaataccgtaggcctggcggattgcctggacatgatcagccagacaggcgacgctgcggccttcgatgctcttttcatcaggcgcgtcatcctccggcttgccgatccgctctaccggctcagcaaaggcgttcgccaagttagtcggcctcttggtcttcttgatttcgacgaggattccgcacggctcgcaatgggaggcgaagctgttctgcttgccgctgggggtagtcagagcggcggcgcggatgaagtggccaagcgttgccgccgcgagcttggttgctgggggctttaattcctccacccacttttggtgaacatcagtacctttttctttcggttctggcccggcgaggttggtgatgagctgatcccagtccaggcagaagtatttatagaagcaggcggagttgtacaacatctcacccacgtgaccggccccgccgccggtcttgcccaagtcgtctaccgcggtgaagtagtccacttcattgaccaccgcgtgcgtggagatcgcatgcgccacctgcatggctgcctctacatcctggaacgcaggcgacgtggtcatccggccgaatagagcgatgtccaccgcatcgtaacggttggcggatgtaaggatggccaagaaatcatccttatcctttttatttattttgggaggttcttgttccttgatttgttttttctctgtttgggagggcttctctgtcagcgacttgaaaagtttattattggaagaaaagagagctgcaagacgttcagcgataagtttcgcatgttcaaggccaggttgaccgtcttccatctccggttcagcatccgcctcctcgccttcagcaggctcaagcaatttctccatacggcacttggcgataacccaactgctattcacgatcttcttctggtcctctggcttcaggcccgaatcggcaagaaactcgcttaacatctcctggaatcctaccacggggttaaggaaatattcatatgcatcattatgcgatttttttagttcttccagcttctccacaaagtatttggcatgacccggtccgagatggatcaattgggctgtctttggccgtgggtccgccttgtcatcattttccttcttcttcgcctctttatctttgctggccccgatacgttgggctgccagcacaatccgccgatgctcgtccacgggaatcttcgacttcttcaattcttcttccaccaacgaaggaaaacacttggtccggcagccgatatgcccggccatggcttgagcgaacatacccgccccccggttatgaacatcctcgggattggcgggctggcggatgctccgcttgaggcattgactggagatgcgggcgcgggggacgccgccgaaatagcaggtcttgggcgcgcccaggtcgtcccggttcaggttggcggggctgtggttctgaatcagatggatttcgatcaacatagaatattcctcctttcactcggttatttggtgaattttaggtattgttcagcccagatatctcgaatatcccgctcaagccggtgttcttcgccgcggtcccatatcgatagatggtcggtcagttggacccagtccatccccttggcccgtccggcggcaaccgcgtcgcgtacggcggccagcgcccaccgcagatatggctccaggcccgccagcggcgtgcccagcaaggagtcgaagcgctggcgaaagcgtctagggccatccagtcccttcaacctgcgctcttcccgtcccaagatcaccgccagcgcggtgggcccgtcgggcttagagggttcatgcggtatcggaaatgcggcataggatttggcaatcagccaggcgatttcccgccgcggcgccgttcggttcttctctcgcaatggccaccacagtcctgtgaacaaatcgaacccggccgtgtcttcgtccaatccccgccccgccaaagagcggagccgcgctcggtccccaggaccgaaaacgcgcctaaagcctttattggtaagttgggtaatgaaggccgcggtctgactcatcattcggctcctttcttccgtatgggaattataatttgtcgcactgttttaaaattgcttcatttactcgttgcctcgcctcacgccggcgcagcggcgatccggttgtggtgaactcaacgacctgatcaacatttcggcggagaatttcaccaacctcttctttccaattttccaataccttcgcttgagcattggtatcggccaggtcagcggaggctaatccttgggtcagtttttcgaacgccttttgcagttccttttcagccaggaagcttacggcgcaaagaccagaacggattgcatggccttttgccgcggtggagcataatgtgtttataacctcgtggtctttgggcctcttgttccaatcttttgtcctggctgaagtcgccttccaggttaattgtgcaagccactccacctcagttagtaaatctcgtataatattaagttccaaaccaggcatatttactataagtgtctcaacatgtttatagagggcctggctggctccaatcagggtgttgtgaaaatgcgttggatcagaatggttgacaaccggatattgtaaaattcccttcaacacagaacgccaggtggctgcatggtcttctaaagggtcattcgggcttggccatggcggtatgatcttttttactttccctttgttatccttgatatcgacccgtaacagttggggatcgtccgaccacggctcttttgaaggccgtggccaacctggacggaaaaggattgatttaaccaaacggtcggttggttcgccacaataacaacaaagtccagcggaaaaatctcgattgccctgtgtatccggtggcgccagcaggatacgtcgggaccgccaggtcatgcctttaagaaagccgagcggcgattcttcgatagggttttcccaaaccggcgcgtctccattgactggtgggctgctgggccaattaagccatagcgtctcaagcaggttcgccccagtgggaatggagtaggccggagtattgccgttgatgcaggcagtcatttgttgccatttcccaaattttcctgccgatgctacgctaggccatcgtagaagccccatcgcacaacatgcgagacaaagtccttcgtggaaatcccgaacgtgcctaaaatgagtgatgttggtacccgacggaagatcgtgcaacaggttagttactgcaactgcattaccatcaacattatgatcttggtagaacctattttcatctcccagtaaattgaataaatgcttattgtcatcaagttttttaaaccatttcttgggaaatgaaccgcctgattgtgcattcgcaccatcagaattcccctggcaccaatacagcagcgccaagaggaagcgcaggatggccacgcggtccatgggattgctggccgcgatttgacgaatcttgtcggcttgcgtgagagccgtaataatgccgacgcgattgctattcccttttttccagaggactggaatccattcctcttcgagcaggttatagttcacggcttcctcctctcttttcttctcaaaatgtccgatttatgttcgtgacagtgagacttcgacatattccccatgtgttcgggatcatcactgagaatatcgcccccccaacttgaattgcccggcgaactgccggcagagttctcggtgaacttcattccacctgttgcccccgcactgatctttgttgattcccctaaggtcgccggacctggggaaattcccatgatgccctccagcctatcagccagggcacgggggaagccagagaactgttcggtgaggagttccggcacgaaggctgcggtgaggatgccgtggcgaaggaggcggttagaaagcctccttttgttgaagagttctgggtcgagaggctcccaaccatcctgccattgcccctggaaggcagggctgaccttacccaggtcatggaggccggcccagaatgtcaaccactttccagcctgctccaccttgatacccagtctatcgctgatctctttcctgagttgccgctccaaaacagcctgccaaaggcattccgtaactgcggctacatccatcaagtgaaagagcagcggatgaaaatgtggctcctcagaactctggagcgattttcttgtcttggcccacaacgccttgtacataaattatacatccaaaaaaaattttccggcgttaatactttaaac

SEQ ID NO: 802 - DNA, 5939 bp, Artificial Sequence
  Synthetic Oligonucleotide
cagaacctttcagagggtacgagcgggaacatgtggaggcggttgcgctgccatgtacggcataacgtaaagaaaagtcagcaaagatattggagcaagaacatgaattataacctgcttcaggagcggtggatccccgtactttggaccaatggggaagttggtcgcgtgggcatcaagaccgcactgacggagtcgggccatatccgtcagatcgctgcgagcaatccgatggaccgtgtggcgataatccggttcctgctcgcggtgctgtattggtgcaagggtgatcctttgcccgacgcggatgccacttccggcgactcgttccctgctgattggttctcgaaactcgatgacagttttgactgcttcaatctgttgagtgatgggaaaagattttatcaatacaggaaacatggcgataaactgctttccgcgaattatctaatccatgagatacctacaggcacgaataaatggcacttccgacattcgaccgacgaagtggaaggcttatgcccggcatgctgcgccatgggcctattacgcctgccattgttctccacatccggaggacgtggcaagccgcccggcattaacgctaaaccgccaatttacgtcataccgatgggcgagtcgcttgcagtaactctacggctctcttggcggcagatttcggacctagggataccagcatgggagcaacccgatttgcaacttcctgagattggcgaggtgcccctgcttacaggattgacatggttaccgcgacgtgtgtggttggacaatcccaaaggacccgaatctgcctgcatttcatgcggtcgtatagagcacatgataaagctttgcgtgtttgcccccattgggagcacaaagactggtgaaggtagtccgggtcggatttggcgcgacccgcatgtcatctatgaacagagcggcaaaggtgatatcccatccctccactccctccatgcctatgatgctcttggcgccgctgacgcggcagctggccaatgggcaaagattatggccgggatgctccggaaagtggccaggaatgacaggatcagcttgtgggctgttggtttctcaactgtgcaaaatgataagtaccttgaggcgatcgaataccttgttcctttccccagttcacagaatcagactgaaacttttattgaaaagatcgaacaatggcagaagcaatgtggagggcttgttagaaatcttgttcgcaaagtcaaaacacaacatgtgaaagcgtcctcccgaaagcatgttgagattccgccagtgctagctgctattcgcccccatgtcgagggcacagtctctgcgaggatggacaaactgctttccggtggcgacaacgcatgggaacaagcggcggcggagtatagtccgatgatggacgccattgccaaatccctttcccctggtttcacgatctcggctgttcaacggcgaaaggagattgccaaggtgttgccagacatgcgaccaaaggccgaatcggcagagaaaacacaccgcaaaaagggaggcgagaagtgacccctacggagcagttcattcacgtcttgacgaaattgaaaaccggcgaacttggtctgctgcgctcccatgccgggcaagggctcgatgaaacagtggatggattcgacttgttcaccggtctttggtggccgctgcgggcgaaaaataaacccactccacggcgggagacggcatggctaatcgccaagctttatggagcatttcctatacctaatgctcggccggatgacaagaaagggacgcaactggctcagattctcggccgttacgaaccgcgcaagccattcctgagagcgcgttactgccattggttcgactccttgttgcaaacaccactgtcgaggttggagcctcacctgcgtagagcggtgtctgttgtggctgacttggcggataccggtttggtcagcggcatcgattgggcgcgactgctggatgacctgtcgatttgggaccgaggcgaagaacatcgtcgcggcatagacgtccgtgaagaatgggcctgccaatacctggaggccgcaaagtgaaaggagaatccggaaatgttaattgaaatccatatgatccagaaccacagcccggcgaatctgaaccgggacgacttgggcgctcccaagacatgctactttggcggagtcctgcgctcgcgaatctccagccaatgcctaaagcgaagcatccgaatgagcgaggaattcaaggcgttatgcggcggggttcgcacacgtcagttggcgaaattgattgcagagaaaatcactggcaaatcaggcgtgcagaaacgtgcagagaagattctcgaaatgtgtggcttcaagccgaagaaggcaaagaaggaaaacacagaggaagatgattccaaagatgatgacaagagcaaaatgcttgtctatacaacccgccaagcgattgaggagatggcccaactcctgcaaagtgacgaggggaagaccgataaacaacttgcactcgacttcgggaaattgatcagtgagcgagtggctgtgccggatatggcattgtcgggtcgcatgttggagcctgacaaatcctctaaggatatatggcaacgacttgacaccactgtggaagctgccctccaagtggctcatgccatttctacgcacgaggcccgcccggaggttgactactacgtcgccgctgacgacattcccggcgacgatgcaggtgcaggctacttggacgaagcaatgttcacctctgcctgtttctataagtatttctcgatccattggaaaacgttggtcgctaatctgaaggggaataaggaacttgccgctcatacagtcggggcgttcattcgtagcgcggccaaggtcaatccaactggcaaacagaacagctttgccgcgcacaacccccccgatggaatgttgatcgagattaaaaacaccccgataagttacaccaatgccttcaccaaccctgtgccggccaagtgcgagcgcggcatgatctcgcagagcatcgcgcaattgggccagtatgttttcgatctggatatcggatatggcaagccgcaaaagcgattctggttctcgccgaaccttcgattccccttaaggatcgtcgagaataagcaggaaatcgaaattgccgaacacaatatcaaatcgctcgacgagttaatccccgccgtgatcgccgccatcggctatgactgggaagcggttcaaaaggtcgtcgtgagcacagagacggcatcatgagtgccaacactctgtttctccgcctggaaggcccattgcaggcttggggcgatcaagaatcgaaattcgtcgtccggcggacggccgaggctcccaccaagtccggcgtcatcggcctgatctgctgtgcgttgggtttttcgcggcaggaggcacgcattcgactgccggaactcaatcaactcctgatgggcgtgcgaatcgaccgccccggtgtccgttggtgggactatcatacggtcggcgctggtatgcggatgcaaattgcagaaggcgagggaaaaaccaagcccggtgcgatgcttactcggcgcgaattcctatgcgacgccagtttcctcgtcgccatgcaaggcgagcctgcgctcattgccgaattggttgcggcggtacaaaacccgaattgggctctatacctgggaagaaaatgctgccctccttcccgcccgctgcttgaatatggcacgtgctgccagcccgtgattcatcgacaagaggcccatgccactaaccctcaaacgcccactacaggcgctttcccagacttactttcagccctcaaatctgtccactggcggttacggctcaagggagacaaaccgccggatatcgtgatctgcctgcttgactgggagccgacacctgaacagccggaagctcctgctgacgctctagtctggtacgacgtgccgttgacgttcgagcccccggcacatcatccccggttcgtcatccgccgcaagctgcggctaggtaaggacggagaggtcattattgcggagaaacctttgcaaaggtccacacctgccccttatcgcccgcgtgcgggctatacgaataccaagtatcgcaatgcccgtgctgctcgcctcgatgccgaccagcacctctgcgttttctgcaaggctccagccacaactgttcaacacgtcacctaccgccgtgccggtggagatgaaacggtagaggacctccgatctctctgccggctctgccacgatgcggtgacgatgatcgagtacggcctgggcatgggcctggatcgtataaacccggaggaaccacgctggcgcgagcagatcatcagaaaacgtgccgagatcatcgagtttcgctcgctggagacccgccgacgtcatttcaacgccgaggaggtggaatagctatgtacctatctttcctattaatcgatgtgggtgataatccagaccgcccacgaccgggaagactatggcttcgtaaccgttatcgggtgcatcaacgcctgtgcatggcgtttccgtcggcagacaggaaatccgatgatgctgatttcctcaaaccttatgatcctaaagacttcggctccaatcaggttcatgttgctcggaggaccgacaccggttttctatttcgcattgacccaataactagtggccgggtcgtgattctagttcagtctgccgtgaagcccgattggcactatgccttccataacgccgattatctacttgcggctactccggatgtgaagacatttgatccctgctttgcgaaagcagagcattttcgatttcgtctcgttgcaaacccgacacgaaaaatcgacaccaagagcagaccagatggacagcggcgcaacgggaagcgggttcccgtgcagaccgacaaacttgttgaatggcttgctaaccgggccgagtcagcaggattctccatcgatgagggttcaaccgcaattcagccgggttatgtctacatgaacaaaacccgggacggtaaagggcaattcctgcgtgctattcgttacgatgggacactgagtgtcatcgatccagcccgttttctggaaattctcatccgaggcatcggccccgctaaagccttcggcttcggcctgctctccttggccagggcttagagagtcccggccggcaacgctctttgacaatccggttagttaatcatcggtccaacatagcagtctcaacgccgaggttttcctctccaagcaatcaccttcagatcgcataataggtgcccagcctaggaggcacttatgaaagacctgcacgagctgccaaaattccgcgacaaactctcctacctctacatcgagcacgcccgcatcgatcgtcacgaaaacgctatcgccttccacgacatcgagggcatgacacccgtccccgttgccgggctcgctgtgctgatgatgggacccggcacatcggtgactcacgccgccgtcaggatccttgccaccaacaattgcctggccgtctggtgcggcgaggagaatgtccgcttctacgccgccggaatgggtggcacccgcggcgcctcccgtctactcaggcaggcacagcttgccgcagacgaggaaacgcgtctccaggttgctaagcggatgtatgccatgcgcttcgacgagccgattcccacgggcaccaccatcgagacgctgcgtggcatggagggcgctagggtcaggcgagcttacgccgaagccagcgaggcgtcgggagtccaatggcacggacgcagctacgaccgaggcgattggcgcgccaccgatccggttaaccgtgccctctccgccgccaactcctgcctatatggcatctgccacgcggcactcctctccgccggttacagcccagccatcgg

SEQ ID NO: 803 - DNA, 5882 bp, Artificial Sequence
  Synthetic Oligonucleotide
ccggacgagaaaaagcccttcaaagtcttcgacagaacgagtcatatcgccccaactccgaaatttaaaaccctgttcgttgttacttgaataaatcatcgcgcaactgcctgatttcgcttgagaacatgatttttcccatagtttatcgcgcaccatggccgagattttcccaacgaagactccagcttttggttccattagccaacgcgttaattcgccccgcaaaccggatgatacgcgttcaagaatcagaaccaccattggtagcctccgtttcttcaactaccaacgaatagtcgcggccaccctcctctctttctgtaatattgtcccacaaagcacccggagctgcggaatcttggtcgaatgaggcgtcattagtcagagttttttctggcaacatcaacaccttcttgacgtccggaattattctctccaacaaccgggtcgaaacaaacaggtcgcggcaaaaaatccgtactcgtctttccaagctacctttctcttctgctgccgcacgaaatgccgctggaatcgtgatttccgctttgtaaagatccgcgacatcataaataaacgacaacatttttcccgtgtggatgaaaccaatagccgacgaaaatcccgctgagacgatagccgcatggcagatgccgtaaagacacgaattggccgcagataaagccctgttcaccggatcagcaacagtccatttgtcgcgccggtaactgcggcctgaccacggcactccggtctccgcggcagctttagcgtatgcttctctgacacgaacgccttccattccgcgaatctgacgaagggttaggtctggatctagtttctcagcaaatctcaactggtataaccgatatacaaccatcaaacggaggtttatatctgcccagactcgcgcctgatgtagaaagttcgcggcactccgagtctcgcccatgcctactgcgtagaaccggacaccttcttcgccgcaccaggcaacgaggcagccatgatccgccagaaccgaaatcgcggcatgcgtaattgagacaccgggtccaagcatgagaagagccaaattggcgcaggggacaggtaccttacctgattcatcgtggatggcaacggcccaggcttcctgatcgatgcgacaatgctcgacataaagataactccatccgtcgctgaactttggcagaacgtgcaggtcctttactcgcacgtcctccccccttcacccgatgcattggcaggagcaaccgaaagcaagccaaatccaaaagctttgccggatccgatgccgcgaattagcgtttccttgaagagctccggattgtccactgtgagaatcccctcgtaacgcgccgagtggaggcgcttcccttggcctttgccttccttattgatatagacgtaacccggctgaacgatggtgaaattcggatcgatggcaaaccctgcagaatcgattgtccgcccgtttcgcatcagccgccaattcgccaaccattcgtggagtttctcatgaacaaacgttcgggggtcttccccctggtgttttccgcgccagtcatcgatttcctggctactcgggactggcacacgtttcccgtgccgcgttttctctttgttctgttcctcttgcgacatcgtgttccagcgccgtttcggcaacgtcgcctttttttgagtcggattcgccaggaggcggaatcgaagacgctggcctttcgagaagacggggtcaaacgatttcacctcaggcggcgcagccagaagataatccgcattgtgaaaggcatagtcccagtcgggctctatggcagactgcacgatgatcatcactcggccgttacagagaggatcgatgcgaaaaagaaagccggcttcgtcgttgcgcggggagtggacttgtttcagggcatcgtactcaacttcgttcttcttccggtcagccaagtgtcgttgctcgggaaaatcgtcctgatcgtaaggtataaggaattcaggatcgcgctttttccgtggatcggatggaaaggccatgcaaaggcgctgatggacatgataacggttcctgagccacaaccgtccaggccgatgccgatcgggatcgtcccctacgttgatcaagagacaggagaggtacatagctattccacctcttcggagacgaggcgtcggcgtcgggtttccagcgagcggtatttgagaatctcggctcgcttttgaatgattcggtcgcgccagcgtggttcctcaggattgatgcggtcaagttccatgccgaggccatattcaagcatggtgacggcatcatggcacagaccgcaaagcgaacgcaggtcctccagggtctcgttgccaccggctcttcggtaggtgacgtgctggacggtcatgcgcgggccgggcgacttgcagaagacgcacaacccggtgtcggctttaattcgttcttcgcgacgcttccgatattctgtattcttgtagtccgcgcgcggacgcggcggtgctggcgtggaagtctggatcggatcccccacttcaactgggactgtgccacgcaggacaaatcgcgcctcgtggaccggtggatcgaagcaaaccggcacgtcataccacacttccgcgtcgtcgggggcgacatcacaatccggggcggaccgccactccacaagcgtttccaccgccctgttcttcggcgcaacgtcagtcttgtaccgcgggtgccacggcatggcgcccagcgcggcgttcaggccgtcataaccggcgggattcgtccacaactcaccctcactgggccttgcaagcaccgggacggacggcgggcaggacttgcggccaaggaaaaccggccactttggcgacgcaatcgccgcggcaatatcatggatcaacttcgcatcaccctggagcgccacgagaaagctcgcgtcggccaggtactcccggcgcgtgataagggtttcaatctcgccggtggaaggcgtccgcttaattcccttcccgtcagctgttataatgccgattcccgctcctaccgtgtggtaatcccaccaccgcgtgccgggtcggtcgatgcgcacacccatcgcaagcctgttcagctccgacaggcgttcccgcgccgcctggcgcggcaggcccatggcgcagcagagcaggcctagcacgccggactttgtcggcgcatccattgtccgccggataacgaactttgacgtgtcgccccaggcctggagtgggccttcaaggcggaggaagagtgtgttggcctcggtcatttcgccgcctctgcaggcgtcccggttgtctccatcttgtccatgaccttatcgacgaactgatcgaactcaccgaactcgtcggaaccgaccacggattgttcttgctcgtgttccttcttgctcttgtcgatccaggtaagacgatggcgcagattcggcgagaaccagaaacgctcagcctcgatgctgtaacctacaacgagatcgtgggtatacttgccgagccgggcgatactttcgccgaccaatcctcgttcggacttttccggcaccggatcggcgaaggcgttggcgtagctgacgggcgtggccgacttggttttgacttcgaccagaactccgtctggcggattgaatgccgcgaaggcgtgctgtttgccggaggggttggccttggcggctgcttcaaggaagcacttcacggtggtccttgcaagtgcggtatcgttgttcagattcgcgtgcaactggctccagtcaatcacgaaatgtttgtaaaaacacgccgaattgaacatggcctcgttgacgtgggccgcgccggcgtcctggcctggcacatcgtcggcagcggtgaagtagtctacctcgttcacgattgcgtgagtcgagatggcgtgagcggcggagagcgcagcctcaacggtaaactggcctttgaggtcctgaaacggcccctttgcatcgaactccgtcatgcggccacaaagtgcgatgtcgggggtcttgacgaactcgccgatgatctcggcgaatttcctgcccaggtcgctgttttcgtcgcgcacagcctcgcccattttgttgatggcggattgaggcagaaagaagagtatttcaaaagtgttctcatccctcaggccgacccctccgtctgtaaagaccttccgaatggcttttaaatgttgctcattcggttgattaccctcgcccgccgccgcctttgcgatcaactcaatcagccgccgtgtacgaacgccgccatccttttctaaagcggctgcgaattccggactacgccggatgcttcgcttgagacactggctggagatgcgtgcccgggtaacaccgccgaagatgcaggtctttggcgcacccaagtcgtcccggttcaaattcgccggactgtggttctggatcatgtggatttcaatgatcattttaatatcctcctttcttttttgacagcgttgagatatgtttcggcccaaatgtcgcgaacatcgcgtccacggcagtgcacctcgccccgttcccagatggagagatcgtcgaggagttgttcccagtcgatgcccttcacatcccgcacgtgcggcacgtgtccggcgacgacctgggcgacctctcccagcgcccaacgtaggtttggctcaagggctgacaggggcgagcagagcaaggcatcaaaacgctttcggaaacgattgcgggacttgaactccggtgggtcgcagggttcgcagcggcccaaaattttgggcaaagacggccccgcacctgaatcgggcctgatgtgcgggacgcggaacgcgccgaaaagcttggcaacgagccatgacggctcccggcgcggagtcgccgggcttttcgcccgcagcggccaccagaggcccgtgaagaggtcgaaaccctggagcgttgcgtcgagcggccgtccggccagacggcgcagccgcgaacgctcaccttcctgcaagtctgaaagcctcttgatgtattcagcggtctggctcattttgtgcctctcttcttgcggccacgtttcggtttgctaggcatggccgcctccgatagcgcgtcaccatgttctgtcttattgagtgtcgactccagggccgatcttgcccgcgccaaggcctcccgccgttgcagcagcgagccagtaatagtggaacggacgacttgctcaatgacccggatgagaatctctttaaccgattgtcgccactccttaacgtcgtattgtaacaatagttccctgaagcaattctccatatcgacatgcgtttggctactgagcgcacacagactcgaacgtatctcgtgccccagggatttttgcccatgcaaactctcaacaatcgcatgccctttcggaggttccccccatactttctccttcgtcttccctttacctgtacgcgcgcttactgtggcccatgtcgctcggcgcgcccagtcgagttccgcacggacggcattcttgcgttcctggtcaagggcggccatgaaaagggaatgtgatgcgatgtgtttgtaaagcgcttgtacggctgcgacaaggactgtttcatacttcgttccattctgatccgttgtccggttcagaatcccctgcatgactgaactccacgtttccgcatggtgttccaacgcatcgttggggctcggccaagagggaacaatctgtttatcatgcacatccagtctgagtagatgtggatcgtcgcgccatggctcgctggaattgcgcttccagcctggtcggaagcgtatggtatatacgattcgatctgactgcttttcacaataagagcagcggccttcacgaagattgcgctctccgttttcagagggtggcgccag

SEQ ID NO: 804 - DNA, 5882 bp, Artificial Sequence
  Synthetic Oligonucleotide
gccaggaaatcaagcgcgttttggaagcaataatcccaatccggctcaagaacggactggacgataataatcgcccttttatcgtttccgtcgatgttgttatcgacccggaaaaggaagggagttttttggaagtcgtttggcgaaaagggcttcaggaaatgcggatcctgctcccggcgcaaacctgaagggaacgccatggaaaggcggcggtggacgttatagatattgtccagccactttctgccggggcggggacggtctggattgcctccagtatcgatcaatagcttggacaagtagatcatccgttttcctcctctggcttcattttgcggaaacgctgcccgcgcgaacggaactcgactatatctttgcgctttgccagtattcgctcccgccagatggggtcgcaggggtcgatgcggtcggtggtcatgccggaaccgtattccagcatggtgcaggcgtcgtggcagaggcggcacagcgcccgcaggtcttccggtatttccttgcctcccgccctgcggtaattcacgtgttgaacagtcgtggcgggagctttgcataccatgcacgcggcatggtccatcacaagccgctccgccctgaccttcttatactcggaattgttataatccgcccgggttcctttgggcctccaaacgctggttccggtttccctgctcacttgcacatcctctcccacaaccagctcacgcctgatcacgaagcgcggcaaatggcggggcggctgaaaagaaaccggcagatcgtaatgaatctccgcgtcatcaggcgcatgttctccgtcctggctggggatccagtccatgacgcaaggcagtatttgcggcaggggttcattgtgccagcgcttttgcaggggaaccgcggacagcgcctcctccaaagtgttataaaagcccggagcatgctcgcccacgggacgtgaagggggacaggatttgcgccccagataaattgcccagaccggcttggccagagcggcggagagcttttccacaagttccggctcaccctgcaaggcgaccagaaaactggcgtcggcaagatattcgcggcgtgagagcaaggtctctgccctggtttttactttgcttggtgtcagggtatcagccagggcagctccaaccatggaaggttttttgggtgccttcagctctgccatgcgcattctttgtcccgctccaacagtatggaagtcccaccagcgtatgccggggcggtctatccgcacgcccatgcgcaggttggcgagttttgggagccatgaatcagcagcctccgcgcgcccaattcccatggccgcgcaaagcagccccaggacacctgattttgtgggagcgtcggtagtcctgcgcaaagcaaacttagcctcgttgctgccccaagactgcaaagccccctccaagcgcaagaataaggtgttgggtggcgcactcatgtcagccgccaacataagccttgcttttctgaacttcttcccacttgaagccgccaatataatccaacacagcgcctacaagctcattgaggttgccaatgtttctggaagccagtttggaatgctcattgccaagggaatagcgattgtttggagaaaaccagaagctgataactggggattgctcatcataatagccaagcctgatgtcgttcacgtagttggaaagctggccgatgctttgttccaccaggtccgattccttgaccacggaaactggcctgacgaatgcgttggcgtagctaataggggaattcttgaactcaacaaggatgccatcgggatagttatgagcggcgaagctgttctgtttgccactggggttggttttggcagcggcgaggagaaaggcacccacggtgtgggctgccagattcgtgtcccctttcaggttcttgaccaactgttcccaatcaatggagaagtatttgtagaaacaggctgaggcaaacatggattcgccaatatgacccgctccggcgtcttcaccgggaacatcatcggccgccacaaaatagtctatctcaggtctggcaatgtgggtggagatcgcatgtgcaacctgtagggcgccttcaacgccagtgtttttaagctctttggtctccaacatcctgccgcaaagtgctatatccggagaatggacgcagtttgtgagcaaatctttgaactgcagcagtttttcgctttcacttagtttggagtcggaaagcagctctgccatttggcgcagggcatcataagtggtaaaaaccagcatgtcagatgtatcagccgcctgctgctcatcctgatcttcatcggcttccgcgggtatcttttcggacttttttgcagctttcttggaagatttggttttgattccgcaggcttcaagaaacttggcaaccagcttcttatctttgttttccagcatttcttcaagtttctctgccagacgccttgttcggatacctcctctaaggtccgcgaattccggggcaaaacggatgctgcgcttgatgcattggctggagatgcgagaacgtaatactccaccgaaataacaggtcttgggggcgcccaagtcgtcccggttaagatttgccgggctgtgattctgaatcatatgaatttcaatcaacatctgaatcctccttgttgatcttgtatgctttaataaatgaatccgaccattctcttttgacaggttcctgctcccaaaatgacagaacatcagtaagccctacccagtccaggcagacctgctggtgcttgcgcaagatacccataatgaccgacagcggctcttccatctgcataatgtcaagcgatgcgagttgatcaaagcgtgccaatacacggggtaattcctttttgggttccaacttccggcagatgcctcccataagaatgggcaatgtggctccctcgcgctgttcaaagcggaattcagcaaaaagtttggcgatcaaccaagccacttcacgcttgggagcgcgttgattcttttgccgcaaaggccaccatagggcggaaaacaggtcaaatccgggaagcttttcatcaagccgggctcccctgagttttctaagaatgcccaaatcgccttctttgaggttctccaggcttgcaatgaagtcaacggttcctctattcattctggtcctcctctgcgggttttgttttggattctggtataactggccagggcttgcgggaaatgaatttacctctcttgagcctggcgtccactgtttgagccggctccaaagagcatgcaaccttggtgagcagttctccgtattcagtatcggcatcctgccaggaatagcccctgttctcagtcattttacccgcattgagggcaattctgctttcggcatgggggataatgtcagcaatctggggagtgcccactgactttttgaaatcacctctgagaggcttcttgcgcatggcattaagggcagtagccctgtttgccaattgagccagtagctcatcatttgtatcagttccctcaagctcgatgatcttgtcccagatgtctatgctttttgctttatcgctggcaaatccaaccaaccatagttttccttgtctggagtttccttccgcgtgcaaatagctgaacaacgggctataccaatcccggtccgcgaaagtgtatctatcattggacatcagtttgattttggactggagactttttccctgatcggtgtaaacaccatgagggtctttccatttaaggccttccggcactggttcaggttttatgctgcaggaatagacgagagctttggagggtaagccgcaggaacaacatgctgcctgacctgagacaggatcatgcagatgcaccttgcgcggcagccaggtcattccggcaagtaagcccactttcctgctttctttttgaaaagaacccaaccatgccggaatccccatattatcccagggttgccaattttgaaccagcatgccagcgaggtcatttgcacgccagagcaggtaaaatggaggagtgttgttgattcccgcgcctatccctctgccaccgacagtggtaaagacaggtaatctcagcagtcccttgatgcagcaagcttcgcagagcccatcgatatagtcggtgacatgattgaaatggcataggttgtgagctgttggtatctcatgaataaggtcggtaatggctctgatcctggaactgggatcggcttggaaaaatctctgtccatccccaaaaagctcgaaataccccttgttttcttccagccaggatatccaggaggtcggaagcggcttatcaggttcaggctccccgttggtgttggcgaaacaccagtagccaagagcaagcaggaatctgaaaacagcgaaccggtccataggattgctgtatgccagttgcagacagtgtgcgtcttcaagagtttgaactaaagatattctatctggtttgcccgaaagatagaccacgtttacccaattatcacaaagaagattgtacataacatgctccttttgttcgataggaaccttatatttaagccaaagatcattgtcaagaaatttgctttgcggattttgggttaggaaagatcaatttggggcggtatcttgttactttcaaggtgttccatgcggcggcttccactcccattttacggagccccaccagcggctttttcagcgcagttttcccgctgctgatacttggcttgttggaaagaaccgccgtgtgtaatgcgcggcggttcaagttaattatcggacttggaagggcggctgtccgtcacttcagcaatatcattttgcggctggcgctcgtctttccggtgctgaggcggtagatatagactccgcttgccagttgggcgccgttggagtcggtgccgtcccagttcaggctgtgttttccggctcccatctctttgtccagtagggtgctttacatgaaaactcccgggaaaaaagcgtaaaaaaacccctactggtgaaatgatgaccactagtgtaatatggaaagagcagagaacaacctgtgctgtctacaatgcgttatataagaatatagctttacattcgggcatatgcctaatggcaagtcccagctggtagtccatatacggactgtttaccaagttcaaaacgtccatatttcagaacagaagtccgtcggtaatatgttttgtatgcacagcacgctatgttcttattgatcgtgtgaattacactcttagtgtcagatatcccaagctgcgtttgttgtccagttttcattcctggtagcgaaaaatgttttcagcgaagttcaaacattccaaaagactggatcccgggttccacggttcacgcagataaacgcggataaagggcgcagattgacacggattggtgtaatataagggttgccgaagtccgttcggcagaggcaacggagttgcctgtttggaagagacctccggtctctgtggcaaacggactttgccacacctgggcactggatcacggctcgcaggctgtgatgacacggtttttagtctggagggttttgttccggagtcgggtgtgttgactctttaatgttcttttaattcgtgttaatttgtgtaatttgtggatgtttcttttaaaaagactggatcacgggtaagccaccccagagggggccccgacttcccgtgatgacacaaaatataacttggtggacttgtttcgggggcacctttccacctttccacaaaaataccacaaccttccgcataatccttcataccgccctcctttgctgctactggatttgatgccatcatccttaggtcaaccttataaattataaggatgacctaaggaagac

SEQ ID NO: 805 - DNA, 5808 bp, Artificial Sequence
  Synthetic Oligonucleotide
ctaggttcggctcgccgcttgtagttgagctaccggttcacccccacgcaggtggggaacacggacacggcatttccatgatgggcaagaataccggttcacccccacgcaggtggggaacacgataatgaggatgattccccggatgccgtcaccggttcacccccacgcaggtggggaacacctatacgacagcacaggggccgagacactgaccggttcacccccacgcaggtggggaacacgtgttctccatttcagagaggtaatagcttaccggttcacccccacgcaggtggggaacactaaaaaatttccaggtggcttgtgaaactggtcggttcacccccacgcaggtggggaacacaggcggtgcgactcctgccgtatggacgatagcggttcacccccacgcaggtggggaacacttaccccggttcccacagcgggatagtgtagccggttcacccccacgcaggtggggaacactgtccgggcggtgatctgatatatcccgctcacggttcacccccacgcaggtggggaacacacttcgaaagtagacgctttgaggccattgaacaggcttcaagtatggatcacggatgcttggtcatcaatttcaatccttcccattctgtcactatcctttccgcggcaccccaaaactcaattccaaagccttgttcgcaatgcttgctgtaaatcatgatacaagttccaccggcacaaccagacctggccttgtcccacagcttttcccttatcatggccgatacctgaccgacaaatactccagccttgatttcgaggagccagcgtgtaatttctcctctcaggccagagggaactttttcaagcaccagaaccatcatcatggcctccaggatcatccagaccccatgacaagccgccggggctcactttatcatctgggttccaaagcccgcctggcacggctggatcgacatcagcaaggtctggctcatcgtccgaagtttccagaataccgaaaagggcgtgaatgtcggccactatcttctttagcagaccaaattgatagaactggtcacggcaggcaatgcgtgtccttctgtccaggttatcgacccctgcggctgtggctatgaaagccgcgggcacggaggtttccattttataaagatcggcaatgtcataaacaaatgacagttgtttgccagtatgaacgaaacccagggcaggtgaatagccagcggccactatcgcggcgtggcagatgccatagagacaggaattggcaacggacagggctctgttgatggggtcggttttattccagttgctcctgtcgtaattcctcgcactcatgggcacatcgaattcttttgaaagtctgaaataggtatcccgtactctcgctccctcttttccccttatctgttcaagagagagggttgggtccagtttttccttgaacctcaattcatacattctgcgaactatccgcagatgcgtatctcgatttgaccaggcggcagcctgacgcataaggttggcggaactacgggtggtccctgtcccggatgagtaaaagcggactccctgttcccccacccaagccaccaaacagccgcattctgctaaaacaaggatggccgcatgggtgatggatacgcctggccccagcatcagcagggccagtccagcgcagggaacaggagtggagcccatggcatcgtgaaaggcgattgcctgttgttctttgtctattttggcatgctccacatagagataggtgaagcggtcccgcatttttggcattaggtgaaggtctctgttacgcatcacttgccggaaccacggaaaggaggccgaagcccattcctttggcgctgccgataccttttcccaaggcttcccggaacagaaaggcatcatccactgtcagataaccttccagcagggcggaacggtatctcaggggacggtattcgttctcacgccggggcgaatttccccggggctccggtttggaaccgtatacccagcccaggcttaccagttcggtctccccgggcgtgaagcccagtctgccagccttggcggcaaaccattgcgccaccgcatcctttgggttggaatttgtgtcccaggtaagggcgatccgtttgtgcagaacccttcccgttttttcctttcctccgggtccttcccgcaactcgtcgattttgcgtttgacactggcattcacgaggatgcggaagcgcagccgctgacctgctgagaactggggatcgtattccttaacctggggaggggctgccaaaaatcccgtggcattctggaaagcccagtcccaatccggcggcagggacgactgcaccaaaaccatcgccctttgattttctccatcggtgttgttgtccacccgaaagaggaactggcgcttttcaaaatctgcggggtcaaagggctgcagaaacctcgggtctccttccttgcgcttgcgcatggggaaagccatgctgagccgccggtggacattatagatattgttcagccacaagcgcccgggccttggccggtcagggttgccgcctgtgtcgatgagcagttgggatagatacatcatccgttctcctccttcggatcgagtttgcgcctgcgctgctccagcgagcggaatttgattatttcctcgcgtttggccaagatgcgctcacgccaggcggggtcacagggatctatgcggtccatggtcatgccgctgccatattccagcatggtgcaggcatcgtggcagaggcggcagagggcgcgcaagtcctccggcttctcgctgcctccggcgcgtcggtaattcacgtgctgcacagtagtggcgggtgccttgcagaacatgcaggcggcattgtccatcaccaaacgctcagcgcggacccttttgtattcaggattgtcgtaatttgcccggttacggggcggttgccaggctttgccggaaagcacggtctctgcctcgaagttgcggtccaatggcaggttacagcggatcaccagccggggcaagtggtggggaggctcaaaggacaccggcacgtcgtaatgcgcttcggcgtccggcggagcgtgcacgtcatcatgggccggaacccagtcgagcacacagggaacactgtcaggtatcggttcgcctttttccctcagttgcgccgggatcgaccgcaaagcctctttcagactggcataaaaccctggcgggtgttcatccaccgtacgggaggggggacaggattttcgccccagataaagcgtccagactggttttttcagcgcttcagccagttgtgccacgatatccggttcaccctggagcgcaaccaggaagctggcatcagccaaatactcgcgtcgggagagcaaagccccgggtttggatttgatcttgtccgcgcccaggtttttggccagggcagtgccaaccagaactaggccgttgggcattttcaggtcagaaatgcgcagcttctgctccgctcccacagtatggtaatcccaccagcggatgcccgggcggtctatccgcacccccatgcgcaatttggcaatttcacccagccaatactgtccggcttcggcccggctgattcccagggcagcgcagagcaggcctgccactccggatttggtgggcgcgtcggctgtcctgcgcacggcgaatttggcctcattgcttccccaggcctgaaggggagcctccaatctcaggaacagggtattaggcggagaagacatttcaactctctactttctcgttttttacatcatcccattcaaaacccaacatctcaactgcttcgcgaacaagttctagcaggttgcaaactggctttatgtccagcgtgccctgttgaggctttaggggataacgtccattgggcgagaaccacagagcgttgcctttcatctgtccagggaagaaaccggcacttatatccttcacatagttggccagttggccaatgctttgttctaccaagtcagaatccttaacgattcccaccggtcgcacaaaggcatttgcatagctgacaggtgtctcttttatttctaccaatattccatcgggaaggttatgtgcggcaaagctgttctgctttccgctgggattagtgagtgcagcggcctggataaaggctccgacagtatgagctgccaacttttcattaccctggaggttgattatcaaggtattccaatcaattgagtaatatttgtagaaacaggccgaagcaaacatcgcctcgtctatgaatccagcacctgtgtcgtcgccaggctcgtcatcagctgctacatagtaatctatttctgggcgggcgatgtgggttgaaatggcgtgcgacacctgcagggctgcttcaacagtggtattttcccacttgaccttgtctgtgttcttgtccttggtatcgggctcgagcattcttccgcacagagcgatgtcaggggaatgtattgcccccgatattacatctgccgctttcttggctttctctgcaacactcaggccttcgctggtgacaatttgagcaagggcatcgatcttgttccgggtcatgaacaccagcatcttactatgtccgttttcgtgtttcaaaccggctttgttcagaacttcctctgcctgattcctgcagtcctgtcctgtagcttttgtaatcaactcggccaaccgacgggtacggatacccccgagcaagtttttgaattcatcgctcatcctgatgctccgctttaggcactggctggagatgcgggaccgcaacaccccaccgaaataacaggtcttgggcgcgcccaggtcgtcccggttcaggttggccgggctgtggttttggatcatgtgtatttcaatcaacatttgattcctccttgctgattattaaatgctgaaataaatgtgtctgaccatatcgctctgtttgattcccgttcccaagcggagaggtcatcgatgagggcaacccagtccagactggcaatgtcatgtctttttaaaatcgcgagcacttgcgccagcggttcctccagttggttcaactcgagcgtgagcaagcggtcgaacctggctaaaacacgtgggaactctttttcttctttaagtccacggcatattctgcccatgagccaaggcaggctggcgcctttcttttgctcaaagcggaattccgcgaaaagcttggtgactagccagaccaccttccgcctgggggttttggggcttatactgcggagtggccaccacaggccggaaaacaggtcgaaacccggcagggattcatccagacggcgacccctgagctttctgagcaagcccaggtcgccctctttgagttcgcccaggctccgaacaaatttcacggtgctctcattcattatcgcctccggatgaaggttttttaattgattttggttttaggggccagggcttgcgccgagccagttgttctcgttcaagcttggcggcaaccgtaatttccggcactagagaaacggcaaaacgcttcatgaagaatccgtaatcttcatccgcttcctgccagacattgccgctgttttccaccatctcgcccgaatggacgtcaacccgatgctctacgtgcgggatgatgtccgccacggcggtgattcccacggattccttgtaatcgccccggcggtcttgtttcctcatcctgtgcagggagtaggctctttcggatatctggtccagcagttcctcggagcttgtttttccggatagggcaatggtcttttcccaaa

SEQ ID NO: 806 - DNA, 5785 bp, Artificial Sequence
  Synthetic Oligonucleotide
gacgtgttcccacaatttttcgcgaacaacagaattgagcttgccgacaaataccccagttttaggctcaatgaaccatcgtgtcaactcaccccggagttttgtcgggaccttctctagaatcatcacaaccatcgctcgtctccctttgtccaagctctgagtcagcgtagtttttgcctgcactcagttcatcttccgaaggatcccagagggttaatttggacgcagaagccgtattttcctcactttcaagctcattgggtagctggaggacagtgtggatatcgttaacgatctttgcaagaagatgttgtttgtggaaaatgtctcggcacgcaatacgcacgcgcctttccacatctagcggtgattcgctcacaacacgaaaagccgtgggaatggttgtatccgttttatagaggtccgcaatatcatagacaaaagcaagcattgttccggtatggatgaaaccgatcgctggcgaatagccagcactcactatcgccgcgtgacagattccataaagacacgcgtgagcagagctcagcgccctgttgatcggatccgcagcattccactccttgctggtgtaatttctccgacgccacacaacgcctgtctcttcagccatgcgcgcataagtttcgcgtactcgcttgccctccattcctcttatttggcggagagtaaggtggggatcgagcggtgttgcgaatctcatcttgtacagattgcggacaacgagcatccgtgaggctttatccgcccacattttcgcttggtgaagcaagcggcaagaagtcctggtttcacccaagccagccgcatacaatctcacaccagcctcgcccgtccatcccacactacaaccatgctcagcgaggagacttaccgccgcgtggcttatcgagacccctggtccaagcatgagaaagcaaatcattgcgcagggggcataagtgacacccgtcgcagtatgaattgcaagagcacccccttcgcgttcgataattgcttgttccacataaagccacccgtaactatcctgcacacggggaagaatatggagattacccggaagcatcatcgaatttcatcaatcggggaacagtcatgaggccacaaccaaagctcttcgaggggccaattccgcgtataagcgcctctcggaaacgcgcagcgtcagtaaccctcagctcgcccataaatctaacaatgaatatcttgctagtctttccacaagttttttcctcttcacctccatcacacacatttgggccttcattacgaggtggaatactaaaacagtaatacgccggtattaacgttaatttgtctttttccaccacaaagccgtgcatctctcctttacgggcgagccactcagcgagattctctgctttgaccggaactctcttaccattcttggttctctctccctccctagaaatgccttgctttcttatctgaccgggaagggtctttattttcctcgttggatttgcaacgaggacaaaagggaggggatcttgcattaggtggtcaacgtatgcaaaggtcctcacttgaggtggagcagcaagtgcttccgtgaaattatgaaaggcatattcccaatttgggggcatggctgactgaacaatgatgcatgcccgatccgtgcgttgcggatcaattcgaaaaagaaaaccactgccatcgctccgctgggtatgaactgcagggaagtcgtcgggcgaaaagggatgaacaaagtgggggtccttatcagccctctgtggcgtagggaaagccatgcacagacgttggtgcactcgatagagatttctcagccaccggcgtgctggacgaggacggtcgggattttttccgagatcgataagcaaagtagaaatatacactgttactccccttcactcgctgaataaattcctttccgacgacggttctcaagagaacgccattggaggatttcacggcgtttctgcataattgcctcacgccaggtgggatcgcaggggtctatacgcacctctcccaaggcgagcccgtactctagcatagagactgcatcgtgacaaaggcggcagagagaacgaaggtctgatggtacttcctccccgccagctctgatgtatgttacatgatgtacatcagttgcgggagccttgcagaagacgcaggtatggtaatcggcaacgagcctcttcagcctcacctttttgtactcagaattcgtataatctgcccttttcctttcaatggcacaactgacttcatccttcctgtcgcgaatcatcagcttttccaacgacatgcttctcaacgtgacaactcgcggttgatacgctgggggagcataagatacaggctgatcatagagaacgatagcattgtcggggatattctccccatcgcttcccttttcccactcgatgatagcattcagttcatcacgttgatgtgggctttctagcagagcttcttctagcggagctttctctagcggagctttctcgagggcttcatataccgtcttatcccactccataggattcggctctaccaacgaaaacaggaggggacgtgatgggctgcaagacttgcgtccgaggtagggctggaatttcggttgcacaagcgcttcggctaatttttcaaggcagacatccacatcaattggcttcacaagagcgacgaggaaagaagcatcggcaatatactcacgctgagtcacgaatgtttcgagttcgccgttggaggaatacttaattttgccctcggcagtcctattgcctatccccgctcctaccgtatgataatcagggataatcacgcccgggcggtcgatccttactcccataagtaaccgtcctagctctggaagtacctctgttgccgacttgcggtccattcctaaagctgcacagaggagaccgatgacgccggacttcgtgggaaaagggaaactctcacgatatgcgaatttcgacaaatggtcgccccatgcctgcagcggaccttccaactggaggtaaagaacttgacgcgccatcactcatgctcccccctgttccttaagcagttcagccagacgctcattctcttgcaggacgtgtttcataagctcatcaagcgaaatttcgaaaccaaggagtgacttcgccaccgctccgaggagtccgtcgaggtcctcgcagagctcagcgaatttgggatcttcctgatttaattgcggcaagcgccgttcaacgtcgagaagccatcgatcgcaggaccggttgagtgttttttctacatttttggcgtactcaacaagtctgcggcaactcactataatgatttcctcctcgggagcctccttccgtctgacaggaacggcaaaagcattcgcgtaattaagaggggaagtacacctctcaaccaatatcatcgctggtggagtgtgaggcgcgtaactagtttgcttcccggaaggatttgtcaaagcagcggctttcaggaaggcgactatagtggacgctgcgaggaacttgacatcgctgccttgatctggaaggtttttgcccaactgattcagcaactgattccaatcgataacaaaaaatttataaaaacatgccgaggtgaatagggattcgtccacatatgcggcacccgcatcagggccagggatatcgtcagccgcaacgtagtaatcgacctcgggcatacactcgtgcgttgagagtgcgtgggcgacgtgggcggcagcttccacgcgtgtgtcagagagctgtgtagtctcaagcattcgtccgaaaagagcaatatcgggagcagaagagttctgcagttccttctttaatctctccctgaagtcttcggtggaactcgggtcttgcagtgctttccgcaactcatgcacagatttgacggaaatgaaaacagtcgcctttgtcttcttgtcgctttcgcctgtattgctatcgcctttgtcgagcatatcaagctctttcagagctcgttcgactgtctccctcttctttttatctgattgagcaaggagctctatgagtctgcgggtgcgaatgccgccgcagtgtcgagcgaattcctctgagcggcgtatactacgcttcaggcactggctcgaaattcgcgcacgtaagcaccccccaaaataagccgtcttgggtgcaccaatgtcatcgcggttcaagttgctcgggggatgattttgaatcatgtgaatcgctatgtagccgttttccatttttttgaatctcctttgaacatcgaataagttttgcttgaagataatttagcaaaaaacatcgccacggcaaacatcgccacggccggcttagcgacaacttgtccagagcatccacccagtccaccgcgggcagcacgagggaaagttttttgtgttgcttgctgagagaaagctcctcatttcgaacagctcggcggagaatgacggaaaggggcaaggccaatgcatcactcctaccaagaaagagcgaaggcgcaagtttagcactgagtgctgtatcttctttttcccagagtttaggcagtttcatatcaccgcatggcatgggaagggatgagtagagtttcattatgaaccacgaagcatctcgcctggggacatgcggggatttttgtcgcaccggccaataaattgccgtaaacaggtcaaaagcacgcgcatctgcacttagcgaggcgagcaagagagagcgcagaagggcaatgtcgtttgctccgaggcccggagcgtgtatcatgcgagccacaaattcgcgtgccagtgcagaggaagaagattcgttagccctgctctggttggttgagagatcacaacaattcagaaagtaataagatagttcctcccgttgcggcaataagtccggtcgatttgagtcgtcgccccacagtttgagccaaagctttactctctcagcgagcttaccgacctctgactttaaggatggtaagagtaaactatgtccgctagcaagcgctcgcaaaacttgatctttatactgcgctcgctcttcgagctccgtcattttcctctcatatcttctgagcaccgattgtccttgtttttgtcgttgtttctttttctgtgggggcgcgagaactatccgcttaaggagagcctgattggagtcccatgacaggacgaggaggtcggagctttcttcacccggagggatagaaaaaggtaacgagacacttttgcgctcccaagtgttgggctgaaatctcaatacggaaatgagagcaccgggagccccgcacaatatacactcgctttcagagtttccgggagagtctagccagactttgcggggaggataagtcatgtattcgatgagagtctctggctgctggtatcctttgacccatgatggtgcctctcctgggttagcttttttcaggcaacaaaagttattgttcaggacatcccagagtgtatctcctttttgaaaatagtaggggggactaaattgcccctcataatagccccttcctccctggagagtgaaaaaaggaaggcgcagaagcccaaggactgcgcacgctggacacaccccaatggcgtgaccctcggagacatgaagaaaatgatcgatattagtgccggttggaatttcctggaaaaggtagccgataggcttttgctcacccttttgcggattaatttggtaaaaacgatgttctttcccaaacaattcaaagtggtctttttggtgtgcgagctcgtgagagatatccgaaggattat

SEQ ID NO: 807 - DNA, 5770 bp, Artificial Sequence
  Synthetic Oligonucleotide
ccccccgtgcgaggggaagacggaattgtccgggaccgtcttttccgaaatggcggttcacccccccgtgcgaggggaagacgaaagttgaggctgcgagtgccactgctgcacaacggttcacccccccgtgcgaggggaagacgccacgaacgcatcccggttcgccggggtgatcggttcacccccccgtgcgaggggaagactccaacatccgccgctggagccagtcgaaaactactacaggtagtggtcggctgaaaacaaccctcaaattatttttcaggcgattcctcctgcttagatttccttcgtttgaccgccagagtaattccctcgaagtccaccaggtcccgcgcggcggttccgtgaacgcgggccgcatacccttgcggtccgggcgcgctccagaactgcatgaccgagcctcccttacacctgagcgccgccatccgccacagttcctccctcactcgcgcgctcgcgttcccaaggaacacgcccggcttcggctccatcagccagcgtgacaattctccccgcagactcgtcggcgtcctctccaagatcatcaccagcatcgagcacctccgctatgtcgggcaggcatcgctcctggatgcgctgctcatggaaaacttcccggcaaaggacccggacgcgcgtttccacgtcgccggtcttctgggccgactcgaaggcggccggcacggaggtcaccgttttgtacaagtcggcgatgtcgtagacgaagctcagcatcttgccggtgtggacgaagccgatggccggagaatagccggcggcgaggatggcggcatggcagacgccgtagaggagcgcattggcggccgagagcgcgcggttgatcgggtcggcgtagtcccagtttcccggatcgtagaggcggtggtcccaatgcacgccgaatttcagggccatcgcctgataggaggcccggacgcgcgcgccttccatgccgcggatttgctcgatcgtggtctccgccgacagcggatcggggaagcgtttctggtacatgcggcggatgacttggaggcgcgtctccgcgccacagaacaactgggcctggcgcagcaggcggcgggaactgcgcgcgccgcctgcgccgtgcgcgtagagccgcgcgcccgcctcgccggtccagcagaccaggctgcgattatccatcagcgccttcatggccgcctgagtcacgctcgttcccgggccgaggagcagcaggccgatatggttgattggaacttgaaccgtcccttccttcccgtgaaaagccacagaagcggcatcgcgctccaagcggccctgttcgaagtacaggtagctccatcggtcgtcgaatcggggcagaacgtgttggctggtcatggggaaatcctcgcaaggctcagcagcccgaagccgaaggctttcgcaggcccgatgccagactcgacggctccaacaagaagggcagggtctttgacgcgaagcacaccgtcaaagatgccgaacgcaaaagacatcttcttgcgttcgtccccgttcttctcttccgtgcgctcttccaggtttttctcgcgccaggcgtggagcaagccgctctcaatgcgccagcgcggatcccagccgttctcttttttctcaaacacgggctcgaatccgttcgcctcgcccctgcgccagagccagtccattagggcggccggatcgcgcccgacgctgacgcggcctccactcagcggcccattcgctaccttgcgcacagtgtttgccttcaggcggaagcggtactcctgtccttgttccgccgcaaccgtataggctttcttctccggggccgctgccaggagcggcgcgttcaggagcggcgcgttcaggagcggcgcgttctggaaagcataattccaatccggctccctggccgaaagcacaaggataacaggactgcgtgccatgtcatgcgaaagttcgtgcaaactctcacaaggttgggcgcgcccgtcctgagacacgtcgtgtacattcacatcatggtcaatccgaaacaggaagccgttctgcgcggaacgcggctgatgaacgtcgtcgcttgtgatctcctcttttgcggcattcgtttccggaaagtctttctcctcgaacggccgcagaaaacgcgggtctttcgccttgcgctgcgcatctgggaacgccatgcagagccgctggtgcacccggtagacgttccgcagccacagccggcccggccggggtcggtcgggattcacgcccacgtccacgagcagatgtgataaatacatggctattctacctccgcatgctgcagccgccggcggcgggtcgccagcgaccggaaccggatgatctcttcccgcttgtggagaatctcgtcgcaccagcgcggctcttcgggattgatccgatccaaccccatgcccaagccgtactcgatcatcgttacggcgtcatgacagagccggcagagggcgcgcagttcctcctgcatttcgccgccgccggcgtggcgataagtgacgtgctgcacggtgccagcgggagacttgcagaacacgcaaaggtgatgatctttttcgagccgttccgcccgcgccttcttatattcggaattgcgataatcggcgcgaggccggagtggaccgggcgttgaagtctgcgccggcttttccgcaattcgcacttccccttcgcccgcgcctatggtcaaccgcgcgcggatgacgaagcgcgcgccatgcgacggcggctcgaaggtcagcggcacgtcgtagcagatcagcgcctcagccggcgcttcgggctccacaagcgaggctgcccaatccaggaaacaactcaacccttccggcgctttatccgaattgaagcgccgttgccaggggactgacgagagcgctgaaggaaggtccggaaaatctcctgcaggatggtcgggggcggtcaaaggacgcgaaggcggacagcatttccttccgaggtagagcgtccaatgagggttctccaacgcgcgcgccagtccggcgacaagcgccgggtcgccttgcagcgccacaagaaagctggcgtcgcagagatactcgcggcgggtcagcatcgcgcccatcttcgttttaccttcgccttcggcgatgcgcatctccatctccgcgccgacggtatggtagtcccacgagcggacgcccgcccggtcaattcgaacacccatcctcatggcagaaagccggggtagccactccgcggcggctttcggccgtggaacgcccaacgccgcgcagagcatcccgatcacgcccgacttcgtcggcgcttgggaggtccgccgcacgacgaacttcgattcctgatcgccccaagcctgcatcggcccttcgaggcgcagaaacagcgtgttcgcgttcatgcgcctgcctccgggttaatggtgaccttctgaacggcgctccagtcgtaaccgttgccgatcctggcgattacggcaggaatcaggtcgtcaagcgacctgaaacactgatcagtcagggcgacctccttctttttctttgggtccttctcgtcgggcacttgcgcgctgagcgagtgacggagattcggcgagaaccagaaacgccgatcagatttgccgtatccagtgtccatgtcgagaacgtattggcccaattgcgcaatgctctctgagacgaggtcgcgcctgccgcgcgccgccggttttgcgaaggcgttggcgtagctgattggcgtcctcttctcccgaatctcaaccaggatgccgtcaggaagattatgcgcggcgaagctgttctgcttgcccgtcggcgtcaccagcgccgcgcctcggaggaacgcgcccaccgtgtgcgcggccaagtactcctgattgccgggaaagcccttcaggttctcaagcagcgtttcccagtggatcgagaaatatttataaaagcaggcggaggcgaacaaggcttccccaatatgcgcgccgcccgcgtccacgtctttgacgtcatcagctgcaatgaagtagtctacttccgggcgggcttcatgcgtcgaaatcgcgtgagccacctgaagagcggcttcgatggtaaggttcagtcctttccagactcccttcttcttgtcgtcctcttctccgttttcttcatcctcacctgcttcgctcgtttttgaagccgagcctttcttgggaggtttggcaggctccagcatgcggcccgatagcgccatatctggagcgtaatggtcctccgctatcaattttgcgaactgcccggcaagtctttcgatgtctctcacgcttggtgttgccggagcatctcgtagcagctggaccatttggtcagctgcgctctttgacagaaaaacaataacgtctttcttttctttcttgtcacctttgccctcatgcagcaacccacacttctgcacgattgccgttgctatcggaattacatctttatctttgatcttgtccgcaaggtacttaggcaatcggcgcgtgcggatgccgccgaggagtttctcgaattcgtcgctcgttcgtatgctgcgcttgatgcactgactcgatatccgcgaacgcaggaccccgccgaagtagcatgtcttcggcgcgccgaggtcgtcgcggttcaggttggccggactgtgattctgcatgacgtgaatctcgatcagcatttgagtcccctttcaattacccgaggaattcttgcgcccatttcatccggacttgctcgcgttgccaccgggacaaatcgtccgccaacctgacccaatcgagcttgctttcccggtcggcgaccagttccagagcccagcgcagtgccggctcgatctggcggacaggcaaaactagcattcggtcgaacttctccgcgaaacgcgacccggccggctcctttcccggccggtatttccgaagctgccgcgcgagcgtgtcgtcgtgcgattgcggcatcggacgcgcagcgtacagctttgcgatgagccatgcgacctcgcggcgaggcgcccgctggttcttctggcgcagcggccaccagaggccggcgaacaagtcaaagccctgcaaggtctcgtcgagtccctgtccggcatgcgacctcaagagaccgagatcgcccgccttaaggcttgtcagcttctgaacatactcctccgtcgcgctcacgttttccctcctttcttcgagcgaaatttccgtggcgtctccgatcttgcgcccatgtcgggggaggcggcggcaatttgccgtcgccgatcaacggccgatgaggtgaagccgggcgagagcgacttggcgaccgcttccatcatcggccggtattcctgagcggctttttcccatgccgcttcgccgccgagcaacaactcctccgctcgctgcgaaacctggtcttccacttggggccggacggcggcaagtgccggcggaatctcgacatgttttcggccggatttcttctcgctgcaggggcgcaatcgcttaacgagctcaacgccttctttgctccactgggcgaaccgggcggcaatctcagcattcctatcgccggattccggccaaggcagcgtctgctcaaaggcttccaggtacttgtcgttctgcaccgtcgaaaacccgaccacccagagcgcccttccgcctttcctgccatgcctttccacaatggcggccataatccgtgcccactggccggcggcggcatcagctgagccgagcgcatccccggaatgaagcgaaaca

SEQ ID NO: 808 - DNA, 5768 bp, Artificial Sequence
  Synthetic Oligonucleotide
gccccggttcacccccacgtgcgtggggaagattgacgcggcgggacctcgaccaactcgcgccccggttcacccccacgtgcgtggggaagatgtcgaggcgcggacggggtcggacgagttcagcggttcacccccacgtgcgtggggaagatttctggctcctttcgaccgaggttgaataggtcggttcacccccacgtgcgtggggaagatggcaatccgtgggcgtggtttccgctgacgttcggttcacccccacgtgcgtggggaagattacggccgggcgagcgtcatcgcatgcaacgacggttcacccccacgtgcgtggggaagatgtggattcgacgccacgcaacccacacgatagcggttcacccccacgtgcgtggggaagatgtgactcccggaagctcgtggaagaggttctccggttcacccccacgtgcgtggggaagattcttcgacatgctggcggagaatcccacgttccggttcacccccacgtgcgtggggaagatgcgcgatgcgtccgatgcgcttccagaaccgccggttcacccccacgtgcgtggggaagatgctgggtttttaccgcgccagggacgtttttgccagaagtaacccctcgaagtcttcgatgattttacgggtccggccacttgttaaaatggtgaatccctgttcattgggggctggatagatcaacagcgccgccccatccttcagggaacgttgcacccgctgccaaagcctgtcgcgcacgcgggccgacaaggtgcccacgaacacgttggtgtcggcctggatcagccagcgggtcagttcaccccgcagggaaggcgacacgcgatggagaatgaacacgaccatgggtgccgctccgcaactcagcttgctcccgtggcggggccgggcttgatggccagaatctgaccgatgggcacgtcggcgccgatgccggggggagtccaccagtcggcaggaagcgccgggtcatcggcataggcgtcgtcctgctgatcctggccgacgggcacatccagcacatgggcaatgtcgggcaggattcgctggttgagtttgccctcgcgaaagcgatcgcggcaggccagccgcactgcccgatccaggtccgcggggttttgttttgcgatgctaaacgccaggggaatgatgaaatcgaccttgtacagatcggcgatgtcatagacgaacgagagctgcttgccggtgtggatgaaccccagggccggggaatagcccgcggccaggatggcggcatggcaaagtccgtagaggcaggcgttggcggccgagagagcgcggttgaccgggtcggaggcgtcccacttttcgcggttccaggttcgtccgtgccagtcgatgccatggacggcggcggctttggcgtaggcgtcgcggacgcgcacgccttcctttccgcgaagctgctgaagcgtcagggattcatcgatcggctcgtcgaatcgccggcggtacatgcgcacgacgacctgaagcctcgtgagcggattgcacagaagctgcgcctggtggagcaggtttcggctggagcgggtgccgccgctgccctgggcgtagaagcggacggcgtgttcgccggcccagatcagcaggcagttgttgtcggcggcggtcttaacggcttcgtgggtgatgctggtgcccggccccaggatcagcaccgccagcgccgccaccgggaccgagatggttccatcggcccggtggacggccagcgccttgtcttcctgatcgacgatggcgtgctcggcgtagaagtaggtgagcttgtcgtcgaagcgcggaagctcctggagattggcctgaggggcgggcacatttgtgatattcggttgtcaaagagcagattcttcaagttcgttcgaccggggcaatggagagcaggccgaagccgaaggctttggccggaccgatgccggccagcagcgcacggcggaagtcgtccggatccgtgatctcaagcacgccctcgtagagcacgcagcgcaaccgctggctcttttgctccgggccgcccttgcgaatgtagacatagccgatacgcggaatctggagcttatcttccaccagtttgaatccggcgcgtttggcgcgggcgtgtagccactgcgcaaagacctttttcgggtcgtcacccggcctccaggtcaactgctgccgcgggcgtttgactctctctcccgccagcttcatctgctgccgctgctgcttgctgagcgcagggcgcttcgtcggattggccaggagtctgaatgcaaacctggctccaggatggatgtcgacgttgaggggtcgaggttcggaaggcggcgcagccaggagataccgagcattgtgaaatgcgtaatcccagtctggacgaagcgcggagaggacgacgataacgacgcggccgcccggcctcggatcaatgtaatagagcaagccctgtgtgtggcttcgcggaacatgcacgtgaccgggaacgaaatcgcccggttcgtaccgcttgaggaacatcggatcgtcgcgccgccgctgcgacgatggaaacgccatgcacagccgctggtggacccggtagaggttgcgcagccacagccgccccggtcgcggacgatcggggttgtctcccacattgatcagaagcgtcgagacgtacattattctacttcctgcggctccagccgtcggcggcgcgtttccagggaacggaactgaatgatctgctcgcgcctggcgatgatctgatcgcgccactgcggatcttccggattgatccggtccaggcccattcccagcccgtattcgatcatggtcacggcatcgtgacagaggcggcacagcgagcgcaaatcgtcctgcgtttcgtcgcccccggcgcgtcggtaggtcacgtgctgcaccgtcgcggccggggccttgcagaagacacacaggccgtgatcgaattcgatccgttgcgtgcgggcggcccggtacttctcgttcgtgtagtccgcccgcggccttggcgggggcggggtgtgctgctggatcgcgcagccgactttcaccttgactgaatcacgaatgaccagtcgcggatgatgcaccggcggatcgaacgagaacggggcgtcgtaccagacctcggcatcctccggcgcgatgtcgccatccttggccttgcgccactcgagcaggcaaggcacgtccatcgacgaatcgcgtggagcatcgtgcttgtatcgtggataccacggcacggcctgaagcgccgctctcagatcgccttcgacagtcatcgggttggcccactgctcatcacggtccttgcgcggctgggtgaacacgggcgccgatggcggacacgacttacgccccagatacagggaccaaatgggcgagcgcagcgcagcggcaagcttctcgatcagggccggttctccttgcagcgccaccagaaagctggcatcggcgaggtattcccggcgggtgatgagggtgccttgcgctcccgtcttgatcccacccccggccgtcgtcatgccggtgccggcgccgacggtgtggtaatcccaccagcgcgtgccgggccggtcgatgcgcacgcccatcgccagcgtgttcaactccggcagcttctcgcgcgccgcccggcgcgacagtcccatcgcgcagcagagcagccccagcacgccagacttggtcggcgcctccatgcttcggcggatgacgaacttggacgtatcgccccaggactggagcggaccttccagacgaagaaagagcgtgttgttgccggaattcattatgcggctccagcaggcttgtaagcggtcacggcgtccatcacacgcttcacgaaatcgtcgaagctccctatgcttccgtcgccatcgatgacgggcttctccttcttgtcttggacatacgtcagtgcgtgacggttcgacggcgagaaccagaatcgccgggccttgattccgtatccatttgtgatgtcgtgaacgtactgcccaagtcgggcgatgctctcgccaatcaggccgcgttgggccttctccgaaaccgggtcggcgaaggcgttggcgtagctgaccggcgtggaagagtcggtcttgatctcgacgagaatgccatcgggcaggttgaacgcagcgtacgcatgctgcttgccggaagggttcgccctggcagcagcctcgataaaacacttgaccgtcgttttggcaaggtcaacgtccccgttgagattgcgcacaagctggtcccagccaatggcaaagtgcttgtagaagcatgccgagttgaacacgccctcgttcacatgccctgcaccggcgtccgggccgggaatatcatccgccgcggtgaagtaatccacttcgttgataacggcgtgtgtagaaatggcgtgggcgaccgaaagggcggcttcgacggtgaacttgcccttgagactctcaaaagggcccttggcgctgaattccgtcattcgtccgcacagggcgatgtcgggagtctggacgaacttgcccatgatttccgcaaatttcgcgccaagattgctttccccatcgctgacggccttgcccatctcgtcgatggcggactgaggcaggaagaagaggatgtcggacctgtatacgtcgttcttgtccagccccacgccgccctcctcaaagaccttgcggatggccttgagatgtttttcctgcggtggattaccgttgccagccgcggctttcgcaatctcctcgatcagcctccgcgtgcgcaccgcgtgatctttcaccagcgccgctgcgaactccgggctgcgccggatgctccgcttgaggcactggctggagatgcgggcgcgggtgactccgccgaagatgcacgtcttgggcgcgcccagatcgtcgcggttgaggtttgacgggctgtggttctggatcatgtgaaactcaatcagcatggccggctccttgcggttgatggttcgttgcgttcagatactgctccgcccagatgtcgcgaatgtcgcgatcgccgcggtgctcttcgccgcggtcccagatggacaggtcatccaacagttcagcccagtcgatccccgtcacgccacgcgcgcagggcgtgcgcccggcgacggcgcgggcgatctggtccagcgcccagcgcaggggcgtctcgatgttggccagggatgagcaaagcagcgtgtcaaaacgtgtgcggaagcggttgcgtgccctgaactcaggcggatcctgcggttcgcagcggcccaggactgcgggaaggtccggcccgcggccattctcgggccgaacgtgcggcaccgatgagccaaactctccatagagcctggcgatcagccagctcgtttcgcgtcgcggagcttgcgggctgccttgtcgcagcggccaccacaggccagtgaaaaggtcaaagccctcgagcgttttgtccaacggctgaccggcgagtcggcgcaggcgcgatcgctcgccgtccttgaggtctgccaggcgattgatgaacgcttcggtggtactcacgccgcggcctccttctgtggcttcacggccagcttccgcaacatcgccgacaattcggaattcgcgcgatccatcgcttcccgcctccgcagaggtgacccggcagtggaagatatcaccacatcgcgcacaggaccttgaagcgcccgtttcaagtccggcgaaccgtgcgcgctggtaatggcctctgtacgcaactggatttcc

SEQ ID NO: 809 - DNA, 5656 bp, Artificial Sequence
  Synthetic Oligonucleotide
cgatagacatttcgtaaccagagacgcccgggcctcgggcggtccggattgtcaccagtatcaatgagcagataggagtgatacatgatcattcgacctcctcggcgctaagccgtcgacgtcgagtctccagcgaacgaaaccgaatgatctcctcacgcttggcgataatctggtcgcgccattgtctgtcttcggggttgatccggtcgagccccatgcccatcccgtactcgatcatcgtcaccgcgtcgtgacacaaccggcagagcgagcgtaaatcatcttgctcctcatcgccgccggcgcggcgatacgtcacatgctgaaccgtcgtcgccggagacttgcagaaaacacacaggcccccatctgcgtccaggcggctctgacgcttccggcgatactcagcattcgcgtaatcggcgcgggggcgcagcggcgccggaaggcgactctggcgtgccgcaccgactcggatgtccgtgccggagccgacgcccatcttcttgcgaacaaccattcttggggagtgtgctggcacatcaaacgagtctgcgacatcgtaccagacttccccgtctagtggagcaacctcacccgctgcggcaccccgccattcgatcacgcattcgactacatcgggcacggcctctcccgcgtggcggctccgccagggaacagatcgaagcgcagattccaggtcaggaaacccgcccacatccggatcgtcatggcagcccaccagtggaagcgatgccgcgcacgacttccggccgagatacaccggccacaccggatgctgaacagctttgtgcaacgaaacgatcagtgaggaatcgccacgcaaagcaaccacgaagctcgcgtcgcagaggtattccctacgcgtcagaatcgggccgggtttggtctttccgattccctccgcgctttgcatctgcattcccgcccccaccgtgtggtagtcccaccagcgcacgcctggacgatcgatgcggacgcccatcatcaaagcgttcaacttgatgagccgttgccgagcatcggagcgcgacacgcccattgcagcgcagagcagcccggcgatccccgatttggtcggagcttcggaagtccttcggacgacgaatctcgattgctggtctccccacgattgaagaggaccttcgaggcggagcaggagcgtattcgcattcatcggcgcatctcctcactcgaccgtcacggactgaacgcgcgaccagtcaaacccgatttccttcacgacaagagccactaggccatcgagggatcctacgttttcgtcagcacagggggtctcctgcttctcgtgctgataggtgagcggataccggagattgggggagaaccagaaccgcttgtcctcgcgctccttgccgtacccggtgtccaggtcatgcacgtactgaccgagctgtgcgatgctttgcgacacaatatcgcgcgttcccttgctcggcaccggtgcagcgaatgcgttcgcgtagctgattggcgtggagcgagtttgctttacctctacgaggatgccgtccggagggttgtgggcagcgaagctgttctgcttcccggtcgggttcgccagcgcggctccacgaatgaaggccccgacggtgtgggcggccagctccctgttcccgttcaagttgtccaccaatgtttcccagtgtatcgagaagtatttatagaagcaggccgacgcgaacatggcttcgccaatgtgcgcaccacccgcatcctcacctggtatgtcatctgcagctacgaagtagtccacttccggacgagcttcgtgggttgatatcccatgggccacctgcaacgcagcctcgatgtctagatcaaggcccttccagacccccttgtccttggcgctgctgtcggccttctcgtcctcctgttcgtccgtgtccgcgttgcgaccctttttgctcttggggggcttggctggttccagcatgcgtcctgacaatgccatgtccggcgcatagcgatcctgtgcaacgaggcgggcgaattctcgcgagagtttggcgactcgcttctctgtcacttccgcctcttccgcacgaagcatatccaccatgtgcgcagtcgcgctctttgacaggaaaacgatgacatccttcttcccgttctttgccgcgtcgtccttcgcaagcccgcacgcctgaaccaccgcagtggccagcgaaagcatgtctttttctgcgatctgggacgccaggtattgcggcagtcttcgcgtgcggatcccaccacacagcagcttgaactgctcgctggtccggatgctcctcttgatgcactggctggagatacgtgagcgcatcaccccgccgaagaagcatgtctttggagcacccagatcatcacggttgagattggccgggctgtggttctgaatcccatggatttcgatcagcatagtattctccttttgagcatgtcactgcccgaagtgcaggtattgcgtcgcccagttgagccgcgtttcttcacgctcccatgcggacaactcatcggtgaggcgcacccagtccaactcaccgctgtctttcgcaatcagatccagcgcccaacacagcgctggctcgatcagggtcagagggagcaggaggagttcgtcgaacttggcttgtcgtcgctgcatcactggctcgctctcgcctttcacattccccagctgcatggcaagccttgctcctttgcattgtcgcatcgggcggtacgcatacactttggcaaccagccacgccacctcacggcgaggggctctctggttctgttccctcagtggccaccaaatccccgtgaaaaggtcgaaaccctccactgactcatccaggctgcgcccacccaggctgcgcaatcgcccaaggctgccaggctcaagcgattccagcgttcggacaaacttctctgttggcgtcatcgttcgccgcctttccgtggtggtgcttctcccttcctgcaccgcgatgtgggcgccatgtccggaccggatcgggcaatctgattgcgtcggcggatcgcgcgcgtcgtaaaccctggcgcaagcgacatcgccactgccgccatcatcttctggtactctctcgttgccttcacccactcaccttcagcgtctgacagcagcccgtcgatgcggctggcaagccgtgactcgacatgtgcccgaacagcaccgagaacgatgtccagttcgacttcgtgtcgagtggaggaagcacttggcgaacgcgcccgtcgcatgaccgctcttccttcttgttgccactgctccgccaacgcgatccagtcttccgctggcgacggccaccgttccggcgcgaccaggagttcagttgcctcgaggtacttgtcgttcttgactgtggagaagccgactgcccagatgcccgctccttggtcaaccgtcctttgtccgagaatggctgccagagccctcacccactgccccgccgcggcatccttcgatttcagagcgtcgcttgtctgaagtggtccggtcgcgtttcttcccagcggcacggggaccacgtgtggatcacgccacctccggtcttcacccctggagccgcctttgccgtcgaacacacatcgccgaaggacgcgctcggcccgcccacaggagacacaggccgtttcgttcttttcccggtttcccaaccatacattgcgaggaagccaggtcattcctggcagcaggggcacattaccccgtcgggggagttcgtatcctggtgtttcccattctggcatgcccagtgacgcatccccatatctccaggacaatcgcagagtcgtcgcaagcgtcgtgccgaccggtatgacgtagaggggtggctttgagttgatccctggcgactttcccttgccacccgaggtcgcgaagaccggcagccgggccaaacccgtggcacaacaagctgcgcacaagccacccgattggtcggtagtgtgatggaagtgccacgcattcgtaccgctcggcacttcgtgcatcaggtaatgtgtggtgtgcttcggtggccggttcttgaggccctcattctgaaagaaacgggggccatctccaagcagattgaagtacttccggcagtcatcgagttttttgaaccaatcaggcgggaagcgcccgtccccactgaggcgatcttcctcctcctgcggagacgggtatcccttgcaccaatacagggccgcaaggagcagccgcacgatcgccactcgatccatcgggttggacgccgcgatctgccggatactcccggcctctgtcagcgcctcgcggatgccgacacggtcacaagtgccgttggttcgcagaaccggaatccacgcctcgtccagaaggttgaattgcataagcgtgtcccttctgagaataggtgtttacggcatctacaataccgcacagccccggggactgcgaagcgacagagagattgttcttcccaacctacctgtaacccgggggaccgacaaggtgtgtcgcaccgccggcaaaacgcagcaactcagccaaagctgcgaggttgctggctctgctaacagctgaatctacagaaagttgcgcgaaacggcagaatgccttcctatcatcccgtcacccgctccgtcgtggtcacccgccgcccgcagtaccggcattcccggcggcgaacgatccggccaccccagcgggcccgggtgtagactacgtagaagtgcttacacccgcacttcgagcagacgaggcccgacggctcctccggcttgggcggtttgacctggtccttcctcatcgccgtcctcgctgcaactccgagagctttcgccggcccgccggccgcgggcggcccatatcttgggttccgaagagcaccgccccctgcatcgaggccgcgaccgcagacccgaccaggcagtccagccagtggttctccagcccgctggcacggagcttccactcgtcgaccgtccggccgcgcccctcggtccggaccgggtactccgaggtcaaatgctcgcccagcagccggtggtgctccggctggcggccaaacagcgtcaggcaacccggatcgccctgggccgtccggaacctcgcctggataaaggacttccagtagttcgtgtcgtacacgacgtggcggatcgcccgccggccgctcgtgtgcgggatccgccagttcagcccgacccggtcaccccgtttgcgcttgtactcggcgaatggaatgcttgacgcgcctacgtatttcccgtggctgggggtcaggacgctcgcgtggtcgctctgccggcagaactcgtacaccacgtccgtcgactggccccagtttgcgtcgatcaggcaccgctcgatccgggccgccgacccgtcctcccgcttccactcccggcccagcatccgcccgcacagccggaccaggcccgcccggatcgacccctcgagccccgcccggggcgccgcgacggccagggtgtgccggacgtcacgcagggtgaagtacgccgccttctggtccggctcggtgccgtagtcgatgacgtacccggtgaaatcgtcctcccacgccacgaccagccagaacagcaccttggcctgcacgtcgatgaacatggtcaggtgcgtcacagtcag

SEQ ID NO: 810 - DNA, 5607 bp, Artificial Sequence
  Synthetic Oligonucleotide
cttcggaacccaagatatgggccgcccgcggccggcgggccggcgaaagctctcggagttgcagcgaggacggcgatgaggaaggaccaggtcaaaccgcccaagccggaggagccgtcgggcctcgtctgctcgaagtgcgggtgtaagcacttctacgtagtctacacccgggcccgctggggtggccggatcgttcgccgccgggaatgccggtactgcgggcggcgggtgaccacgacggagcgggtgacgggatgataggaaggcattctgccgtttcgcgcaactttctgtagattcagctgttagcagagccagcaacctcgcagctttggctgagttgctgcgttttgccggcggtgcgacacaccttgtcggtcccccgggttacaggtaggttgggaagaacaatctctctgtcgcttcgcagtccccggggctgtgcggtattgtagatgccgtaaacacctattctcagaagggacacgcttatgcaattcaaccttctggacgaggcgtggattccggttctgcgaaccaacggcacttgtgaccgtgtcggcatccgcgaggcgctgacagaggccgggagtatccggcagatcgcggcgtccaacccgatggatcgagtggcgatcgtgcggctgctccttgcggccctgtattggtgcaagggatacccgtctccgcaggaggaggaagatcgcctcagtggggacgggcgcttcccgcctgattggttcaaaaaactcgatgactgccggaagtacttcaatctgcttggagatggcccccgtttctttcagaatgagggcctcaagaaccggccaccgaagcacaccacacattacctgatgcacgaagtgccgagcggtacgaatgcgtggcacttccatcacactaccgaccaatcgggtggcttgtgcgcagcttgttgtgccacgggtttggcccggctgccggtcttcgcgacctcgggtggcaagggaaagtcgccagggatcaactcaaagccacccctctacgtcataccggtcggcacgacgcttgcgacgactctgcgattgtcctggagatatggggatgcgtcactgggcatgccagaatgggaaacaccaggatacgaactcccccgacggggtaatgtgcccctgctgccaggaatgacctggcttcctcgcaatgtatggttgggaaaccgggaaaagaacgaaacggcctgtgtctcctgtgggcgggccgagcgcgtccttcggcgatgtgtgttcgacggcaaaggcggctccaggggtgaagaccggaggtggcgtgatccacacgtggtccccgtgccgctgggaagaaacgcgaccggaccacttcagacaagcgacgctctgaaatcgaaggatgccgcggcggggcagtgggtgagggctctggcagccattctcggacaaaggacggttgaccaaggagcgggcatctgggcagtcggcttctccacagtcaagaacgacaagtacctcgaggcaactgaactcctggtcgcgccggaacggtggccgtcgccagcggaagactggatcgcgttggcggagcagtggcaacaagaaggaagagcggtcatgcgacgggcgcgttcgccaagtgcttcctccactcgacacgaagtcgaactggacatcgttctcggtgctgttcgggcacatgtcgagtcacggcttgccagccgcatcgacgggctgctgtcagacgctgaaggtgagtgggtgaaggcaacgagagagtaccagaagatgatggcggcagtggcgatgtcgcttgcgccagggtttacgacgcgcgcgatccgccgacgcaatcagattgcccgatccggtccggacatggcgcccacatcgcggtgcaggaagggagaagcaccaccacggaaaggcggcgaacgatgacgccaacagagaagtttgtccgaacgctggaatcgcttgagcctggcagccttgggcgattgcgcagcctgggtgggcgcagcctggatgagtcagtggagggtttcgaccttttcacggggatttggtggccactgagggaacagaaccagagagcccctcgccgtgaggtggcgtggctggttgccaaagtgtatgcgtaccgcccgatgcgacaatgcaaaggagcaaggcttgccatgcagctggggaatgtgaaaggcgagagcgagccagtgatgcagcgacgacaagccaagttcgacgaactcctcctgctccctctgaccctgatcgagccagcgctgtgttgggcgctggatctgattgcgaaagacagcggtgagttggactgggtgcgcctcaccgatgagttgtccgcatgggagcgtgaagaaacgcggctcaactgggcgacgcaatacctgcacttcgggcagtgacatgctcaaaaggagaatactatgctgatcgaaatccatgggattcagaaccacagcccggccaatctcaaccgtgatgatctgggtgctccaaagacatgcttcttcggcggggtgatgcgctcacgtatctccagccagtgcatcaagaggagcatccggaccagcgagcagttcaagctgctgtgtggtgggatccgcacgcgaagactgccgcaatacctggcgtcccagatcgcagaaaaagacatgctttcgctggccactgcggtggttcaggcgtgcgggcttgcgaaggacgacgcggcaaagaacgggaagaaggatgtcatcgttttcctgtcaaagagcgcgactgcgcacatggtggatatgcttcgtgcggaagaggcggaagtgacagagaagcgagtcgccaaactctcgcgagaattcgcccgcctcgttgcacaggatcgctatgcgccggacatggcattgtcaggacgcatgctggaaccagccaagccccccaagagcaaaaagggtcgcaacgcggacacggacgaacaggaggacgagaaggccgacagcagcgccaaggacaagggggtctggaagggccttgatctagacatcgaggctgcgttgcaggtggcccatgggatatcaacccacgaagctcgtccggaagtggactacttcgtagctgcagatgacataccaggtgaggatgcgggtggtgcgcacattggcgaagccatgttcgcgtcggcctgcttctataaatacttctcgatacactgggaaacattggtggacaacttgaacgggaacagggagctggccgcccacaccgtcggggccttcattcgtggagccgcgctggcgaacccgaccgggaagcagaacagcttcgctgcccacaaccctccggacggcatcctcgtagaggtaaagcaaactcgctccacgccaatcagctacgcgaacgcattcgctgcaccggtgccgagcaagggaacgcgcgatattgtgtcgcaaagcatcgcacagctcggtcagtacgtgcatgacctggacaccgggtacggcaaggagcgcgaggacaagcggttctggttctcccccaatctccggtatccgctcacctatcagcacgagaagcaggagaccccctgtgctgacgaaaacgtaggatccctcgatggcctagtggctcttgtcgtgaaggaaatcgggtttgactggtcgcgcgttcagtccgtgacggtcgagtgaggagatgcgccgatgaatgcgaatacgctcctgctccgcctcgaaggtcctcttcaatcgtggggagaccagcaatcgagattcgtcgtccgaaggacttccgaagctccgaccaaatcggggatcgccgggctgctctgcgctgcaatgggcgtgtcgcgctccgatgctcggcaacggctcatcaagttgaacgctttgatgatgggcgtccgcatcgatcgtccaggcgtgcgctggtgggactaccacacggtgggggcgggaatgcagatgcaaagcgcggagggaatcggaaagaccaaacccggcccgattctgacgcgtagggaatacctctgcgacgcgagcttcgtggttgctttgcgtggcgattcctcactgatcgtttcgttgcacaaagctgttcagcatccggtgtggccggtgtatctcggccggaagtcgtgcgcggcatcgcttccactggtgggctgccatgacgatccggatgtgggcgggtttcctgacctggaatctgcgcttcgatctgttccctggcggagccgccacgcgggagaggccgtgcccgatgtagtcgaatgcgtgatcgaatggcggggtgccgcagcgggtgaggttgctccactagacggggaagtctggtacgatgtcgcagactcgtttgatgtgccagcacactccccaagaatggttgttcgcaagaagatgggcgtcggctccggcacggacatccgagtcggtgcggcacgccagagtcgccttccggcgccgctgcgcccccgcgccgattacgcgaatgctgagtatcgccggaagcgtcagagccgcctggacgcagatgggggcctgtgtgttttctgcaagtctccggcgacgacggttcagcatgtgacgtatcgccgcgccggcggcgatgaggagcaagatgatttacgctcgctctgccggttgtgtcacgacgcggtgacgatgatcgagtacgggatgggcatggggctcgaccggatcaaccccgaagacagacaatggcgcgaccagattatcgccaagcgtgaggagatcattcggtttcgttcgctggagactcgacgtcgacggcttagcgccgaggaggtcgaatgatcatgtatcactcctatctgctcattgatactggtgacaatccggaccgcccgaggcccgggcgtctctggttacgaaatgtctatcgagtacaccagcggctttgcatggctttcccgaatgatgccagaaagcgagaggatccagagtttctcaaaccgtacgatccgaacggctttgtccacgttcacggcagccgcacaaccgaccaggcgtttctcttccggattgacgcgcatgcggggggcagcgtggtcatcgtgacacagtctgccgtaaaaccggattgggcgtatgccttccagaacgcgatgtatcttctgcatgccccgccgtcggagccgcgtgaggcacaactcacgtttccagccggcacgctgttgggattccggctgctggccaacccgacgcgccggttgcgagagagttctcgtgacgccaagggagaacctatcgaaggacgatgggcgggaaaacgggttcccgtgccgacaggcaagctggatgattggctgacacggcgatcggagcgttgtggttttgccgtcgagactttgtgggaagctcggccgggatttgtttacttcagcaagtcggcgagccggggcgagggacagtgccttagatccgttcgatatgaggggaagcttcgcgtcagcaactctgcagcatttcgcgagacgcttatccggggcatcgggccgggcaaggcgttcgggttcgggttgctgtcggtcgcgccggtgcgcgaggggggctgaatggggcatgcgtgaagggtgcggctctttggcaagtgaatagtg

SEQ ID NO: 811 - DNA, 5546 bp, Artificial Sequence
  Synthetic Oligonucleotide
gagccgatgcagatcgtccacgggttaactcctgcccaaccggtcgatgttcggaaacgtgacgctatctacttgtcagagatcggaaagcccgtcgcgggcgattagcccggggggctgatcgcggctgcctcctgtggcagcggcttgatagagagcaggccgaaaccgaaggccttggcagagccgattccggattcgagcaatccttttagcgcgggggggtgcttcaccctggctgtgccttcgaacagcactgaccaccattgcatgcgctgattgggttgcggctcgtatttcgtgcgccagccgtacgcccaggaggtcacaaacttgtctatgccgagcaaatcggctgcgctcccgaatttgcgcgatagccactgcgcatgttcgtcgaacgtcggagcgatgcgccggcgtttgccattgggcgatccgtcttgggccttgcgcgtggggttggccctgaggaggaaccgtatcaggtcgccagatttcacgcgcaggcagtctgacgggcgacagatgagaagggcatccgcgtcaagctcaaggcgaaactcgtttacctgcggcggccccgccagcagaaagccagcgttgccgatgggacggccgcgcgcatcggtcttgccgggcgtgaggccgaacgcataatcccagtcgggtttgtggtgcgactgcacgagtataaccggggtgcggacgccgcgctttgagtctaccggcaaatccacgcggaaaaggaaagagtgcgcggcgtttcttgcctgacgcccgtccgtttcctcagatcctgttggcaccgcgctgtcatgcgacattcgggcaggattgggctgaggggcgcaattggatgctgcccgcgatggaaatgccatagacaggcgttgatggacgcggtagaggttacgcagccagcggcgggtgatgctccagtctgggcggtcgggattgtcgccggtgtttatgaggagcgtggaaaggtacatcaggacgcctcctcttcgagcaagtcgcggcggacctgcgtcggcgcggaccgtagagcgcggcggcggccttcttcactgcggaaagcgataatctcgccgcgtgtgcgaaggatcgcgtcacgccagcgcgcctcgcacgggtcgatgcggtccagccccatgcccaggccatattcgatcatcgtgacggcgtcgtggcagaggcggcagagcgagcgaagatcgtccggggtttcgttcccgccggcctgccgataggtaacgtgttgcaccgttgtggcagggtttttgcagaacacgcagaggccctgatccgctacgaggcgcgcttcgcggcgcttcttgtattcggtgttctggtagtcggcgcgcgggcgcggcggcgcaggcaggcggcgctgcagggcttggccgacggcaacagtgatccgcttgcgcagaactagtcgtggttcgtgcaccggtggattgaaaaagacgggggtgtcgtaccagacctcggcgtcgggcggtgcggcttgcccagcttgtggcgagtattccagcaggcagtccaaggcaatcgttctgcaaggggcgttattctcatcgcgtggagcatcttcgccgaatcgcgggcaccaaggcggagatagcagggcggcttcgaggtcgggaaactcgtccaggccggcatacaccgggcgcgcgggtggacagcacctgcgccccagaaagaccggccacttgggttgctgcagcgcgtgcgccagctcatcgacgagcgcacgatcttccgcttgcagcgccacgaggaagctggcgtcggccaggtactcccggcgcgtgatgagggtgccctgagggccggttttgagtccgccccccgcggtcgtcatgccggttcccgcccccaccgtgtggtagtcccaccaacggatgcccgggcggtccgtccgcacgcccatccggatcatgcgcaaacgggccagttcttgacgtgcccggtcgcgcgagatgcccagagcgcagcaaagcaacccaagcacacctgacttcgtgggtgcttccatcgtccggcggatgaccatcttcgacgtatcgccccaggcctgaagagccccctcgaggcggaggaagagtgtgttcggttccgtcatttcgccgtccccgcaggcgtcgcgcctgcctccaccttgtccatgactgtacgaaggaaccgatcgaactcgccgaattcgttcgggcctaccactgattgttcttgctcgtgttctttcttagtcttgtcgatccaggtcaggcgatggcgcagattcggcgagaaccagaagcggtcggcctcgatcccgtagccttcaatgagatcgtgggcatactgcccaagtctggcgacgctttcgccgatcagaccgcgttccgatttttccggcacggggtcggcgaaggcgttggcgtaactgatgggcgtcgccgaattggttttgacctcgaccagaactccgtccggtagattgaacgccgcgaatgcatgctgtttgccggaggggttggccctggcggctgcttcaaggaaacatcgtaccgtcttgcgggcgagatccgtatcattcgcgaggttcttcaccaactgctcgaagtcaatgacgaagtgtttgtagaagcaggcggagttaaacatggcctccttgacatggcccgcgccggcatcctgcccggccacgtcatcagcggcggtgaagtagtccacctcgttggtcgcggcgtgagtcgagatggcatgggcggcggagagggcggcctcaaccgtgaactggcctttgagtccctcaaacggtcccttagcctcgaattcggtcatacgcccgcaaagtgctatgtcgggggtcttcacggagttgcgcatgatcttggcaaatctcttgcccaggtcgccgtttgcctcgcgcacggcggcacccattttcgtgatggcggattggggaagaaagaagagtatgtcgaaagtgttgtcatccttgaggccgaccccgccatccacaaagactttccgaatggcctcgcaatgttcttttttcggtggattgccttcgccagccgcctcttttgcaatcgcctcaatcagccgccgtgtacgtacgccgccgtccttttccaaagcggctgaaaactccggactgcgtcggatgctgcgtttgaggcactggctggagatgcgcgcccgggtcacgccggcgaagatgcaggtcttcggtgcgcctagatcgtcccggttgaggttggccgggttgtggttttggatcatgtgaatttcgatgagcatgttcatgttctccttccgagtagatgatttgccgcattcagatactcgcaagcccataagtcctgtggtgtacggtgagcttcaccacaatgcacgagccgttcatgagcgtccagccgattcttctgcggtgggtggtggggattgtactgtccgtcccagagccagaggtcatcgagcagatacacccagtcgatccccttgacatccttcgcatgcggcacgtgccccgcgaccgcgcgggacacctctcccagggcccagcacaaatgtggctccagcgacgacagagccgagcaaagcaatgcgtcgaagcgacggcgatgcttgcgcgccgcaatgaactggctcttgcccggctcgcggtccggcacagcggaactaagcggttcggcgtccgtgcaagcaggacgcggcggttcacagcggcccaagaccgcaggcaaagagggtcctgcggccgattccggccgcatgtgcggcacgtggaaggcgctgaagagtttggctacaagccacgaaggctcgcggcgcggcgtggccggacttcttgcgcgtaacggccaccagagacccgtgaacagatcgaagccctgcacggttgcgttgagggactgtccggccaggcggcgcagcggtgagcgctgcccttcttttagcgcttcgagaccttggatgaaagctgctgtctggctcacgatttacctcgctttcgagttgacccgcctctgcgcgtgcacgtgtcgggcggtctagcttccaccgtcgccggtgcgggcatcggcgtctgtaggccttcgcctattctgcgcagttcggaccacaggagccgctgcgcacgcgcgagagcttcctgtctccgtagcggcgagccggaagtgtttgcagtaacgatctgctcaacgacgcgcgcgagtcgaagttcgaggcgctccaatatgccgattgcggagtcgccgcatgttattgagttttcgagggcggctcggaaatcagcttcgaaccacgccgaaagggcatccagagcggctttacggttagagtgctgtctgtctggatttggagtgctgcggcgcacgatcgcgctgagtctggcgaccgcgtcgcttaaagcgcccagtgaactggccgggttgccgtcatactcggaacaacggaacagcactgacgtggcatcgtgatacagcagtccggtctgggtcgtggctgcgccgaccacggagacagtgtgcccgtcaaatgtgcgtgaggccgcggcaccgagcgctcgccgccaaaagccggtatgcgcgctcacacgatgcccgagacgaggaaacccgagtatcgtccgtttcaccaccgctgttcggccccgtcggcgctgcggcccttcgttaccgccgtcagcaatggtatcctcttcgtcgattgcgtggccccttttttcgaccagcaggaggtgcgggtcgcgttcccaaaaattgcgctcctgacccttcgccgcaaacggagacttccagccgccggcgaagtccaactcgcggatcagaggcgctgtttggccacagtgggcgcacctgtctgaatcagtacactgccccagccaaatccgccgtgggcgccaggcgaaggctgtcacgacatcaaagctgtctgaagttggcgcatcgcaacgcaaccagggcggctcggcattgcatacactgtctttcggccagtgcaaaagaagcgttttcaacagcgtcgtatcctgcgggactgcgtaagctggggcagacccgttgagtccggaaacataacccttgccggcgtagttcgcgaaagcgcaaaaccgcacgatccccagggcgcagcaggcggggcagaatccatattccttgtcgcgcacatgttgaaagtgagctaccttcgtttccgtcgggaactcaatcagcaaatctccaatcggtcgggtcttaagcgcgcccctcttgtcctggaagaaacgcgggggatcgcccaacaggttgaagtgggctgcattgccaggccccagcttatcttgcagccactcctcgggaattccctccgcatcttcgagcgcgatgtcgccctctgtccgcgttgatttgcaccagtgaaggaccgcgagtaggaatctcagcagggccacgttgtccattggattcgaggcggcgatctgccgaatcattcccgcccgggtgagggcgtcgcgaatgccgactcgccccggttgtccgtcgatccacagtactggaatccac

SEQ ID NO: 812 - DNA, 5543 bp, Artificial Sequence
  Synthetic Oligonucleotide
  misc_feature (1319)..(1319): n is a, c, g, or t
  misc_feature (3642)..(3642): n is a, c, g, or t
atctctcatttcggttcacccccacatgcatggggaatacgccacaatctcattaaaccttaagaggtaaccggttcacccccacatgcatggggaatactatcctgaaacgccccaatagatattggatgccggttcacccccacatgcatggggaatactatctccttatggctcaatggctccagccgcccggttcacccccacatgcatggggaatacacatactcagcctccttgaaaccgcgtttgaccggttcacccccacatgcatggggaatactacaagcctctgtccgcgcgcggcggctggcgcggttcacccccacatgcatggggaatacttctgccacagttcggagttcaggtctgtgcacggttcacccccacatgcatggggaatacatttactgtatccggttggcatctaaatcctccggttcacccccacatgcatggggaatacggatcaagtcttcgattatgccggcatcgatctggttcacccccacatgcatggggaatacgacctcgccatcgcggagggtgccgccctccacgatcggttcacccccacatgcatggggaatacatcggtttcaagcgcggataagcgcgtgtcctcggttcacccccacatgcatggggaatacgataggtgcgcctgccgttatggtcggctcttcggttcacccccacatgcatggggaatacatctgcgacatcccagcggaacacatcgtatgcggttcacccccacatgcatggggaatacgcgggactgcgtattcggtaaatctgtcggagcggttcacccccacatgcatggggaatacatcgttctcttccagccaagacaagaaaatggcggttcacccccacatgcatggggaatacccatctcttttggcgaatggcgatattttccacggttcacccccacatgcatggggaataccggccttgatggcaccaccggcgccgctgggtcggttcacccccacatgcatggggaatacgcatggatagccacagtacgttgcgttgcccgcggttcacccccacatgcatggggaatacgataatagaggcgatgaatgaagacaaacaagcggttcacccccacatgcatggggaatacacttgatcaatagaggtctaagaggtcattgaacaccttcaagccttagtttaaggatgcttggtcataagtttgataccctcccattccgtaacgactcttgatgcggcaccccagaattcgatatcaaacccttgctcggtctgactactccagatcatcaggcaagttccaccgntgcaattgcttctaaccttatcccacagtttatctctaaccattgctgagactttacccacaaacaccccggcttttacttccagcagccaacgtgtgatcttacccctcagggagcttggcacattttccaatactaaaaccaccatcaatcttcctttggcagatcatcctgcccgtaagatatgccgcctggggaaacttctccatctggagaccagagtcctccaggcaatgctggttcttcggcaaaacagtcatccaggctatcctctggcataatatcaccgaagagagaactaatatccgcgacaatgcgtttgagtagattctgcctgtggaattcatcacggcaggcaagcctgactctgcggtcgagttcgccgatcccttcagcggtcgcccggaatgcggcgggagcagccatttccattttgtatagatccgcgatatcatagacaaatgacagttgcttgccagtgtggacaaagcccaatccgggagagaatcctgcagcaacaatggcagcgtgcgatatgccgtagaggcaggagtttgccacagataatgcccggtttatgggatccgctttattccagttgtctctttgatagtttctgccctgcatgggcacaccatacttttgggagagttggaaataggtatcgcgcacccgggcaccttccttgcccctgatctggttcaaagttaaatcaggagaaagctcatcctggaacctcaactgatacatggagcgcacaacccgtaaatgcaaaaccgggtctgcccagtactttgcctgtttcataagattgacggcgctacgggttgtacctgtgcctgcggcatagaacctgacgccatgttcccccacccaggctaccagacagccacaggcagccagtgaaagtattgccgcatgggtgatggttatgcccggtcccagcatcagcatagccaagccggcacaaggaaccggggtttctcccagggcatcgtgaatggcgatggcttgcccgttctgatcaattttggcatgctccacatagagatagctaagccgatctctgatccgggggatagagtgcaggtctttattcatcattcctgattggcagaacggacagcaggccaaagccgaagcttttcgcttttccaatgccgctgctaagcgtttccagaaacagtttcgggtcatccactttgagaattccctccagtagagccgaacggaagcgcagaggattgtatgtgtgttcacgccagtagccctgtccctgttcctttgctttgacatttttgggttcaggcttggagccataaacccaacccagttgaagaagctcacagcgcttaagggtgaagcccagctttgggcttttggcagccagccagtcggcaagggcctgatccggggtggaagagggatcccaggtgagagaaacccttttgtgcaggatgttgccagtttctatggtttgaccgtcctgttgcaccttctcaggaatataacggcgtacgctggcgtttacccgcagcctgaaccggagcagttgtcccgcttgaaactctggattatactcctttgtttccggcggcgcggccaggaaatcaaacgcgttttggaagcaataatcccaatccggctcaagaacggactggacgataataatcgcccttttatcgtttccgtcgatgttgttatcgacccggaaaaggaagggagttttttggaagtcgtttggcgaaaagggcttcaggaaatgcggatcctgctcccggcgcaaacctgaagggaacgccatggaaaggcggcggtggacgttatagatattgtccagccactttctgccggggcggggacggtctggattgcctccagtatcgatcaatagcttggacaagtagatcatccgttttcctcctctggcttcattttgcggaaacgctgcccgcgcgaacggaactcgactatttctttgcgctttgccagtattcgctcccgccagatggggtcgcaggggtcgatgcggtcggtggtcatgccggaaccgtattccagcatggtgcaggcgtcgtggcagaggcggcacagcgcccgcaggtcttccggtatttccttgcctcccgccctgcggtaattcacgtgttgaacagtcgtggcgggagctttgcataccatgcacgcggcatggtccatcacaagccgctccgccctgaccttcttatactcggaattgttataatccgcccgggttcctttgggcctccaaacgctggttccggtttccctgctcacttgcacatcctctcccacaaccagntcacgcctgatcacgaagcgcggcaaatggcggggcggctgaaaagaaaccggcagatcgtaatgaatctccgcgtcatcaggcgcatgttctccgtcctggctggggatccagtccatgacgcaaggcagtatttgcggcaggggttcattgtgccagcgcttttgcaggggaaccgcggacagcgcctcctccaaagtgttataaaagcccggagcatgctcgcccacgggacgtgaagggggacaggatttgcgccccagataaattgcccagaccggcttggccagagcggcggagagcttttccacaagttccggctcaccctgcaaggcgaccagaaaactggcgtcggcaagatattcgcggcgtgagagcaaggtctctgccctggtttttactttgcttggtgtcagggtttcagccagggcagctccaaccatggaaggttttttgggtgccttcagctctgccatgcgcattctttgtcccgctccaacagtatggaagtcccaccagcgtatgccggggcggtctatccgcacgcccatgcgcaggttggcgagttttgggagccatgaatcagcagcctccgcgcgcccaattcccatggccgcacaaagcagccccaggacacctgattttgtgggagcgtcggtagtcctgcgcaaagcaaacttagcctcgttgctgccccaggactgcaaagccccctccaagcgcaagaataaggtgttgggtggcgcactcatgttagccgccaatataagccttgcttttctgaacttcttcccacttgaagccgccaatataatccaacacagcgcctacaagctcattgaggttgccaatgtttctggaagccagtttggaatgcttatagccaagggaatagcgattgtttggagaaaaccagaagctgataactggggattgctcatcataatagccaagcctgatgtcgttcacgtagttggaaagctggccgatgctttgttccaccaggtccgattccttgaccacggaaactggcctgacgaatgcgttggcgtagctaataggggaattcttgaactcaacaaggatgccatcgggatagttatgagcggcgaagctgttctgtttgccactggggttggttttggcagcagcgaggagaaaggcacccacggtgtgggctgccagattcgtgtcccctttcaggttcttgaccaactgttcccaatcaatggagaagtatttgtagaaacaggctgaggcaaacatggattcgccaatatgacccgccccggcgtcttcaccgggaacatcatcggccgccacaaaatagtctatctcaggtctggcaatgtgggtggagatcgcatgtgcaacctgtagggcgccttcaacgccagtgtttttaagctctttggtctccaacatcctgccgcaaagtgctatatccggagaatggacgcagtttgtgagcaaatctttgaactgcagcagtttttcgctttcacttagtttggagtcggaaagcagctctgccatttggcgcagggcatcataagtggtaaaaaccagcatgtcagatgtatcagccgcctgctgctcatcctgatcttcatcggcttccgcgggtatcttttcggacttttttgcagctttcttggaagatttggttttgattccgcaggcttcaagaaacttggcaaccagcttcttatctttgttttccagcatttcttcaagtttctctgccagacgccttgttcggatacctcctctaaggtccgcgaattccggggcaaaacggatgctgcgcttgatgcattggctggagatgcgagaacgtaatactccaccgaaataacaggtcttgggggcgcccaagtcgtcccggttaagatttgccg

SEQ ID NO: 813 - DNA, 5522 bp, Artificial Sequence
  Synthetic Oligonucleotide
cttgcgcctccgaccttgcgcttggcccgcccactgccccgcccattttttcttccggccccattgacaggcgtacagcgcttgataatctgaacgggtgcggcgcgaaatctcccacggcaggcgaagggaggtggcaggtgatgtgcgaatctccgccaggcgagcccacgggctacaatttgatcgacgagccgtggattcccgtgctgtggtgcaacgggcgcttcagccgcgttggcatccgcgaggcgctcattgaggccggccgcatccggcagatcgccgccagcaatccgatggaccgcgtggccgtggtccgctttttattggcgctgctgtactggtgccgtggaaatccaccaccgggcgcggagggcgatttcctagagtcgcttccgactggttggttcgggaggctcgatgacaatagggattgcttcaacctgctgggcgacggcaagaggttctatcagtacaaaggggatcacgacaagccgcttaccgcgaattacctgatccacgagataccgacgggcaacaacttctggcatttcgcgcactctaccgaccggcgcgacgggctgtgcgccgcgtgctgcgccctgggcttggttcggctgcccgcgttcgccacatccggtggacccggcaagtcgccgggtgtcaacgccaagccccctttgtacgtggtcccactcggcgattccctcgcgaccaccctggccttttcgtggcgccgggtgccagccctgggcacgccagcctgggagcagccggaccagcggcttccgggcggtggcgaggtccccttgctgctcgggcttacgtggctcccgcggcgggtctggctcgccagcgtggacgccagccccgcaacgtgcatctcgtgtgggcagcgtgcccgcctcgtgcgtacctgcgagtttgccggcaccgggagcgcgaagggcgatgccaacggtccacctcgcgtctggcgcgacccgcacgtcatttacgacgtccgtaaccggagtctcgccgcgcgcgacgcgctcgggtcgaccgacgccgcggcggggcagtgggcgacgatagtgggcgggctcctcggcacgcgcgacccggcgggagtccgcggcaaactggtcgtcgggttctcgacggttaagaacgataagtaccttgaggcgacagagtggctacttcccgcggcacgtcgcgccggcgatgcacgtcagatttcaaagttcgagcggtggcagttggagggcaagggcctgctccacaagctgaagcctcgcggatccgccctccgccaccccgagatccgctcgatgctcgatgcggttcgcccgcacgttgaaagccttgtatccgcgcgggttggagagctcgtcgtcggcggtgacaaggcttgggaggaagccgccagcgagtatcgtgtcatgatggggatggctgcgggatcgctgtcccccggctacaccgcgggcgccaccgctcggcggctagagattgcggcggcggggccagacctacggtccaaggcggccccagccgcgaaatccaggcgaaggaaaggcgcgaaggagtgacggccaccgaacagttcgtcagtgtgctcacgcggttgaaggccggcgatctggctctcctccgcagccatgcggacgagggcatagacgaatcggtcgcggcgttcgatctgttcgccggcatatggtggccgttgcgagagaggagcgagcgggcaccccgccgcgaggtagcttggctcgttgccaagctgttcgccgcctgccccatgccgcattctccgaaaaggaccttagcaatccagctacggcgatgccagccgggcgacgaggggaagaggcgccaattccgcgaggaattcgaccggatgctgtcgctgtcgctgcgcgagatcgagccagcgctgcggttctcgctcggccggatcgcctcgggcgaccgacaggtggactgggttcgactgacggacgacctttccagatgggagcgcgaagccacgcggctcgcgtgggcaagacagtttcttgggattgacgacggaggttagcgatgttcatcgacattcatgcggtccagaatcacagcccggcaaatctcaaccgggacgacttgggtgccccgaagacctgttatttcggcggcgtcatacggtcgcgcatctccagccagtgcatcaagcggagcattcgcaggagcgacgcgttcaagtgtctctgcggagggattcgcacgcgacggcttgccgagctaatttcgaagaaggtctgcggcgagggccagccggaggcgggccccgccgtgaggaagcgcgcggcggccatcctggagcgctgcggcatcgcgcccaaggacgaggccaagagcgacgtgctcgtttacacgacttatgaggcagtggcggagatgtcggctctccttcgggaaggcgacggcaagacagaggacgccctggcggaggagttcggcaggctaatcgttgagcgcacagcagtccccgacatggcgctgagcgggagaatgctggagactggcgtacttcaggagaccacggttgacgccgcgcttcaggtcgcgcatgcgatttccacgcatgaggcccgcccggagatcgattactacgtggccgccgacgatcttcctggtgacgacgcgggggcagggttcgtggatgaggcgctgtttgcctctgcttgcttctacaagtatttctcggttcactgggaagcgctggtccggaacctcaagggcaacgagaagctcgccgcgcacaccgttggcgcgttccttcgcggagcggtgaccgtaaaccccaccgggaagcaaaacagcttcgcctcgcactgccgccccgacggcgtcctcgtcgagatcaagggcagcccgctgagctacgccaacgcctacgccaacccggcggccccgggggagcgcgacatcatcgcgcagagcatcgcccagcttgcccaatacgttcgggacctggacgtgggcttcggcaagcccgagcaccggttctggttttccccgaatctccgctatcccctggcggctgtcgaaggcggcgcggaggtcccggtgagcgaggtcaatgtcggccgttttgacgatttgattgcgaaggtcgtagccgccatcgggcacgactgggcggcggtgcaggcggcggtccttcaaccggagtgggccccgtgagcgcgaacaccgtttttctgcgtctggagggccccatgcaggcgtggggcgaccagcggtcgaagttcgtggtgcggcgaactgccgaggccccgaccaggtcgggggtgctcgggctgctatgtgcggcaattggggtaacgcgcgccgctgccgcgagccggtggctcgccaggctcaggatcctgcgcatgggcgtccgcatcgatgttccgggcattcgttggtgggattaccacaccgtaggcgccggcacggccatgcgcatcgcgacagggaaaacgaagcccgggcccatgctcacgcggcgtgaatacctctgcgatgcttcattcctcgtcgcgctgcgcggcgacccgggcatcgtcgcggaattggtggccgctgtgcgcaatcctcgttgggcgccctacttgggaaggaagtgctgcccgccatcccgacccttgctcgagcatccagggggtgaatttcccgacctccgcgcggcgttggcgtcggtcgcctggcgcgggcggttcgcgggagagccgcccccgcgggtcgtggactgtctcttcgattggcagcccgtgcccggacagcccgaagcgccgccgaacgcggaggtttggtacgacgtgccgctgacattcgagccgcccgcgcattgcccgcgcttcgtggtccgccagcggctttcggtcggcgcggatcgcgaggttgccgtggcggcaaagccggcgcagaacgccacgccgcgacctccgcgcccgcgggccgattacggcaactccgagtacaagcggcggcggcaggagcgactcgacgccgactgccggctctgtgtcttctgcaagtcgccggcaaccaccgtccagcacgtcacctatcgccgggcgggcggggaggaagcgccggaggacttgcgctcgctctgccggctgtgccatgacgcggtgaccatgatcgagtatggcctgggcatgggcctggaccgcatcaatcctgaggagcctcgctggcgcagtagaatcatcgcgaagcgcgacgagatcatccgcttccgctccctggaaacccggcgccggcgcctcgccgccgaggaggtggagtagccatgccgtacctgtcctgtctcttggtcgacgttggggacaatccggaccggccgcggcccgggcgccggtggctggagcagccctatcgcgtgcaccagcggctcgcgatggcgttcccatctgaccctggcaggtccctccgcgattaccagaggccctacgacccggcggagttcccctcgcaacaggccgcggatgcggtgatggacggcaaggccgacgtcggcgaggagcgaagcgacgccaacgggttcctctaccgggttgaccacggcgtccgcggcggaggcccgccggtgatcctcgtgcagtcggcgcggcggcccaactgggactacgctttcgggctgaccccgggggcgcgcagccccgcgaccggcggccccgtgggcaacgcgggctgcctgctggccgcgcaaccggatgtcaagttcctgaggtttgtgcctcggccgggcgaaggcacgccggaccccgcactgccggccgcggcggacatccgcgccttcgacgtcccgattagcgcaggagcagtgtttcgctttcgcctgggggccaatcccacccgccggctggcacaggggccgttcgcggggaagcgcgttggcgtcggcggcggggcgcccgctatcctcgcttggctcgcccgcaagggtgaggagggcggattcgatccgatcttcgagcccgacgctgccgggtgggacccggcgtggcggatcgaaaccggcacgctgtacgccagcaagggcggggagggtggaaacgtcgtgaggcggatctccatttttttcgccaacatcgacggccggcttagggtcgtcgaccccgcccggttctgcaaagccgttacgctcggcatcgggccggcgaaggcgttcgggttcggactgctgagcctggcgagggccacgccatgaaggacctgcaggaattggcgcgcttcgaggaccgcctcaccttcctgtacctcgaaaaagggcacatcgagcagcaccaacgctccgtggcctacgtcacgcaatacgagagcgtgcccgtgccggcggccgacctggccctgttgatgctcgggccgggcacgaccatcacgcatgccgccatccacaacctggcggactgcaactgcctggtctactggtgcggggacgagggcgtgcgcttctacagccacggccgggggggcacgttccacgccgacaacctcct

SEQ ID NO: 814 - DNA, 5478 bp, Artificial Sequence
  Synthetic Oligonucleotide
ccggttcacccccacacgcgtggggacaatactgaaaaaaggctttgtttacggtatccggacgagaaaaagcccttcaaagtcttcgacagaacgagtcatatcgccccaactccgaaatttaaaaccctgttcgttgttacttgaataaatcatcgcgcaactgcctgatttcgcttgagaacatgatttttcccatagtttatcgcgcaccatggccgagattttcccaacgaagactccagcttttggttccattagccaacgcgttaattcgccccgcaaaccggatgatacgcgttcaagaatcagaaccaccattggtagcctccgtttcttcaactaccaacgaatagtcgcggccaccctcctctctttctgtaatattgtcccacaaagcacccggagctgcggaatcttggtcgaatgaggcgtcattagtcagagttttttctggcaacatcaacaccttcttgacgtccggaattattctctccaacaaccgggtcgaaacaaacaggtcgcggcaaaaaatccgtactcgtctttccaagctacctttctcttctgctgccgcacgaaatgccgctggaatcgtgatttccgctttgtaaagatccgcgacatcataaataaacgacaacatttttcccgtgtggatgaaaccaatagccgacgaaaatcccgctgagacgatagccgcatggcagatgccgtaaagacacgaattggccgcagataaagccctgttcaccggatcagcaacagtccatttgtcgcgccggtaactgcggcctgaccacggcactccggtctccgcggcagctttagcgtatgcttctctgacacgaacgccttccattccgcgaatctgacgaagggttaggtctggatctagtttctcagcaaatctcaactggtataaccgatatacaaccatcaaacggaggtttatatctgcccagactcgcgcctgatgtagaaagttcgcggcactccgagtctcgcccatgcctactgcgtagaaccggacaccttcttcgccgcaccaggcaacgaggcagccatgatccgccagaaccgaaatcgcggcatgcgtaattgagacaccgggtccaagcatgagaagagccaaattggcgcaggggacaggtaccttacctgattcatcgtggatggcaacggcccaggcttcctgatcgatgcgacaatgctcgacataaagataactccatccgtcgctgaactttggcagaacgtgcaggtcctttactcgcacgtcctccccccttcacccgatgcattggcaggagcaaccgaaagcaagccaaatccaaaagctttgccggatccgatgccgcgaattagcgtttccttgaagagctccggattgtccactgtgagaatcccctcgtaacgcgccgagtggaggcgcttcccttggcctttgccttccttattgatatagacgtaacccggctgaacgatggtgaaattcggatcgatggcaaaccctgcagaatcgattgtccgcccgtttcgcatcagccgccaattcgccaaccattcgtggagtttctcatgaacaaacgttcgggggtcttccccctggtgttttccgcgccagtcatcgatttcctggctactcgggactggcacacgtttcccgtgccgcgttttctctttgttctgttcctcttgcgacatcgtgttccagcgccgtttcggcaacgtcgcctttttttgagtcggattcgccaggaggcggaatcgaagacgctggcctttcgagaagacggggtcaaacgatttcacctcaggcggcgcagccagaagataatccgcattgtgaaaggcatagtcccagtcgggctctatggcagactgcacgatgatcatcactcggccgttacagagaggatcgatgcgaaaaagaaagccggcttcgtcgttgcgcggggagtggacttgtttcagggcatcgtactcaacttcgttcttcttccggtcagccaagtgtcgttgctcgggaaaatcgtcctgatcgtaaggtataaggaattcaggatcgcgctttttccgtggatcggatggaaaggccatgcaaaggcgctgatggacatgataacggttcctgagccacaaccgtccaggccgatgccgatcgggatcgtcccctacgttgatcaagagacaggagaggtacatagctattccacctcttcggagacgaggcgtcggcgtcgggtttccagcgagcggtatttgagaatctcggctcgcttttgaatgattcggtcgcgccagcgtggttcctcaggattgatgcggtcaagttccatgccgaggccatattcaagcatggtgacggcatcatggcacagaccgcaaagcgaacgcaggtcctccagggtctcgttgccaccggctcttcggtaggtgacgtgctggacggtcatgcgcgggccgggcgacttgcagaagacgcacaacccggtgtcggctttaattcgttcttcgcgacgcttccgatattctgtattcttgtagtccgcgcgcggacgcggcggtgctggcgtggaagtctggatcggatcccccacttcaactgggactgtgccacgcaggacaaatcgcgcctcgtggaccggtggatcgaagcaaaccggcacgtcataccacacttccgcgtcgtcgggggcgacatcacaatccggggcggaccgccactccacaagcgtttccaccgccctgttcttcggcgcaacgtcagtcttgtaccgcgggtgccacggcatggcgcccagcgcggcgttcaggccgtcataaccggcgggattcgtccacaactcaccctcactgggccttgcaagcaccgggacggacggcgggcaggacttgcggccaaggaaaaccggccactttggcgacgcaatcgccgcggcaatatcatggatcaacttcgcatcaccctggagcgccacgagaaagctcgcgtcggccaggtactcccggcgcgtgataagggtttcaatctcgccggtggaaggcgtccgcttaattcccttcccgtcagctgttataatgccgattcccgctcctaccgtgtggtaatcccaccaccgcgtgccgggtcggtcgatgcgcacacccatcgcaagcctgttcagctccgacaggcgttcccgcgccgcctggcgcggcaggcccatggcgcagcagagcaggcctagcacgccggactttgtcggcgcatccattgtccgccggataacgaactttgacgtgtcgccccaggcctggagtgggccttcaaggcggaggaagagtgtgttggcctcggtcatttcgccgcctctgcaggcgtcccggttgtctccatcttgtccatgaccttatcgacgaactgatcgaactcaccgaactcgtcggaaccgaccacggattgttcttgctcgtgttccttcttgctcttgtcgatccaggtaagacgatggcgcagattcggcgagaaccagaaacgctcagcctcgatgctgtaacctacaacgagatcgtgggtatacttgccgagccgggcgatactttcgccgaccaatcctcgttcggacttttccggcaccggatcggcgaaggcgttggcgtagctgacgggcgtggccgacttggttttgacttcgaccagaactccgtctggcggattgaatgccgcgaaggcgtgctgtttgccggaggggttggccttggcggctgcttcaaggaagcacttcacggtggtccttgcaagtgcggtatcgttgttcagattcgcgtgcaactggctccagtcaatcacgaaatgtttgtaaaaacacgccgaattgaacatggcctcgttgacgtgggccgcgccggcgtcctggcctggcacatcgtcggcagcggtgaagtagtctacctcgttcacgattgcgtgagtcgagatggcgtgagcggcggagagcgcagcctcaacggtaaactggcctttgaggtcctgaaacggcccctttgcatcgaactccgtcatgcggccacaaagtgcgatgtcgggggtcttgacgaactcgccgatgatctcggcgaatttcctgcccaggtcgctgttttcgtcgcgcacagcctcgcccattttgttgatggcggattgaggcagaaagaagagtatttcaaaagtgttctcatccctcaggccgacccctccgtctgtaaagaccttccgaatggcttttaaatgttgctcattcggttgattaccctcgcccgccgccgcctttgcgatcaactcaatcagccgccgtgtacgaacgccgccatccttttctaaagcggctgcgaattccggactacgccggatgcttcgcttgagacactggctggagatgcgtgcccgggtaacaccgccgaagatgcaggtctttggcgcacccaagtcgtcccggttcaaattcgccggactgtggttctggatcatgtggatttcaatgatcattttaatatcctcctttcttttttgacagcgttgagatatgtttcggcccaaatgtcgcgaacatcgcgtccacggcagtgcacctcgccccgttcccagatggagagatcgtcgaggagttgttcccagtcgatgcccttcacatcccgcacgtgcggcacgtgtccggcgacgacctgggcgacctctcccagcgcccaacgtaggtttggctcaagggctgacaggggcgagcagagcaaggcatcaaaacgctttcggaaacgattgcgggacttgaactccggtgggtcgcagggttcgcagcggcccaaaattttgggcaaagacggccccgcacctgaatcgggcctgatgtgcgggacgcggaacgcgccgaaaagcttggcaacgagccatgacggctcccggcgcggagtcgccgggcttttcgcccgcagcggccaccagaggcccgtgaagaggtcgaaaccctggagcgttgcgtcgagcggccgtccggccagacggcgcagccgcgaacgctcaccttcctgcaagtctgaaagcctcttgatgtattcagcggtctggctcattttgtgcctctcttcttgcggccacgtttcggtttgctaggcatggccgcctccgatagcgcgtcaccatgttctgtcttattgagtgtcgactccagggccgatcttgcccgcgccaaggcctcccgccgttgcagcagcgagccagtaatagtggaacggacgacttgctcaatgacccggatgagaatctctttaaccgattgtcgccactccttaacgtcgtattgtaacaatagttccctgaagcaattctccatatcgacatgcgtttggctactgagcgcacacagactcgaacgtatctcgtgccccagggatttttgcccatgcaaactctcaacaatcgcatgccctttcggaggttccccccatactttctccttcgtc

SEQ ID NO: 815 - DNA, 5409 bp, Artificial Sequence
  Synthetic Oligonucleotide
aatggcctgactgcccaggtggctctgatgtccggggacaaatacactttcgctaacagggattggcataaacccctggtcggcttcttacgggcgaaaggcatgtctcggaccgccacgctgtttttagtgggcttcacaagcgttcaagccaaatgtgtggacatttgggaaaagaccattgccctatccggaaaaacaagctccgaggaactgctggaccagatatccgaaagagcctactccctgcacaggatgaggaaacaagaccgccggggcgattacaaggaatccgtgggaatcaccgccgtggcggacatcatcccgcacgtagagcatcgggttgacgtccattcgggcgagatggtggaaaacagcggcaatgtctggcaggaagcggatgaagattacggattcttcatgaagcgttttgccgtttctctggtgccagaaattacggttgccgccaagcttgagcgagaacaactggctcggcgcaagccctggcccctaaaaccaaaatcaattaaaaaaccttcatccggaggcgataatgaatgagagcaccgtgaaatttgttcggagcctgggcgaactcaaagagggcgacctgggcttgctcagaaagctcaggggtcgccgtctggatgaatccctgccgggtttcgacctgttttccggcctgtggtggccactccgcagtataagccccaaaacccccaggcggaaggtggcctggctagtcaccaagcttttcgcggaattccgctttgagcaaaagaaaggcgccagcctgccttggctcatgggcagaatatgccgtggacttaaagaagaaaaagagttcccacgtgttttagccaggttcgaccgcttgctcacgctcgagttgaaccaactggaggaaccgctggcgcaagtgctcgcgattttaaaaagacatgacattgccagtctggactgggttgccctcatcgatgacctctccgcttgggaacgggaatcaaacagagcgatatggtcagacacatttatttcagcatttaataatcagcaaggaggaatcaaatgttgattgaaatacacatgatccaaaaccacagcccggccaacctgaaccgggacgacctgggcgcgcccaagacctgttatttcggtggggtgttgcggtcccgcatctccagccagtgcctaaagcggagcatcaggatgagcgatgaattcaaaaacttgctcgggggtatccgtacccgtcggttggccgagttgattacaaaagctacaggacaggactgcaggaatcaggcagaggaagttctgaacaaagccggtttgaaacacgaaaacggacatagcaagatgctggtgttcatgacccggaacaagatcgatgcccttgctcaaattgtcaccagcgaaggcctgagtgttgcagagaaagccaagaaagcggcagatgtaatatcgggggcaatacattcccctgacatcgctctgtgcggaagaatgctcgagcccgataccaaggacaagaacacagacaaggtcaagtgggaaaataccactgttgaagcagccctgcaggtgtcgcacgccatttcaacccacatcgcccgcccagaaatagattactatgtagcagctgatgacgagcctggcgacgacacaggtgctggattcatagacgaggcgatgtttgcttcggcctgtttctacaaatattactcaattgattggaataccttgataatcaacctccagggtaatgaaaagttggcagctcatactgtcggagcctttatccaggccgctgcactcactaatcccagcggaaagcagaacagctttgccgcacataaccttcccgatggaatattggtagaaataaaagagacacctgtcagctatgcaaatgcctttgtgcgaccggtgggaatcgttaaggattctgacttggtagaacaaagcattggccaactggccaactatgtgaaggatataagtgccggtttcttccctggacagatgaaaggcaacgctctgtggttctcgcccaatggacgttatcccctaaagcctcaacagggcacgctggacataaagccagtttgcaacctgctagaacttgttcgcgaagcagttgagatgttgggttttgaatgggatgatgtaaaaaacgagaaagtagagagttgaaatgtcttctccgcctaataccctgttcctgagattggaggctccccttcaggcctggggaagcaatgaggccaaattcgccgtgcgtaggacagccgacgcgcccaccaaatccggagtggcaggcctgctctgcgctgccctgggaatcagccgggccgaagccggacagtattggctgggtgaaattgccaaattgcgcatgggggtgcggatagaccgccccggcatccgctggtgggattaccatactgtgggagcggagcagaagctgcgcatttctgacctgaaaatgcccaacggcctagttctggttggcactgccctggccaaaaacctgggcgcggacaagatcaaatccaaacccggggctttgctctcccgacgcgagtatttggctgatgccagcttcctggttgcgctccagggtgaaccggatatcgtggcacaactggctgaagcgctgaaaaaaccagtctggacgctttatctggggcgaaaatcctgtcccccctcccgtccggtggatgaacacccgccagggttttatgccagtctgaaagaggctttgcggtcgatcccggcgcaactgagggaaaaaggcgaaccgatacctgacagtgttccctgtgtgctcgactgggttccggcccatgatgacgtgcacgctccgccgaacgccgaagcgcattacgacgtgccggtgtcctttgagcctccccaccacttgccccggctggtgatccgctgtaacctgccattggaccgcaacttcgaggcagagaccgtgctttccggcaaagcctggcaaccgccccgtaaccgggcaaattacgacaatcctgaatacaaaagggtccgcgctgagcgtttggtgatggacaatgccgcctgcatgttctgcaaggcacccgccactactgtgcagcacgtgaattaccgacgcgccggaggcagcgagaagccggaggacttgcgcgccctctgccgcctctgccacgatgcctgcaccatgctggaatatggcagcggcatgaccatggaccgcatagatccctgtgaccccgcctggcgtgagcgcatcttggccaaacgcgaggaaataatcaaattccgctcgctggagcagcgcaggcgcaaactcgatccgaaggaggagaacggatgatgtatctatcccaactgctcatcgacacaggcggcaaccctgaccggccaaggcccgggcgcttgtggctgaacaatatctataatgtccaccggcggctcagcatggctttccccatgcgcaagcgcaaggaaggagacccgaggtttctgcagccctttgaccccgcagattttgaaaagcgccagttcctctttcgggtggacaacaacaccgatggagaaaatcaaagggcgatggttttggtgcagtcgtccctgccgccggattgggactgggctttccagaatgccacgggatttttggcagcccctccccaggttaaggaatacgatccccagttctcagcaggtcagcggctgcgcttccgcatcctcgtgaatgccagtgtcaaacgcaaaatcgacgagttgcgggaaggacccggaggaaaggaaaaaacgggaagggttctgcacaaacggatcgcccttacctgggacacaaattccaacccaaaggatgcggtggcgcaatggtttgccgccaaggctggcagactgggcttcacgcccggggagaccgaactggtaagcctgggctgggtatacggttccaaaccggagccccggggaaattcgccccggcgtgagaacgaataccgtcccctgagataccgttccgccctgctggaaggttatctgacagtggatgatgcctttctgttccgggaagccttggaaaaaggtatcggcagcgccaaaggaatgggcttcggcctcctttccgtggttccggcaagtgatgcgtaacagagaccttcacctaatgccaaaaatgcgggaccgcttcacctatctctatgtggagcatgccaaaatagacaaagaacaacaggcaatcgcctttcacgatgccatgggctccactcctgttccctgcgctggactggccctgctgatgctggggccaggcgtatccatcacccatgcggccatccttgttttagcagaatgcggctgtttggtggcttgggtgggggaacagggagtccgcttttactcatccgggacagggaccacccgtagttccgccaaccttatgcgtcaggctgccgcctggtcaaatcgagatacgcatctgcggatagttcgcagaatgtatgaattgaggttcaaggaaaaactggacccaaccctctctcttgaacagataaggggaaaagagggagcgagagtacgtgatacctatttcagactttcaaaagaattcgatgtgcccatgagtgcgaggaattacgacaggagcaactggaataaaaccgaccccatcaacagagccctgtccgttgccaattcctgtctctatggcatctgccacgccgcgatagtggccgctggctattcacctgccctgggtttcgttcatactggcaaacaactgtcatttgtttatgacattgccgatctttataaaatggaaacctccgtgcccgcggctttcatagccacagccgcaggggtcgataacctggacagaaggacacgcattgcctgccgtgaccagttctatcaatttggtctgctaaagaagatagtggccgacattcacgcccttttcggtattctggaaacttcggacgatgagccagaccttgctgatgtcgatccagccgtgccaggcgggctttggaacccagatgataaagtgagccccggcggcttgtcatggggtctggatgatcctggaggccatgatgatggttctggtgcttgaaaaagttccctctggcctgagaggagaaattacacgctggctcctcgaaatcaaggctggagtatttgtcggtcaggtatcggccatgataagggaaaagctgtgggacaaggccaggtctggttgtgccggtggaacttgtatcatgatttacagcaagcattgcgaacaaggctttggaattgagttttggggtgccgcggaaaggatagtgacagaatgggaaggattgaaattgatgaccaagcatccgtgatccatacttgaagcctgttcaatggcctcaaagc

SEQ ID NO: 816 - DNA, 5389 bp, Artificial Sequence
  Synthetic Oligonucleotide
gccgacccattgcttctcaatcggtcccccatcagggccgatggagtccgcccggaggcgcttcgtgggattcgcaagcagccggaaccgcagcatgtcggcgccagcatacgccggtgagaatgagcgaacatcgaaacaccggagcatgtgccgcgcgttgtggaacgcatagtcccagtccggcttccccgccgactgcacgaggatcaccggggagcggcccggccgcgggtcgatgcggaacaggaacccactgcgttcgtcgcgctgagcgtggacttgccgaagcacgtccggtgccacttctcccccgggtttgtcggccaagtgtcgctgttcagggaagtcacgcggatcccatggcttcagaaactgcgcgtcagtttctgtacgttccctggacgggaaccccatgcacagccgctgatgcacccggtagcggttccgcagccaccagcgtgccgggcgtggccggtcggggttcgtgcccacgttgatgagcaagcaggagcgatacatgcttagttcgcctcctcagccctcgggtgtcggcgctcggtgccgagcgaacgaaacgccacgatctcgtcccgcttctggatgatccggtcgcgccaccgcgggtcctccgggttgatgcggtccaggcccatgttctccccgtactcgatcatggtcacggcgtcgtggcagaggtggcacagcaagcgcaggtcgtccaccgtctcgtcgcccccggcccggcggtaggttacgtggtgggcttccaccctctgcgacgacttgcagaacacgcacaggcccttgtccttgcagaggcgctgctggcgctgcgcctcatagctgggccggggccagcgaggggtgggcgtggagtgctgcagggcacaacccaccgtcactgtgacttcatcgcgctgtaaaaggcgtgcctcgtggaccggcggggcgaaggatttcggcgtgtcataccagacctctgcgtcatccggggcagtcgctccctctcgcgacgctcgccattcgattaggcaaggcaaagccacacgcttctctcgcgctcgctcgtcgctgttgtagcgtggccgccagcacttgtgtcgcaacgcggccaacaggccagcgcaaggggcctcccctgcgaggaccggcgtggccggcggacacgatttgcggccgaggaaaaccggccataccggactcgtcaagccgtggcgaatgtggccgatcacctccggatcgccctggagggctaccaggaagctcgcgtcgcagaggtactcccgccgtgtgatgagggtctcaatgggatcgtccttcgcgccgccggtacgcttgataccttcgccgtccgccctaaggacgccgatcttcgcccccaccgtgtggtagtcccaccaacgggtgccgcgacgatctatgcgcacacccatacgaagctcgttgagctcccgcagccggcagggggccgcctgccggggcacgcccatggcgcagcagatcagccccatcacgccggacttgctgggcgcctcgtaggtccggcggatgacgaacttcgagttgtcgccccacgactggagggggccctccagccgcaggaagagcgtgttcggcgtagataggcccacgtcaactcacctccgcctcgccccgcccggcgtccttgactttcgaccaacggaagccgacttctctcagcacggcctccaccagccccgcggccttgccctcccctccgagagcgtcgaaggtctggtccgcgatcggcacggctttgtctttccccttcaccttcttcttctgtccgtcggcctcgcgttcccagccctgcagtgggtagcgccacagctccgggctataccagagcaaggtggagccgatctcgaaggcccggcgcaggctgtagacgtgatcgccgagttgcgcgatgctgcgcccaacaaggctcagagcgtccggcgcgtcatccgggggatcgccgatcctgcgggccggttcggcgaatgcgttggcgtagctcatggggggcttccggttcttcttgacctcgacgaggatgccatccggtcggttgtaggccgcgctgctcttctgcttgccggtgggcgtggtcacggccgcggcgcgcaggaaatgccccagcgtcgcggcggcgaggcgctccgcttcaggcttcagttcctcctgccacttcttgtgagcgtccccttccggatccggctccgacccggcgaggttgtgcacaagctggtcccagtccagagagaaatacttgtagaagcacgcggagttgaacatggcctcgtccgggtgggctgcgccaccgccgggcttgccccggtcgtccaccgcggtgaagtagtccgtctcattgaccacccggtgcgtcgagatcgcgtgggccgcggagagcgacgcgtccacgtgcaggttcagcttcgcgaagaggccttcccggtcgagctcagtcatccgtcccgacagggcgatgtcggggaccgaggcggactcgccaaggatgtccgtgatggcctgcgcaagcgcctcgtgattgggtttcttcttcccgctctccgccgccaccgcatcggccatcctggggatggatgaccgggggacgaacaacaggatgttcgtgttgtccggctcttgagccgtctgcctctttacccgtttcaccccgcccttctcgaacgccttggcgatgagcaccaccagctcctctggcggatcagagccgccatggacctcctcggccagaatggtgatgagtcggcgcgtacgcaccccgccctctctctcgagcactgcctggaacgcagggctgcgacgaatcgaccgtttcaggcactggctggagatgcgggcacgtgggacgccgccgaagaggcaggtcttgggggcgccctggtcgtcccgattcaggttcgacggactgtgattctggatcatatggatctcgatcagcatggtcagctccttccgggctgcttcgcagccttgagatactctttggcccagatgtcgcgcacgtcacgtctccggccctgctcctcgtcgcgttcccagcgcgataggtcatgcagcagccgcacccagtccatgcctttggcccggccggcagccacagcatgcgccgccacggacagcgcccagcccaggtgcggctccaactgcgacaggggcgtttgcagcagcgcatcgaatcggtcgcgccagcgcttcccggcgtcctcgtccccgggctcacatgtgccgacgatcgcgggcagggactcaccccggacaggcggcaacggaaacgccccgaacagcttcgcgaccagccagctcggctgcctcccgcccccttggcgcacgggccgccagagggccgtaaagaggtcgaaacctggcaccgtctggtggagcggttgaccggcgaggctgcgcagtcgggagcgctcgccggcctggagcgccccaagctgtcgaatgaactgctcagtcggagtcatgctgtgcctcgcttccggcgggagcgtttgggcttgtcagcagcgtcaggggttcgcgcctcctgatcgccctgcgccaggttcctcatcacctcacgcaacgcttgctgcgcccgttgagccgcctcgcgccggcggagcggcgagccggcaatggtcgcgtcgacgacgcgcccaacgtggtcgcggagaacttccaaggcctcatctctccattccgtcagtatctgtgcttgcgattcgccgtcgatgtggccgacggtggcgagccctcgcatcagattctggaaggccttctccaaagcgcgttcggccgtcacgctgagggcgcaaaggcccgatcggattgcgtgccccttcgctccccgcgcgcacagcgtctcgacaacccgatgaccctttggcgggtcgcgccaattgcggccccgtgccgaagtcgtggcccatgtgcactggctaagccactccatctcgctcagtaggcgatgggcgatgccagggcccaatccgggcagcgcggccacatgccccccagcctgcttgtagagcgcctggctcgtcgcaagcagcgtggtgtggaactgcgtcgcactggtctgggcaccacccgcacgctgcagaagtcccttcagtacggaacgccacatgccaacatggtcttccaaagggttgttggggctgggccatgacgggacgatcttcttctctttccctttggcggaaggcccgggcttgtgagccacccgcagcagatgagggtcctccggccacggctctttggaaggtcttcgccaacccggacgaaaaatgatcgacctgaccatgcggttcgtgcgttcgccacactggcaacagcgtccgggagacagggctcgcctgccctccgcatccggcggcgccagcaggacgctccgggagcgccaagtcatgcctttgaggaaacccagaggcgatgcttggctcgcgccttcccaaacgggcacatcgccctccacggtctggccgctgggccatgtgagcaggaacgtggcgagcaagttcgggccgatgggaatggaataggctggggcattcccgttgatgctggcagtcatgctctggcctcgtccggcggttcctgccgacgcaacgccgggccatcgcgcgagccccattgcgcagcagccgaggcacattccgtcgcggccgtcgcgggcatgccgaaagtgcgcgatcttggaacccgagggcaggtcgtgcagcaggttcgtgactgcgaccttgcgccccccagcgcaagggtcctgatagaacccgccttcgtcgtccagtaggtcaaaggccaggttgggttggtcctcagtgccaagtctgtgcgtgagccaatcggtagggatgccgtgggcactccgaaggccgtcgtgttccctatcgcctaggctcggcttacaccactgcagcaccgccagcagcaggcggagcagactgacgttgtccatcgggttcgacgcggcgatctggcggatcgtgcccgcctgcgtcagcgcggctgtgatgcccacgcggcacgccttgccatcggtccccagaaccggaatccagcgttcttcaagcaggttgtagctcacaccggtctccctccttgggccccacgaagacgcatcctggatttgcgcggcggggtctcccggcgcaccccccgtcaccgtccaattcggcgcggtgcattgcatctcctctagaactggcaacccgggggcacacctacactgtgaagttcttgggggacgtgctaagcgggttccggcgacacctcacgagactccgagctccctccacctcgccccgtcccccatctctgtgtgctctgcgatctctgtggcattccttgtccattccctccccca

SEQ ID NO: 817 - DNA, 5372 bp, Artificial Sequence
  Synthetic Oligonucleotide
tatcgcctcacttgggtcgacaaaaccaaaaaggaacacgaacaagagcagcctgtagtcgaagcaggcaatgcgcttgggaattttgaggaatttgtcaaggccataatggcgaaggttgatgctggttccaaggtaacgggagttaaggcatgagtcagcctaacaccgtttttttgcgtcttgaaggccttcttcaatcgtggggcgatacatccaaattcgtcgttcggcgcaccatggaagcacctaccaagtcaggtgtgctgggtttgatttgctgcgcgatgggcctttctcgcgaagccgcgcggcccaaactacccgagttaaacaagcttgttatgggcgtgcgtatggatcgacccggcacgcgctggtgggattatcagaccgtaggcgcgggaattggcctgatgacagcggctggaggtataaaaacagatgctcagggaacgctcgtgactcgccgagagtatctcaccgatgccagttttttggtcgtgcttcatggcgaaccaactttgatcgaaaatgttgccaaggctttacaaatccccaagtggcccatttatcttggacgaaaaagttgcccgccgtccattcctatattcgcgggatctgccgagtttcctaaattggaagccgctctttcttcaccaaagtggcggccacgactggaagcactggatggagaaaaaccacagaatgatccgacctgcttactggaatggcgttcatctgagttgcagcgcattgcacccaacgaagccgaggtctggtatgacgtaccggtgtcctttaatcctcctgttcacgggccaagactggtgatacggaaaactatcgtagcagacccgggcgagtcgactcagcaagctacccctcccccgccaagaccacgcgccaactacaacaagacggaatggaccagtgagaagctcgtagaggtcgtggatccaaaaacgggcgagaagacgatggagccttttggcgcccgcccgcgtcgcttacgccgcgaccacggtctgtgcgtcttttgcaagagtccggcgacgacggttcagcacgtcacctaccggcgcgccggcggcagcgaagaacaggaagacctgcgagcactctgccgcctgtgccatgacgcagtaactatgatcgaatacggcttgggtatggggcttgatcgcatcaatcctgaagaaccccgatggcgtgatgccattatcgaaaagcgccgagagatcgtttcgtttcgctcattggcaacgcgtaaacgcaaactccagcctgaggagattgaatagccatgtatctctcctgcctgctgatcaacgtcggggacaacccagaccgcccccgaccaggccggttatggctgcgcaatatgtatcgcgtccaccaacgcctgtgcatggcttttccgtctacagagcgcgtttcggctgatcccgaatttctgatgccttttattccgaaagcgtttggtgacgtgaaaatcgcgcgttcccacgcccaaggctttctatttcgcgttgattcactgcgtggaaaccgcgcgatgattatcgtacagtccgccagagagccggattggaactacgcatttcacaatgcggaacatttcttggctggaccacctctatgcagaccgtttgaggattcgaagcactttaagacaaacgaccctcttcactttcgtctactcgcaaatccagtgcgaaaggtcagtaagaaatcgcttggcattgatggcaagccgctcaatcagaagtggttaggcaaagaagttcccgtcccgatggccgatcttgaaaaatggcttttgcgccgggccgaacctggttggtcgccgccaaaaaacaaaaaagaatctgggcaaaagcagccaccgcctggtttcaaaatagagagtatttccaacattcattccggatttgtaaacattagcaaaggccgtgacgacgaacatggcaaagccacacgccgtcgatcagcgctttaccaaggcattctcagagtaactaatcccgagcattttcgggcgacgctcaaccgtggcattgggccgggcaaggcctttggatttggattactctccgttgcgcgggcttgagcccgctgaatcaaatgaaacaacacgcacactaataacttaagctacatagccaaacatacgataagacattcaaatatgaaaattggggagggctttgcgtgcgccaccttcatatcctgccccgcttcggcgaccgctggggccacctctatatcgaacgcgggagcctcgaaaaagaagacaattcgctcgctctgatcgacaaggaaggcgtcacgcccattcccgtcgatcaattggcgctgctctttctgggccccggcaccaaggtgactcaggccgcgatgaaacttctcgccgaaaacaactgtttggtctgctggaccggcgaggagggcgtgcggttgtacgcgcattccacgggcggcacgcacagcgcgcaccgattgctttggcaggctaaattatattgcaatgaagaagagcgcctgcgcgtggtacggcgcatgttccagaaacgttttcccgaacccatcgacgctggcgccacgctgcaacagattcggggcatggaaggcgcgcgtgttcgcaacagctaccagcggctttcaaaagagtttggcgtcgaatggaaaggccgcaactacgatcaagaacgctgggaccacgccgacccgctcaaccgtgcgctctccgtcgccaatgcgtgcctttacggaatctgtcacgcggcgatcctgtcggcggggtactcgccggcgatcggcttcatccacgttggcaagatgctcagctttgtctacgacattgccgacctgtacaaagtcgaactgacggtgcctcttgctttcaagactgtggcgaattcacccgacgagctggagcggcgcgtgcgcacgctctgccgcgattccttttaccatgaaaagctattggagcgtatcttgcccgacatcgcggaggtgctgaatgctcgtgatgatcttgaagaacgttccagcgagcttgaagggcgcgctgtcacgctggctggtcgaaccggagactggcctgtttttggggagcccgacggcccgcattcgggacgaactgtggaagatggcggtgagccgcgccggcctggggatggtgatccagatttggaattacccctgtccgcagggatataagtatcgcgtatatcaagcccgcgaccgggatatggtggattttgaaggcatgatgctggtgcggaaaaaaccgcagcccaatcgttccaggggacgtaaggcggcacaagacggaccgggctcgctctttgacaacccaatagtttcagaaggaaacgcgtctgcgtcggacgaaaatgacgcgacacctaagacgccctaaaccacgagatgtagtgttgctcgcgtttttaaggcgtatatgttggtgtcttccccacgctcgtgggggtgaaccggttgacggcaagaccgatcccgcgcaagtcaagtcttccccacgctcgtgggggtgaaccgacttccacgatcaccaattgcgcaatctgtttgtcttccccacgctcgtgggggtgaaccgggaggatggcgagttcgggaaatggccgatcagtcttccccacgctcgtgggggtgaaccggcaagaccgatcccgcgcaagtcaagctcattgtcttccccacgctcgtgggggtgaaccggaaacggactctcgacatgcagcctacgcggcgtcttccccacgctcgtgggggtgaaccgaagtgaaggccaatgtgctcgcccagggtgccgtcttccccacgctcgtgggggtgaaccgccttggcggcgctcaatgaccccaccaccgaagtcttccccacgctcgtgggggtgaaccggcagcgctattgggcgaatcctgaaaaggcgcgtcttccccacgctcgtgggggtgaaccgttagtacgtcggcccgccgccgatcggctccagtcttccccacgctcgtgggggtgaaccgctatagcgcgccgaggattcgaacctcgttacgtcttccccacgctcgtgggggtgaaccgcggcggctcgatcaccccgcaagtgcgccagcgtcttccccacgctcgtgggggtgaaccggacggcgcgaagaccgccatgatcttcttccagtcttccccacgctcgtgggggtgaaccgtgctgttcttgctgctatgtcacgagatttgggtcttccccacgctcgtgggggtgaaccggtctgggtctagggtattccggggcatgcaaggtcttccccacgctcgtgggggtgaaccgatggggcgtcagatgttcctgaatgagttttcgtcttccccacgctcgtgggggtgaaccgatggggcgtcagatgtttctgtcgcagttcacgtcttccccacgctcgtgggggtgaaccgaagtctcggaatccgcagtagtcgctaagtaggtcttccccacgctcgtgggggtgaaccgatagccagagagaaagttagctatgggacgacgtcttccccacgctcgtgggggtgaaccggacgggccagccgtgaaggcgttcaagttcgagtcttccccacgctcgtgggggtgaaccgaaaacgggcctgtacgccaagacgcaggccgagtcttccccacgctcgtgggggtgaaccgggcaaaaggtggcgctttgatagcattccccagtcttccccacgctcgtgggggtgaaccgtattttgtggtcgcgcggcggggttagttccggtcttccccacgctcgtgggggtgaaccgaccgtgattcgcatggacaacgtgaagggctcgtcttccccacgctcgtgggggtgaaccgatgacgcggccaaggccaaagaagacgctaaagtcttccccacgctcgtgggggtgaaccgccgattgcgggttggtatcagtgcagagttaagtcttccccacgctcgtgggggtgaaccccttgcccacttggctttcgggcaaccccttgagtcttccccacgctcgtgggggtgaaccgacgaaaccgacgcggccagcgcgcgccggtacgtcttccccacgctcgtgggggtgaaccgccgatagaattgctcacgccgccccctttgcggtcttccccacgctcgtgggggtgaaccggcaggacccgcaatcgatgccaaggtttcgctgtcttccccacgctcgtgggggtgaaccgagacgctacaatcttgcccaattcgacaatgcgtcttccccacgctcgtgggggtgaaccgcagattgcttccaagggcttgctgttcacccccacgagc

SEQ ID NO: 818 - DNA, 5343 bp, Artificial Sequence
  Synthetic Oligonucleotide
aaaaccccaactaattttttcccttgcccctccacccccaaccgcctatcatccttctcgggaaggaccctggtctctgttccgccaaggggaggcggaccactcgccgaaaaagcggtctataactcgtttttcaaattgaacctcctgcccccggaattctccggcagaaaggagcggccaaccatgaacgagaaccactcaaactataaccttcttgaaaaacactggattcccgttctctggaacgacggccatttcggcggcgtcggtatcagagaggccctcacccaggccggccgcatccgccaaatcgcggccagcaatcccatggacaacatatctttgtttcgtcttctgttggcggttttacaatggtgcaaacagactttgtctgagaaagaacaagccctgttggagcatggtatgggaatcccggcggaatggctgaacgataggcttggcccgcccgaaaagcccaatatttatttcgaattactaggcaagaatactggtttctttcaagatcaaaccgcatgggatgaaattaagcagaggggaaacgaaaacgagcggaccggtgaagaagttatcggacttcgtcccgccaccgatttgttgccggaactacctagcggaacaagcatcgcccactttcgtcacacgcgcgacaggcaagatgggctttgtccttcctgctgtgcgataggtctggtcaggctatcggccttcgcttcatctagcaaacatggtaaagaacagcagaagccggccggcctcaacggcgttaccccggcgtatggccctgcatggggccaatctctgcttatgtctttaagattaaactggccgctccagcctcttaaaggggacgctccttggtgggcagaccccaacgaaccaaaatccaaggaacatatagggcctttgcgagcgtttacgtggcaaccgcgtcgggtttggcttgaaaggtcaaaagacgatcaagcgaaagagccttgttcaggttgcagtgaactcgctcgtttaatctatggtattgccttcctgcccggctggcagcgaccttttggaaaggccccttggtccgatgatcctcatctgctcattatacaaatccagggggccaagaaaaaaaccaaagttacacaggttagtttccccggccccgctcaaccagtctttttgcacgctaaatcgtggcgaaacttttataaaggaatttttcaacggcagctccctgggactattcaaaagcaaccgaaggaaatcgtttgtgcgggaccggccgcgaataaagccctttatcaagacgcttctgctttggtccttcggtcgccgccaaaccaagagcagccgatcaccgagcttgaatggctcgatagtattgaccttcgagattgcctcttgaaggcgatgactcggcctactgcgaaaagactggatgttaccgccgcaatggctggtgtctccgccgacctcgaacagactctacgtgaacgtttcgatcttttcctgaaaatgttgaaagagcatgacagcggaaaaagaattgagaacgccgttaaggattggaggaacgatgtggaacaacacctgcaagaaaaattgaagcaagtctgcgacctcatcacgcccggctcccctctgcgtcaatatgagacgcggcagcgagttgaagatgcgtttcataaaactgtccagaagcctagcccaacttataagaagggatgctaaacatgagccaaaccgccgcctttattgcaagacttactgacaaccgtcattttggcctggaagaaagggcccgtctgcgttcattgttcggccgggggttggacgtgcacccggccggcttcgacttgttcaccggcttgtggtggccgttgcggcaaaagaaccaggcggcgcctcgccgagaagtggcctggctggtcgccaaactctatgcggctttgccgcttcctaatatacggccggagggagggcagggaccgacgctggcccaggctctcggccgttgcgagccgcgggatgaggtcggccgggagcggtttcgccgtaagttcgacgccatgcttgaaacgccgctgggagggttggaaccgcatctattatggggtctttcggtagtgcgcgacgcggtcgcagcgagacgttcccaaggaattgattgggtccaactgaccgacgaccttgccatttgggaccggggcgaagctcatcgccgccagagggacgtccggaaagaatgggccgctcaatatttgaacatcataacatgaaaggagaaaacggccatgttgatcgaaatccacatgatccagaaccacagcccctcgaacctcaaccgcgacgacctgggcgcgcccaagacttgctacttcggcggcgtccatcgggcgcgcatctctagccaatgcctcaagcggagcatccgcaaccccggcaaccccgaagacgtgcataaacgagagccggggctgttcgccagagcgatgaaagggcatatcggcaccaagaccaagtttttcccttggctggtgaaacaagccctggtggattcctctattccacaagaagaacatcagcgaatcgtcctggccacgcgactaatagccgccagaaaagaaaaggaaaaaaagaagtccgccgtgggcgtggaaacagacccccggcccaaaacagcgcagttgatccatcttggacctggtcatgccaagtattacgttgagaaattggcggaactccgccagaaagacgagtacaaaaagcaatatgaatattttcttaaccctgtggccggttttcaggaaatggtgcgcgagcaccttcttgactctggtcttgacgagaaagaacaggaaaaaatcgtcaaggcctgttgggtcatcgccaagtgtcgaatgtcccaattgatccaggtccccgcaggcgaggaacaggagccggaactggagatggtggacggccaaccggaccttgaacacgccagactgattgcggaacggctgactgaacttcgtttatccgatccagatcgcttcaatgctttgaccaagtccaaactagataaggatgagcaaaacaagataaaggagaccgcccccaaaaagcccaagatggacaatttcatggaagaactgaaaatgaccaatcgttacgatgcggtggatatcgcccttttcggccgaatgacgacctcggacgccttcggggacgtcgaggccgccatgcaggtagctcacgccatctctacccatggggtggtcaacgaggtggattacttcacggggttagacgatctgggtagagccggaggcggggccggacacgtggatgaagccatgttcaattcggcgtgtttctacaagtacttctgtctggattggaatcaactcgtttacaacctagccggcccggagccggataaggccaaggaggccgaagctcaccaaaaatgggagggcgagttcaaacctcaagcggagaagctcgccgccgccacggtgggccactttctccgcgccgcggccttgaccacgcccagcgggaaacaaaacagcttcgccgccaataatggaccaagcggcattctcgtcgaaatcaaaaacaccaaaacgcccaccagttatgccaatgcttttgtcgcgccggttaagaggatcggtgatccgcccgatgacgccccggactgcgtcagtcttgtcggacggagcatcgcccaactcggggattatatttacaacctgcggcaagcccacgatatcgattccacccttttgtggtacgccatgcccctctatcgctatcccctccaaggctggcggcgtgaggaagacggccgaaagaagcaagaaaacggtaaggaatcgaccccgatttctttaacaaaatgggatgacagccggccgacctcaaacgccaaacaggcaaaaaaccatcgttcgttcgctcgtctcgggggtcaagaaggcgctctgaaaggtttggtcgaagctgtggtatcagaacttgggttcgactggtcccagatcaaggattccggcgagtcagttgataaggaggcctgaccatgggcgaggccccgaataccgtctttctgcgtttggaaggtccacttcaggcctggggcgacaactccaagttcgtcatccggcggaccatgcaggcccccaccaagtccggagtcatcggattgatatgctgtgccatgggcctgtcgcgtcccgaggcccgtaaacgcctgcccgaattaaaccagttggccctgggggtccgcatcgaccggccgggtgtgcgctggtgggattatcacaccgtgggcgcgagatacggggttttgagcgctgacggtaaagtcaaaaagacagccagtaccggtgaatatgaaaccttgctctcccgccgcgaatatctgtgtgacgcttccttccttgtggccctgcaaggtgaaccggccctgatcggcgagctggaggcggccctggaaaaccccaagtggacgccctatttgggccggaaatgctgtccgccgtcccgccctttgttggagcacccggccggcgattttccccatctgctttcggccctcaaatccgtgccctggcgtcgccgattcaaggaagacccttcccctaaggtcctggattgcctcctggactggcagccgacctcaacccagcccgaagcgccctatgacgcactcgtctggtacgatgtcccggtctcctttgaccctcccgcccatcacccccgcttcgtcatccgccagcagttgtcggtgggcgaaaagggtgaagtcggtctggccgaatcgcccgcccagaacccgaccccgcccccgccgcgcccgcgggccaactactccaacaccgaatatcgccgggtccgggcagaccggctcgaagacgaccaacatctctgcatcttttgcaagtcgcccgccgccaccgtgcagcatgtcacctaccgccgggccggcggcggggaaactacggacgatttgcgctccctctgccggctctgtcacgacgccgtgaccatgatcgagtatggtttgggtctgggcctggaccgcatcaatcccgaggaagaacggtggcgggacctgatcatcaagaagcgcgccgagatcatcgagtttcggtccctggaaacccgccgccgcaagctgtccgccgaggaggtggaatgatgtatcactccacgcttctgatcaacatcggcgacgaccccgaccggccccgcccgggccgggtgtggctgcggaacctctaccgcgttcaccagcggctgtgcatggcctttccgtctgatgtgcgccgaaagaacgatccgcaa

SEQ ID NO: 819 - DNA, 5343 bp, Artificial Sequence; identical to SEQ ID NO: 818
  Synthetic Oligonucleotide

SEQ ID NO: 820 - DNA, 5330 bp, Artificial Sequence
  Synthetic Oligonucleotide
cttccttattgatatagacgtaacccggctgaacgatggtgaaattcggatcgatggcaaaccctgcagaatcgattgtccgcccgtttcgcatcagccgccaattcgccaaccattcgtggagtttctcatgaacaaacgttcgggggtcttccccctggtgttttccgcgccagtcatcgatttcctggctactcgggactggcacacgtttcccgtgccgcgttttctctttgttctgttcctcttgcgacatcgtgttccagcgccgtttcggcaacgtcgcctttttttgagtcggattcgccaggaggcggaatcgaagacgctggcctttcgagaagacggggtcaaacgatttcacctcaggcggcgcagccagaagataatccgcattgtgaaaggcatagtcccagtcgggctctatggcagactgcacgatgatcatcactcggccgttacagagaggatcgatgcgaaaaagaaagccggcttcgtcgttgcgcggggagtggacttgtttcagggcatcgtactcaacttcgttcttcttccggtcagccaagtgtcgttgctcgggaaaatcgtcctgatcgtaaggtataaggaattcaggatcgcgctttttccgtggatcggatggaaaggccatgcaaaggcgctgatggacatgataacggttcctgagccacaaccgtccaggccgatgccgatcgggatcgtcccctacgttgatcaagagacaggagaggtacatagctattccacctcttcggagacgaggcgtcggcgtcgggtttccagcgagcggtatttgagaatctcggctcgcttttgaatgattcggtcgcgccagcgtggttcctcaggattgatgcggtcaagttccatgccgaggccatattcaagcatggtgacggcatcatggcacagaccgcaaagcgaacgcaggtcctccagggtctcgttgccaccggctcttcggtaggtgacgtgctggacggtcatgcgcgggccgggcgacttgcagaagacgcacaacccggtgtcggctttaattcgttcttcgcgacgcttccgatattctgtattcttgtagtccgcgcgcggacgcggcggtgctggcgtggaagtctggatcggatcccccacttcaactgggactgtgccacgcaggacaaatcgcgcctcgtggaccggtggatcgaagcaaaccggcacgtcataccacacttccgcgtcgtcgggggcgacatcacaatccggggcggaccgccactccacaagcgtttccaccgccctgttcttcggcgcaacgtcagtcttgtaccgcgggtgccacggcatggcgcccagcgcggcgttcaggccgtcataaccggcgggattcgtccacaactcaccctcactgggccttgcaagcaccgggacggacggcgggcaggacttgcggccaaggaaaaccggccactttggcgacgcaatcgccgcggcaatatcatggatcaacttcgcatcaccctggagcgccacgagaaagctcgcgtcggccaggtactcccggcgcgtgataagggtttcaatctcgccggtggaaggcgtccgcttaattcccttcccgtcagctgttataatgccgattcccgctcctaccgtgtggtaatcccaccaccgcgtgccgggtcggtcgatgcgcacacccatcgcaagcctgttcagctccgacaggcgttcccgcgccgcctggcgcggcaggcccatggcgcagcagagcaggcctagcacgccggactttgtcggcgcatccattgtccgccggataacgaactttgacgtgtcgccccaggcctggagtgggccttcaaggcggaggaagagtgtgttggcctcggtcatttcgccgcctctgcaggcgtcccggttgtctccatcttgtccatgaccttatcgacgaactgatcgaactcaccgaactcgtcggaaccgaccacggattgttcttgctcgtgttccttcttgctcttgtcgatccaggtaagacgatggcgcagattcggcgagaaccagaaacgctcagcctcgatgctgtaacctacaacgagatcgtgggtatacttgccgagccgggcgatactttcgccgaccaatcctcgttcggacttttccggcaccggatcggcgaaggcgttggcgtagctgacgggcgtggccgacttggttttgacttcgaccagaactccgtctggcggattgaatgccgcgaaggcgtgctgtttgccggaggggttggccttggcggctgcttcaaggaagcacttcacggtggtccttgcaagtgcggtatcgttgttcagattcgcgtgcaactggctccagtcaatcacgaaatgtttgtaaaaacacgccgaattgaacatggcctcgttgacgtgggccgcgccggcgtcctggcctggcacatcgtcggcagcggtgaagtagtctacctcgttcacgattgcgtgagtcgagatggcgtgagcggcggagagcgcagcctcaacggtaaactggcctttgaggtcctgaaacggcccctttgcatcgaactccgtcatgcggccacaaagtgcgatgtcgggggtcttgacgaactcgccgatgatctcggcgaatttcctgcccaggtcgctgttttcgtcgcgcacagcctcgcccattttgttgatggcggattgaggcagaaagaagagtatttcaaaagtgttctcatccctcaggccgacccctccgtctgtaaagaccttccgaatggcttttaaatgttgctcattcggttgattaccctcgcccgccgccgcctttgcgatcaactcaatcagccgccgtgtacgaacgccgccatccttttctaaagcggctgcgaattccggactacgccggatgcttcgcttgagacactggctggagatgcgtgcccgggtaacaccgccgaagatgcaggtctttggcgcacccaagtcgtcccggttcaaattcgccggactgtggttctggatcatgtggatttcaatgatcattttaatatcctcctttcttttttgacagcgttgagatatgtttcggcccaaatgtcgcgaacatcgcgtccacggcagtgcacctcgccccgttcccagatggagagatcgtcgaggagttgttcccagtcgatgcccttcacatcccgcacgtgcggcacgtgtccggcgacgacctgggcgacctctcccagcgcccaacgtaggtttggctcaagggctgacaggggcgagcagagcaaggcatcaaaacgctttcggaaacgattgcgggacttgaactccggtgggtcgcagggttcgcagcggcccaaaattttgggcaaagacggccccgcacctgaatcgggcctgatgtgcgggacgcggaacgcgccgaaaagcttggcaacgagccatgacggctcccggcgcggagtcgccgggcttttcgcccgcagcggccaccagaggcccgtgaagaggtcgaaaccctggagcgttgcgtcgagcggccgtccggccagacggcgcagccgcgaacgctcaccttcctgcaagtctgaaagcctcttgatgtattcagcggtctggctcattttgtgcctctcttcttgcggccacgtttcggtttgctaggcatggccgcctccgatagcgcgtcaccatgttctgtcttattgagtgtcgactccagggccgatcttgcccgcgccaaggcctcccgccgttgcagcagcgagccagtaatagtggaacggacgacttgctcaatgacccggatgagaatctctttaaccgattgtcgccactccttaacgtcgtattgtaacaatagttccctgaagcaattctccatatcgacatgcgtttggctactgagcgcacacagactcgaacgtatctcgtgccccagggatttttgcccatgcaaactctcaacaatcgcatgccctttcggaggttccccccatactttctccttcgtcttccctttacctgtacgcgcgcttactgtggcccatgtcgctcggcgcgcccagtcgagttccgcacggacggcattcttgcgttcctggtcaagggcggccatgaaaagggaatgtgatgcgatgtgtttgtaaagcgcttgtacggctgcgacaaggactgtttcatacttcgttccattctgatccgttgtccggttcagaatcccctgcatgactgaactccacgtttccgcatggtgttccaacgcatcgttggggctcggccaagagggaacaatctgtttatcatgcacatccagtctgagtagatgtggatcgtcgcgccatggctcgctggaattgcgcttccagcctggtcggaagcgtatggtatatacgattcgatctgactgcttttcacaataagagcagcggccttcacgaagattgcgctctccgttttcagagggtggcgccagccggacacacctagagcgccatgtgaatgccttcaaagggccgattggagttttttcgtcagcgccatcccagacggggcggtctttttcgacaggcatcaacctttgcaattcgcgtctgagagtaatgaaaaggttcggtccagcatgaaacgtatacgaaggcgtgtttccattcaagctcgcagtcatgctctgtctggcaccagcggtccccgcgctcgcaaggaccgaccagcgcacgagtgccagagcgcaacatcctaaacacagcccgtcgctgtcgtcgcgtatgtgacgaaagtgagcgatcttagacccggaagggaactcgtgcattaagttggaggcaccgacatccggcgttgccgcattgagatcctgatagaacctcttaccatcccccaatagattgaacgcggccttgtgttccttcagtctacccagccagttctccggtatgccggagttcttctcgtccaacgccgcaagggaagacttcgcgtcctctttgcaccacatgagcacggccaacagaaagcgcaagagggccaccctgtccatgggattactggcggctatctgccggatttcgcatgcatcggtcagcacctggcagatcccgacgcgatccgtcttcccattactgtaaagaacaggtatccacttctcttcaagcaggttgtacgccccttgtgttactggaaggcccatatgattttcctccttggcatgttgctgtggatttcacgaacctgcaaaccgcgctctgcataaagggacagcacctggagggagtaatccaccgaacaggtaaccgcgatcaattgatagaatgtgcc

SEQ ID NO: 821 - DNA, 5319 bp, Artificial Sequence
  Synthetic Oligonucleotide
tgcgcctatgccgcgctgtgctttttgtgccggaccgttccttcctgccgagcacggtagggtcgcgctcccacgcgaccgcgcgactgcacctccgctgctattcatccgcacctgtccgcctccgctggccaacttccacatcagaatcgcactcttagataaccatttagtctacttgatttaaacagaacccccgcgtaaactcactgcagggcgcggaaaaggggctgtctatgaactcgtacaatttgctttcccaaaactggattcccgttctctatcacaatggcctgttcaaccgcgtcggtatcctcacggcgctcgaagacgcgcaccggattcgccaaatcgccgccagcaatcccatggaccgcgtcgccatcacccgattcctactcgcactcctctattggtgcaaggggaatccgccaagcgagcatgaggccacgaccggcgggccgttccccgcggagtggttttctaaactcgaagaaaatcgcgagcgctttgacctgtttggggaaacaaggcggttttatcagtacaagaaggcagtaggcgaagataaacggcttacggccaactatctcgtgcacgaggtgccgacaggcaccaatgcatggcatttccggcattcgacggacgaagtgaacggtttgtgtcccggatgttgcgcaatcggcttgttaaggcttccggcatttgcaacttcgggcggtcgtgggaaaccgcccggaatcaactcgaaacctcccttctacgccatacctctgggcagatcacttgcggcgactctccgtctttcctggcggcccgcagcggaactaggaacacccgcgtgggaaaaaccggacgttcaactgcctcgtagcggccaagtacccctcctcaccggcctgacctggctgcctcggcgggtgtggttggagcagcccgaggaaccgaaagactactgcatttcatgcgggcgcaaggagagcctgattcggcgcactgtatttgccccaattggcagcaccaagaccgaagaaggggagccggtcagggcatggtgcgacccgcatgtgatctacgggacgtccagcaagggcgaaatcagcagtctgcatgcgcgcgacgctcttggggcagcagacgccgcggcggggcaatgggccggtatcctcgcgggcctgcttcgaaaagggcaatcagccaacgcatctgcttggtggatagtgggcttttccaccgtccaaaacgacaagtatcttgaagccgtcgaatgcctgattctgtgcgatatcgagcacgccccacaagaacagcgggaacaatgcctgaaaaacttagaacaatggcgcaagggaaaagcggatttggtcaaaaagctccggccggagaacgaaaagtccgggcggcgtgagcatcccgagattacctcgatgcttgcgtcgattggaccgcacgtcgaaaaccaggtgtcggagcttaccggatcgttgatagcggacggcgaacccgcatggcaggaagcggcgaagacgtttcgcccgatgatgcgcgtggcggcacaatcactatcccctgggtttacaagccaagctgcgagaaagcgcaacaggattgccagtgccatcccggagatcacacccaaggccaagaaggcacggcgcgggaaaggaggcgataaatgactgccacggaagaattcattggcgttttgagtcggctgaagacgggagatcttgggcttttgcgcacgcatgcgcaacaggccctggatgaatccgtcgaggggtttgatctcttttccgggctgtggtggccgttgcggaaaaagaacgagcgggcgccgcggcgggaagtggcttggcttatagctaaactgtatgggtgttgtccgattccccaggcgcgcgatgccactcttgcgcgtcaactgcggcggtgccggccggcccatgaagagggtagaaatcggtttgggcggaagttcgacaacatattgatgctgccgctcgacaagatcgaggcggaacttcgttgggcgatcgggcaggttgcgtcgagagggctttcacttgattgggtaagactcacggatgaactttccgtctgggaacgcgaaagtacgcggctgcgatgggcggagcagtttcttaaaaccgaagaaaacgatgaaaggggacctttatgctgatcgagatccacgcaatacaaaaccattgtccttcgaatttgaaccgcgacgacctgggagcgcccaagacgtgctatttcgggggtgttctgcggtcgcgcatctcgagccaatgcatcaagcgaagcatccgtaccagcgaacagttcaaggcattgcggggcgggatccgtacccggcagttggcaaaactgatcgcagatcgggtccagggtaaggcggatgtaaagaagcgcgcggccaagattctcaatggatgcgggatcgcgcccaaagacgaagacaagagcgatatgctcgtgtttacaacgggtgaagcaatctgcgaaatggcggcactgctggaaaacggcgatgggaaatcggacgaacaactggcacaggagtttggcgatctgatcgtgcaaaggacggttgtgcccgacatggctttgagcggaagaatgctcgaaacgggtgtcttgaaagacaccactgtagaggcggccctgcaggttgctcatgcgatctcgactcacgaggcccggccggaagtggactattttgttgccgcggatgacattccgggcgaagatgcgggagcagggctcgtaggcgaagcgatgtatgcctcggcgtgtttttacaaatacttctcgatcaattggaagaagcttgtggaaaacctcaatggccaggaagaactcgccgcacatacggtgggtgcgttcatccgtgcggcggcgctggcgaatccttcgggtaaacagaacagctttgccgcgcacaatccgcccgatggcctgctgatccaattcgcggccaccccgacgagctatgcgaatgccttcgccgctcccgtgtcgggcaagggcaatcctgacgtcatttcacaaagtgtggcgcagttggcgcattatgttcgcgacttggacacggggtacggcaagccccaaaagcgtttctggttctcgccgaatctgcgttatccgctttgcgtcatcgaagacaagaaaacgattccggttgccgaggtaaacctcaaatcgctcgatgaactgattccggccgtcatcggcggcttgggctttgattggaattcggttcagaagaaagtgacaagccaacaggtggcgccatgacggccaacacgctgtttcttcggtttgaaggaccgctgcaggcgtggggtaatcaggagtcgaagttcgttgtacggcgcacggctgaagggcccactaaatcgggcgtgatcggactgttgtgtgcggctttgggcgtgacgcgggcggaggcgcaggaatgccggttgcctcaactggccgaactgcgtatgggcgtgcgggtggatgcgcccggataccggtggtgggactatcacacggtaggcgcggggatggacatgcgcatcgccgaagccgaggggaagacaaaacccggcgcaatgctcacgcggcgggagtatctttgcgacgcgactttcctggtggtgcttcaggggaatcccgccctgatcgaagaactgcggcaggtgatcgaaaagccgcgctggacgctctatttggggaggaaatgctgtccgccgtcgcgacgggtgctcgaggaggcgccggcggcgcatccggacctgatttcggcgctcgtgtcggttccgtggcagcggcgctttgaaagcgataatcccccggaaacactcgagtatctgctggattggtttccgacgcccgaccagccggaggcgccggatgacgccgaggtgtggtacgacgtgccgttgacgttcgagccgccgtcgcatggtgcaaggtttgttgtgcgcgggcagttccgcgtgggcgccggggggcaggtctcggtggcggaatcggcgttgcagcgccgggtgccctcgccacaacgcccgcgggcagattatggcaattccgagtaccggaagatgcgcgcgcaacggctcgagaaggacacgcatctttgcgtgttctgcaggtcgcgcgctacgaccgtgcagcacgtcacgtatcgtcatgccggcggggacgagcgccttgacgaactaaagtccctctgccggttgtgccacgacgccgtcaccatgctcgagtatgggctcaacatgggcctggaccggatcgatcccgaggatccccgatggtgccagcgcatcatcgagaaacgcgacgagatcgtcaagttccggtcgctcgagacccggcggcgccggctcgaacccgaggaggtcgagtgatgtatctatcgagtctgatgatcaacaccggcgacaatccggaccggccccggccgggccggttgtggctgcgcaacgtttaccatgtccaccagcgcctgtcgatggcgtttccatcgaggtcgcaaggaagcccgtgcggttttctgttccgcatcgacaacaatatcgaagacaactcgccgcgcgcgatcattcttgttcagtctcaactggcccccgactgggatagggcgttttacaatgcgggcatgcttttggcggcggcccctgcggttcgtgaatacgccccgtcgttcgcggacggcgaggaactccggttccgtatccgggtcaacctgagcaagaagagcaaaacggcgagcgacggtaccgacctgcgaaagccccacgacggcgtggaccggtgcggccgccaacgcgatcagtccaaacgggtcgcggtaacctggaagggcgacgagggcgagacgccggatggggcgatccggcaatggtttgcgtcgaaaggggaacatgccgggtttgcactcgacacggatttcaacctcattcacctgggctgggtcaccggccataagccgggaacgcccgagaacaagctgcggtttcgctccgcgctgctcgaggggaccttgagggtagcggacgggccggttttcatgcaaacggtcgagcgcgggctaggctcggccaaggggtttgggtttgggctgctgtcggtggctcacgttcgggagcaggcgggacgcccgcaccacaatcgaggcgtggccggatgttgacgcgtgatctgcacgacctcgccaaagtccgcgaccggctcagctacctctacgtcgagcacgcccggatcgaccaggaagacaaagccatcgccatccacgacgcccagggcctcacgccggtg

SEQ ID NO: 822 - DNA, 5308 bp, Artificial Sequence
  Synthetic Oligonucleotide
tccctcgaactggacgcttcgcaatcgatgcccctcaccccgcttaccgctcttgttgaagtagacgtagcccggttgaatgagggatagctcctcaactgcgaaacccgacgttgaagcacgtcgctcaagccaattgctcagcgcctcatcggtggccgcaaccggcagacgtttcttcacccacttctcctcgattttcttcccgcgttggtcgaccgtgttcttgtgagcgcgatacaccggattagcaaccaagcgaaagcagaacctgttgccctcgtgcggctgaagatcgaaaggcgccgatccctgcggcggcgccgaaaggaaatggccggcattgtggaaggcatagtcccaatcgggttcgatggctgactgtacaacgatgatcgttcttcccccgggcagcggatcgatgcgaaaaaggaagccccgctctccattccgggatagatgcacctgagtgccataagacttgacgaaatgcgggtcctccgcctttgcctccgcgctgggaaacgccatgcacaggcgctggtgaacgcggtacaggtttcgcagccagcggcgggtgatgcgccaatcgggtcggtccggattgtcgccggtgttgacgagcaagtgagaatggtataggcagctcattgtcattctccctcttgttcgagtagttcgttgcggaccttttcgggcgcttcacgcagagcgcggcggcgtctttcttcgctccgccagttcaggatttcggagcgtttctggatgatccggtcacgccaacgcaagtcctcgggattgatgcgatccaggcccatgccaaggccgtattctatcatggtgacggcatcgtggcagaggcggcagagcgagcgcaggtcgtcctgagactcgttgccgccggcattgcgataggtgatgtgctgaacggttgtcgcaggtgccttgcagaaaacgcacaggccgtgatcgctcttcagacggcaggctcgtgcatctctgaattgcttgttgcggtagttggcgcgagcccgttgcggcggactggtgcgctcctgcaacgctttgccagccgtgagggtaactgcctttcgctgaaccaggcgcgcctcctgagaagccccaccgaaaaccacggctctgtcgtaccagacctcagtattgctcggtgctgtgggttggtcgtccgacggtcgccactcaagaaggcactgaagttctgtcggcggcctgtcgtctggtaagcgcgggtgccagggtacagtttcgagggccgtaacaaggtcacggcagtccatcggattcgtccagtcctcgttgcgggcgggcctcgccactatgggcatagatggcgggcacgacttgcgcccgagaaagaccggccataccggattctcaagagcacgccggaccagctcgatttcagatggatcgccctgcagcaccacgaggaagctggcatcgcacaggtactcgcgccgggtgaccagagtctccggcttcttagtcttgtcgttcttcttaatcccgcctgcggcctgcaggatgccgtacttggctccgacggtatggtaatcccaccaccgcgtgcctgggcggtcgatccgcacgcccatcgccaacttgccgttgagcttctgcagttcctcgcgagaattttcacgccgcacgcccatggcgcagcagatcaggccgagcacgcccgacttggtgggggcgcccatcgtgcggcggatgatgaacttcgagttgttgccccacgcctggaacggaccctccagacgcagcagcagcgtattgccttgtggaatcatctcaggcctcctgctgctgtatcctgcccgcgtccttggcgtcggcccaggagaagcccagtcccatgcggtttatcatggcctcgacaagaccgccttctccgccttcgagtgaattgcagtgctggtctgcaaacctgacaggttcccgttgcttcctcccgtcttcggcccgctcccatccctgcagcggatatcgccacagttgcgggctgaaccagagcaacgtggaatcaatgccgtaggcctgacgcaggctgtagacgtgatcgccgaattgagcgatactgcggcccacgaggctgacgcagtcgggtgcgtcgtcttcaggttcgcctatcttccgcgcaggatcggcgaaggcgttggcatagctggtgggcaccttggcgttcttcttgatctccacgaggataccgctcggctgattctgtgcagcgaagctgttctgcttgccgctggggctggtcagagccgcagcgcggaggaaatggccgagcgtgcaggcggcgagctgttcggcctcctgcttcctgcccgtatccgacccagtgaggttcttgacgagttggtcccagtcaatgcagaagtacttatagaagcaggcggaggagaacatggcttcgttgacatgtgctgccccgtgcccggacggcaggtcgtccgctgctgtccagtagtccacctcgttccccccggcgtgtgtcgagatggcatgagaaacctgcatggcggcttctacagagaagtcgagcttcttgaatgggccttgggcatcgagttcggtcatacggcccgacagggcgatatcgggaacgtatgccttttcgggaagcactgttgcgaattcgcccgccaagtcatcagctttcgggcttgcctttgcgtactccgctcttgcggcgtcggccaagctgtcgattccggaacgggggatgaagaataggatgtttgttgcgtagggatcgtctttcgttgcgtcgattttgacgcctcccttctggaaggcatcggagatgagcttgatcagcttctcaggggcttccccgtcgttgtgtgcgcgcttcgcgacttcagagatcagactgcgcgtgcgaattccgccatcgctctcgatagcggcattgaactccggactccggcggatgctccgcttgatgcactggcttgagattctcgcgcgagttgtatctccgaacacgcacgtcttgggcgcgcccaggtcgtcgcggttgagattcgacgggctgtgattctgaatcatgtggatttcgatgagcattgctgctgcctccttttgcctacggattggtttgtgggtttccattcaggtattgttctgcccatacatcgcgaatgtcacgctggttcctgtgcatgttcgcacggtcccagatcgagaggtcatcgagaagctgcacccagtcgagcccccctttctttgcctgcttcgattccctgagtgcccagcgaaggtgaggttcgatagccgggagcggcgcctgaagcaaagcatcaaaacgtatgcgaaagcgctcgcgttccgtgtccttcagaggttcacgtattctcagcacaaccggcaagcagcacgacggagcgcgaacatggggaatgcggaacgtggcgaaaagcttcgcaaccagccagctcgtttcgcgacgcggagccgcctggcttgcttcgctcaacggccaccacaagccggtgaagagatcgaagccggcgagatcatcgcttattgagcgccctgccagccgccgaagtcgggataaatcgccctcctgaagcgattcgagcctgtggatgaatgcatcactttgcgccatcggttacctcgctttcgccttcctgtgctattgtcttgctctcggttgtcactctatcggcttcacccttcaggattcctcggagcttgatgaccgccagccgttttttgaggggagagccgggaactgtcgagaccatcccatccagagccacgaatactttggacaaaccgtctgggaaaaccaggcgatgtaactgggtgccactggcaagcgatacacgggcatgctcccaagcagattcttccagagcgggcaaacggtcggccatggttgcacggacagacgcgggaagcggccgctccgcgtgccgtaccatgcgaaaagggtgcctgtctttgaagctcgctaaggctttaccctttttcctcaactgaggatcaagcaacttggagacaatatggtcccacccctgaaacgccccgttcaggctctgcatatcgcctcctaactttacatgatgtaccgatgcctccactgatttgtcattccgtgtcggcgcttcaaccaccatcaggtgccaaggggacccatcagacgagcgtcctatcgccgtctcaacagcggatggccaatggtagccatcgccgctggcaagggtgccaagccacttgcggcacctgcccgcagcttgacaaggatctttctccccatccagagctttcattggtttgccgtcctctgagtagcttatgtgagggtctacccaccgactacctgcgcgactgagtcccggcggtccgtaagggaggttcatctcgagcaatctccctgcaagagtttccgattcctcaccgcacattatgcagtttccggcagtaaacgtctgttcgtctattctgaaccgccttgacatccacgtcaggcccgtcatgaatctaaccgcctcgtcaggtgccaaatcatgaaattgctcgagccagcacggagcatcatcggccaccctcaacagaggcaggttaaagtatagcgactggagcaaggtaggacccaaggggatgaaatacatcggagggtcgccattgatcccgggacgcttcccccggccttttcccatcatgaatggcggcagacgtaccagtccgatagctgcgcaagcaggacacactccataatcgtaatcgcggacgtggcgaaaatgggctacgttcgttccgccgggcaattcctgaaacaggtcagctaccggtcgagacccggcgttcccgttcacggccccctgcttgaaacgagcatcaggcccaagcaactcaaacacctggctaggctgctgctccgtgcccagcatattcctcagccactgatccggaatgccttccttcaacacagccatttcggcttcattcccttccggcctgcaccattgcagcaccgcaaggagcaggcggaagatggcgacattgtccatcgggtttgaggcggcgatccggtgtatctcgccagcgcgtttgagaacaggaaggattccgaggcggtcgttgcggccgttgcagagaagaaccggtatccaccgcatcgttagagcattcgtttcggacataggtaatcgcctccacattcaatgtatttcatatccaagcgaacaaccatagtgagcttccatgttagattataccaccacggtatgacagatatggtcgcgccccccgatttttttcagaaaaa

SEQ ID NO: 823 - DNA, 5299 bp, Artificial Sequence
  Synthetic Oligonucleotide
atcaccctgatcactccaagtcaagacggttcacccccacacgcgtggggacgacgtcaggaaagggtttgtcagattcatggtacgcggttcacccccacacgcgtggggacgactgccggtccgctgcttttaatccagccagaatcggttcacccccacacgcgtggggacgacgcaggcgggaaggtcggtggaaaagagggaggcggttcacccccacacgcgtggggacgacagtgtgacattggcctcaagcaccgcagccagcggttcacccccacacgcgtggggacgacgcggtgatggttttctcatcgaggctggcgtccggttcacccccacacgcgtggggacgacgggcctacgacacatcccaccccaacatggcgcggttcacccccacacgcgtggggacgacgaccgctgccaaatcccatccttcagcggcagcggttcacccccacacgcgtggggacgacgaacgaagtaccatgacaacgttccacacggacggttcacccccacacgcgtggggacgacgccttgcttaaaattttggcacaaaccggacacggttcacccccacacgcgtggggacgacagcttcccgcagattgtccccgtcgttggggacggttcacccccacacgcgtggggacgacggtccgtaactggctgttatcgcgcgagttgtcggttcacccccacacgcgtggggacgacgggaagggtttgggataggggatagggttaagcggttcacccccacacgcgtggggacgacatccaagcctgcagtctcgcggaacggcgaagcggttcacccccacacgcgtggggacgactgtctcacgcccttcgttggccgtccgcggggcggttcacccccacacgcgtggggacgacaagaaggccgattacggaagcgattcagatcatggttcacccccacacgcgtggggacgaccgcgtaatcttgattggccgggcgccgatgaacggttcacccccacacgcgtggggacgacgctgcgatttaaagggcttatggcccgcgaactagaagaagtccctcgaagttttcgacccgccgagagggcgatccccaaaagcggatatcaaacccctgctcgttggcagcattgtagaccagaattccagccccacccgccaatttgcggcagacttcctgccagagcttttcccgcaccagcgcggaaatgtttcccacaaaaacgccagcatgcaattccagcatccatcgtgtcagttccccgcgcacgctgggaggggcattttcgagcaccatcacgaccgtggcttgtcacctccttcagcatcatctccgcggttgatgcctccctccaccgcccccacttcgggatcccagagccaccctggagccgctggttgggcatccagtctggcatccccctgcccaccttccgaagaaccccaatcgagagcgcggtcgatatcggggataattctctgtaataagcggctttccacaaacgcgtcgcgacatttccttcttacgtggctttcctgaaagcccattccttcggctgcggcccgaaaggcgaggggaatggtgacttcggttttatacaggtcggcaacatcgtagacaaaggagagcatctttccggtgtgaataaatcccaaggccggtgaataaccgacggaaacaatggcggcgtggcagacgccgtagaggcaactgttggccaccgaaagggcgcgattgacggcatcggcggcctgccagttatcggttttgtaggatcggccggaccacggaatgcccgcctcgcggctggcgcggaagtatgcgtcgcgcacccggacaccctccatgccgcgcaattgctggatggtcagggaggggtccagcttctccgggaaacgcatcttgtaaagccttttaaccactatgaagcgcaattcgggcgcagagcagaggcgtgactgatgcagcaggcgttcggaagagcgcgtttctcccatgccctgagcgtaggttcggacgccctcttcgcccgtccagaggatggtgcagccattgtcagcaagagatcgcacagccgcgtgcgtgatgctggtgccgggaccgagcatcagcaccagcaatgacgcgcagggtactggcactcggcccttcgcgtcgtgaatggcgatcgctttgccctcctggtcgatcttgcaatgctcgacgtaaaggaaactggaactatcgcggactttgggcaacagatggaggtctttcatgtttttgtagctgcgccccatcgatgatcgaggcggctggcgtcctctctcagcccgttctttacaccaaccaccccttatcccctccttaaccaaggcggggaattaccctcttcgctgaggaagggcccggtagtggtaagtgtggcgatggtgtggtctccactgtaaagaatcaaacggggcaggaggtcaaaaatggcggtcatagacctccggtacaacacggcgctaccgaaagcagcccgaagccgaaagctttgcctggcccgatgccttgtataatcgcttgccgaaacagtgcgggctcggtaacgctgagaagcccgtcataacggacagagcgcaggcgaattccatgcctgtcccctcttttgttggcgaacacataacccggcaaaacattgatggaatccttctcgatagaaaaccccgccttttcagctcgccgattgatccaatcgaggagttgatccgtcggcacaggcacgcgcatccctttcttatccgtattcgcccatttcttgacgagctgtccgtcggctccaagcgagtgttccgtgaggcggcgggtaggattcgcaaggaggcggaatcgaagccgctgacccgttgtgtagcacgggttgaatggctttacttccggcggggcggccagcagataacaggcgttgtgaaaggcgtattcccagtcaggttttggtgcagactgtaccagaattaccacccgactgccggaatgccgagcctgtgatgcttcgcggcaacatcgttcctcgggatcaaggcggaagagaaagccagcggtcggcccgcgctcaacatgaacatggccgttcccaaaatcctctggctggtagggctttaaaaactctgggtcgtactgctttctgcggtcggagggaaacgccatgcaaaggcgctggtgaacgcgatagaggtttcgcagccattggcgcccggggcgggggcggtcgggattgtcaccgacgtcgatcaggagacacgaaatccacatggctattccacctcctctggagcgaggcgtcgccgacgcgtttcgagcgagcggaaggcgatgatctcgttccgcttggcaataatctggtcgcgccaacgtggctcttcgggattgatccgatccagacccatgtttaaaccatactcgatcatggtcacggcgtcatgacacaaacggcagagcgaacgcagatcttccaagctttcattgcctccggcgcgccgataggtgatgtgttgtaccgttgtggctggcgccttgcaaaaaacgcaaagctgctggtcgcgggcaagccgctccaggcgcttgttcctgtaggcggagttggtgtaatcggcccgcgggcggggcggcggcggagtttcggtctgcgccggctggcctgcgacgcccacgccgccctcgatggccactggcaattgacgccggagcacgaatcggggttcgtgcgagggtggttcaaaggtgcggggcacatcataccagacgaaggcatcatcaggcgcttcaggctgatctgccgtgggctgccaatcgagcaggcagtcaaccgttttgggcggttgatcctccttcatccgtttgcgccaaggaatcgacttaagggctgagagtaaatcgggaaactcaccgcttgcgggtttttccagcaaagggcgtgacggagggcagcattttctaccaagatagagcgtccacttgggcgctcctactgcggtctccaactgcgctatcaggtcggcctcaccctgcaaagcgatcaggaaggatgcgtcgcagagatattcgcgacgcgtgatgagagtttcaatttcccccgtcgcggccgttctcttagcgccagcaccatctgccctgggtattccgaccttggctccgaccgtctgatagtcccaccagcggacacccggcgcatcaatgcgcgcccccatacaaagcgagcccagctttcgaagccattcattagaggctttacatctgctaacccccagggcggcgcacagcatcccgacaacgccagacttggtcggagcttccgccgtccgtcggatgacaaactttgactggtggtctccccaggcttgaagaagaccctccaagcgaagaaataaggtgttggccctcatcaaaccacctctgcgttcacagtaattttctgaacctcatgccaattgtggccgattttctcgatgaccttttgaattaagatatcgagcgaactgagattattgtcggtaagcgcaatctcacgtcgtttcttttttccatcttgttcttcctcgatgtaagccagcagaggatggcgggaattaggcgagaaccagaatcgctccgttggcttaccgtacccggtgtccatgtcgtggatgtattggccaagctgcgcgatgctctgggcgatgaggtcacgttcaccctgagcaaccgcgggtttcgcaaaagcgttggcgtagctgagaggggtgtccctgatctcaaccagcatgccatcgggaggattatgcgcggcgaaactgttctgttttccagtggggttcaccatcgcagccccccgaatgaatgcgcccaccgtatgtgcggccagcttttcatgttcttccccaaaccccatgaggtttttcaccaattgctcccagtggattgagaaatatttgtaaaaacaggccgaggcaaacatagcctcgtccacaaagccggcacccgcgtcctcgccggggatgtcatcggcagcgacgtagtaatccacctcggggcgggcctcatgggtggagattgcatgggccacttgaagtgctgcttccaccttagtatcacgcttctcccaaaccgtagaagatttgtccggctccagcatgcggcccgacaaggccatgtccggaactgccgtgcgctccgcaataagtccggcgaacccctccgccagttcactctcagcctttccatcgctgtttcggaggaggttcgccatctcttcaacagcctgtttggtagtatagacaagca

SEQ ID NO: 824 - DNA, 5295 bp, Artificial Sequence
  Synthetic Oligonucleotide
atcaccctgatcactccaagtcaagacggttcacccccacacgcgtggggacgacgtcaggaaagggtttgtcagattcatggtacgcggttcacccccacacgcgtggggacgactgccggtccgctgcttttaatccagccagaatcggttcacccccacacgcgtggggacgacgcaggcgggaaggtcggtggaaaagagggaggcggttcacccccacacgcgtggggacgacagtgtgacattggcctcaagcaccgcagccagcggttcacccccacacgcgtggggacgacgcggtgatggttttctcatcgaggctggcgtccggttcacccccacacgcgtggggacgacgggcctacgacacatcccaccccaacatggcgcggttcacccccacacgcgtggggacgacgaccgctgccaaatcccatccttcagcggcagcggttcacccccacacgcgtggggacgacgaacgaagtaccatgacaacgttccacacggacggttcacccccacacgcgtggggacgacgccttgcttaaaattttggcacaaaccggacacggttcacccccacacgcgtggggacgacagcttcccgcagattgtccccgtcgttggggacggttcacccccacacgcgtggggacgacggtccgtaactggctgttatcgcgcgagttgtcggttcacccccacacgcgtggggacgacgggaagggtttgggataggggatagggttaagcggttcacccccacacgcgtggggacgacatccaagcctgcagtctcgcggaacggcgaagcggttcacccccacacgcgtggggacgactgtctcacgcccttcgttggccgtccgcggggcggttcacccccacacgcgtggggacgacaagaaggccgattacggaagcgattcagatcatggttcacccccacacgcgtggggacgaccgcgtaatcttgattggccgggcgccgatgaacggttcacccccacacgcgtggggacgacgctgcgatttaaagggcttatggcccgcgaactagaagaagtccctcgaagttttcgacccgccgagagggcgatccccaaaagcggatatcaaacccctgctcgttggcagcattgtagaccagaattccagccccacccgccaatttgcggcagacttcctgccagagcttttcccgcaccagcgcggaaatgtttcccacaaaaacgccagcatgcaattccagcatccatcgtgtcagttccccgcgcacgctgggaggggcattttcgagcaccatcacgaccgtggcttgtcacctccttcagcatcatctccgcggttgatgcctccctccaccgcccccacttcgggatcccagagccaccctggagccgctggttgggcatccagtctggcatccccctgcccaccttccgaagaaccccaatcgagagcgcggtcgatatcggggataattctctgtaataagcggctttccacaaacgcgtcgcgacatttccttcttacgtggctttcctgaaagcccattccttcggctgcggcccgaaaggcgaggggaatggtgacttcggttttatacaggtcggcaacatcgtagacaaaggagagcatctttccggtgtgaataaatcccaaggccggtgaataaccgacggaaacaatggcggcgtggcagacgccgtagaggcaactgttggccaccgaaagggcgcgattgacggcatcggcggcctgccagttatcggttttgtaggatcggccggaccacggaatgcccgcctcgcggctggcgcggaagtatgcgtcgcgcacccggacaccctccatgccgcgcaattgctggatggtcagggaggggtccagcttctccgggaaacgcatcttgtaaagccttttaaccactatgaagcgcaattcgggcgcagagcagaggcgtgactgatgcagcaggcgttcggaagagcgcgtttctcccatgccctgagcgtaggttcggacgccctcttcgcccgtccagaggatggtgcagccattgtcagcaagagatcgcacagccgcgtgcgtgatgctggtgccgggaccgagcatcagcaccagcaatgacgcgcagggtactggcactcggcccttcgcgtcgtgaatggcgatcgctttgccctcctggtcgatcttgcaatgctcgacgtaaaggaaactggaactatcgcggactttgggcaacagatggaggtctttcatgtttttgtagctgcgccccatcgatgatcgaggcggctggcgtcctctctcagcccgttctttacaccaaccaccccttatcccctccttaaccaaggcggggaattaccctcttcgctgaggaagggcccggtagtggtaagtgtggcgatggtgtggtctccactgtaaagaatcaaacggggcaggaggtcaaaaatggcggtcatagacctccggtacaacacggcgctaccgaaagcagcccgaagccgaaagctttgcctggcccgatgccttgtataatcgcttgccgaaacagtgcgggctcggtaacgctgagaagcccgtcataacggacagagcgcaggcgaattccatgcctgtcccctcttttgttggcgaacacataacccggcaaaacattgatggaatccttctcgatagaaaaccccgccttttcagctcgccgattgatccaatcgaggagttgatccgtcggcacaggcacgcgcatccctttcttatccgtattcgcccatttcttgacgagctgtccgtcggctccaagcgagtgttccgtgaggcggcgggtaggattcgcaaggaggcggaatcgaagccgctgacccgttgtgtagcacgggttgaatggctttacttccggcggggcggccagcagataacaggcgttgtgaaaggcgtattcccagtcaggttttggtgcagactgtaccagaattaccacccgactgccggaatgccgagcctgtgatgcttcgcggcaacatcgttcctcgggatcaaggcggaagagaaagccagcggtcggcccgcgctcaacatgaacatggccgttcccaaaatcctctggctggtagggctttaaaaactctgggtcgtactgctttctgcggtcggagggaaacgccatgcaaaggcgctggtgaacgcgatagaggtttcgcagccattggcgcccggggcgggggcggtcgggattgtcaccgacgtcgatcaggagacacgaaatccacatggctattccacctcctctggagcgaggcgtcgccgacgcgtttcgagcgagcggaaggcgatgatctcgttccgcttggcaataatctggtcgcgccaacgtggctcttcgggattgatccgatccagacccatgtttaaaccatactcgatcatggtcacggcgtcatgacacaaacggcagagcgaacgcagatcttccaagctttcattgcctccggcgcgccgataggtgatgtgttgtaccgttgtggctggcgccttgcaaaaaacgcaaagctgctggtcgcgggcaagccgctccaggcgcttgttcctgtaggcggagttggtgtaatcggcccgcgggcggggcggcggcggagtttcggtctgcgccggctggcctgcgacgcccacgccgccctcgatggccactggcaattgacgccggagcacgaatcggggttcgtgcgagggtggttcaaaggtgcggggcacatcataccagacgaaggcatcatcaggcgcttcaggctgatctgccgtgggctgccaatcgagcaggcagtcaaccgttttgggcggttgatcctccttcatccgtttgcgccaaggaatcgacttaagggctgagagtaaatcgggaaactcaccgcttgcgggtttttccagcaaagggcgtgacggagggcagcattttctaccaagatagagcgtccacttgggcgctcctactgcggtctccaactgcgctatcaggtcggcctcaccctgcaaagcgatcaggaaggatgcgtcgcagagatattcgcgacgcgtgatgagagtttcaatttcccccgtcgcggccgttctcttagcgccagcaccatctgccctgggtattccgaccttggctccgaccgtctgatagtcccaccagcggacacccggcgcatcaatgcgcgcccccatacaaagcgagcccagctttcgaagccattcattagaggctttacatctgctaacccccagggcggcgcacagcatcccgacaacgccagacttggtcggagcttccgccgtccgtcggatgacaaactttgactggtggtctccccaggcttgaagaagaccctccaagcgaagaaataaggtgttggccctcatcaaaccacctctgcgttcacagtaattttctgaacctcatgccaattgtggccgattttctcgatgaccttttgaattaagatatcgagcgaactgagattattgtcggtaagcgcaatctcacgtcgtttcttttttccatcttgttcttcctcgatgtaagccagcagaggatggcgggaattaggcgagaaccagaatcgctccgttggcttaccgtacccggtgtccatgtcgtggatgtattggccaagctgcgcgatgctctgggcgatgaggtcacgttcaccctgagcaaccgcgggtttcgcaaaagcgttggcgtagctgagaggggtgtccctgatctcaaccagcatgccatcgggaggattatgcgcggcgaaactgttctgttttccagtggggttcaccatcgcagccccccgaatgaatgcgcccaccgtatgtgcggccagcttttcatgttcttccccaaaccccatgaggtttttcaccaattgctcccagtggattgagaaatatttgtaaaaacaggccgaggcaaacatagcctcgtccacaaagccggcacccgcgtcctcgccggggatgtcatcggcagcgacgtagtaatccacctcggggcgggcctcatgggtggagattgcatgggccacttgaagtgctgcttccaccttagtatcacgcttctcccaaaccgtagaagatttgtccggctccagcatgcggcccgacaaggccatgtccggaactgccgtgcgctccgcaataagtccggcgaacccctccgccagttcactctcagcctttccatcgctgtttcggaggaggttcgccatctcttcaacagcctgtttggtagtatagaca

SEQ ID NO: 825 - DNA, 5287 bp, Artificial Sequence
  Synthetic Oligonucleotide
cgcgccggttcatccccacgtgcgtggggagcatactggattttattagggttagggcgtcgaagcaagctgaagcccttcgccgagattagcggttttggaagcagttacgaactttgcaaacgcccggattagaagcagcggtctttcaggaaggggtcgtccgggtcctcgggggggtgcgctacgtccggagccgtcgacggcgccagtgccttgcgtgcggagcgcccggcgccggcgggggccgagtcggtcttgcgcggtcgcgtgatcagcttgagcccgtcccagtcggtaacccagcgcccggtggcgccccagaaagcgatgtcgaagccctgctcgttgttcgtggtccagatgatcatcgccgcgccttcgcggacgccggcacagacgcgctgccagagtttctcgcgaaccatagcggagacgcggccgacaaacacgccggcgcgcggttcgatgagccagcgggtcagttcgccccggaggccgacgggcgcgcgctcgacaagaatgaccagcatcgtatgagctccatccggaaatgatcaggccggttggtctccgccataggcgaccccgcccggggcggaggccgtctggtcgtcccaaaggcggccgggtgcagcggggtcggcatcgaaatcgaggtcggccgcatcatcggccgccggcacgacgctcagcgcatactcgatgtccttcacgacgcggcccagcagatcggcctggctgaaggtatcgcggcagcggtggcggacggcgcgttcgagcggtttgggatcggcgccggcgacttcgaaggcgacgggaacggtgaggacggtcttgtagagatcggccacgtcgtagacgaatgagagctgcttgccggtgtggatgaagcccagcgcgggggagtaaccggccgagacgatggcggcgtggcacaggccgtagaggcaggaattggcgcaggagagggcgcggttgacgggatcggccttggtccagttgccgcggtcatagttgcggccctgccacggaacgccggtggcggccgcggcgcgggcgtaggcgtcgcgaacgcgggcgccttcgcggccccggatctgttcaagagtgagggccggatcaagctcctcaccgaaacgcatttcatagagccggcggacgacctgaaggcgggtcgaacggcgcgtggcgagccgagcctggtggaggaggcgcgatgcgctgcgcgtctcgccggtgccggcggcgtagaaccggacgctttcctcgccgacccacgcgacgaggcagccggtatcggcgagggtcaggatggcggcatgggtgatcttgacaccggggccgagcatcaggagcgcgagcgaggcgcaggggaccggggtgagccccgtggcatcatggatggcgatggccttgtcctcgcggtcgatgcgacaatgctcgacgtacagatagccgaggctgtcgcggatcttgggcagttcgtggaggtcctgcaggcgcatggggagatggacgcactcgattcaggcgagaggcccgctcatgcctggacgacagtgagcagaccaaagccgaatgcctttgcggagccgacgcctgaagtgatcgttctttggaacagatcgggctcactgacacggagagttccctcaagcagtccggaaaggaacttcatctggcgctcacatttcccatctccagcgatcgagtcagaggggcgggagcggcgttggaaggccttcacccagcccatgtgtagcagtcgacagtcggtcatctcgcagccacgaccgctcattttcccggcaaaccattggcctatcacgtcgttggggtcctggtcgctgtcccacgtgagggcaacgcgtttgccctgggactggggccggccggtggtatcgacggtcgtgagcacgcgacgatgcgccatgctcttcttgctcaggttggcacgaatgcgaaagcggcaacaatctccagaattgaatcgcgggttgtactcacggacggcaggatcggccgcaaggaacatgcgggcgttatgaaaggcatagtcccagtccggttttgcctcggattgaacgagaatgatggcccgggggcattcagcctcaatgctgttatcgacgcgaaacaggaaccggacctggtcgaagttctggcgctgatagggggcgaggaaatgaggatcctggttgacctgatcttccgaagggaacgccatggagaggcgttgatggatatgataggggttgcgaagccatagccttcctggacgcggacggtcggggtttatgccaacgtcgatcatgagatgggaaagaaacatcattcgacctcctcggcggcaaggtgacggcgacgagtttgcagcgagcgaaagcgtatgatctcgccgcgcttttcgaggatctgatcgcgccagcatggctgcttggggtcgatccgatcaaggcccatcccgagaccatattcgatcatcgtgacggcgtcgtgacaaagacggcaaagcgaccgcagatcgtccagcgactcgtctccgccggcatgacgataggtgacatgctgtacagtggtggcgggagccttgcagaagacgcagaggtggtgatcctgatcgagacgcgccagacgcttgcgacggtactcagagttgccatagtcggcgcgggggcgcggaggagccggagcgggtcgttgagcgggtgattcggccagttgaacaagaccctccgggccaacggtgagggactcgcgcacaacgaatcgtggccggtgtgatggaggttcaaaagtcagcggaacatcgtaccagaccaaggcgtcggccggtgcctcgagttgatctggcgtaggcaaccagtccagcagggcatcaacggcactcggagacggatcgcccttcagacgaggacgccagggaactgaggccagcgcggtgagaagcgattcatgaacgccgccgttgtgttcgagaatggggcgcgagagacaacaggatttgcggccgagataaagcggccatttgggctcacaaaaggccgagcgaagcatgtccacaagcgagtcttctccctgaagtgcaacaagaaagctggcatcgcagaggtactcacggcgggtgagcatggcgccttcgcgcgccttcccctcgccttcggcaatgcgcatggacatgtcagcgccgaccgtatgaaaatcccaccaccgcactccgggagaatcgattcggacccccatgctgaggttggagagttgcggaagccattcggcggccgcggcacgacgggggatgcccaaggcagcgcaagccatccccaggacgcctgattttgtgggtgcttcgtaggtgcgacgcacactgaatttcgattcgtgattaccccaagcctgaagcggtccctccaggcgaaggaataaagtcgccggactcatgcgggcacctcatcggttaaaattaccttctgaacctttccccaatggaggccgattggtttggccaagacgacggctgcaatgaggtcctgtaatgaaagcgggttatgttcggccagggtgctagattcttttccctcagccacgacaaatgggtagcggtggttgggagaaaaccagaatcgaacctggggtcgaccgaacccgatatcgagatcgcgggcgtacttggccaactctgcgatgctttgcgaaatcaggtggcgttccccttgggccgtgacgggttgtgcaaaggcgttggcatagctgaggggtgtggccctgaactcaacgagcatcccatcagggggattgtgagcggcgaagctgttctgtttgccagtgggattggccagcgcggcagcatggataaaagctcccagagtatgagcggccaattcggaattcccacgcaggttctctacgagcttttcccagtggaccgagaagtacttgtagaagcaggcggatgcgaaaccggcctcgtctacatagccggcgccagcatcatcgcccggaatgtcatcggcagccacatagtagtcgacctcgggacgggcctcatgcgtggagaaggcatgggcaacctgaagagcggcctcaacggtggtgttatcgaggacgccggtctcaagcatgcgccccgtcagggccatatctggaacggctgttcgttccgctatgatgcgtccgaaatcgcgggagagttcctcatccgtccgaccgttggtattctgcagaagatcactcatctcgcggatcgccgagcgtgtcgtgtagaccagcatatcgctgcgatcctcctttttggcgccgatgccacaacccttgagaatagtggccgcgcgggttctcgagtcggaattgggaggcagattctcggcgattaaacgtgccaattgtcgggtgcgcacgccgccaaggagttggcggaactgatcgctcatgcgaatgcttcgtttgatgcattggcttgagatgcgcgagcggagcacaccgccgaagtaacatgtcttcggggcgttgatatcatcccggttcaggttggccgggctgtgattctggatcgcatggatttcgattaacatagaccactcccttcgttgctgtcgaggaattggccggcccatctgagccgggttgtttcacgatcccagattgagagatcgtcggtcaggcgaacccaatccagtttcaggttgtgcgattcaaccacgccgatcgcccagcgcagaggattctcaatgtcgatcaggggttgcatcaggagatcgtcaaacttctgcgcgagccttctgtcttgccgctcatcctgaatccggcagcggctgagttgggatggcagcgggtgatggggagcatggtcgaccgggcaggaagcgaaaagtttggcaacgagccaggcgacctggcgtcgtggcgcacgctggttcttctcgcgcaatggccaccagatcccggaaaagagatcgaatgctgcgactgaccggtcgatcccctgtccggtgtggcttcgtaacatggccaattcaccggtcttgagggcagttaatcggctgacataaatctcggtcggcgtcgggttcatcagctcttcctcttggtttgtctacgccttggggctggtggcggtgtgtcgcggatgcagggcattgtattcgtaatctgacgccgccgatgcaagaaggaactcgtgaaaccgggtgagatcgatctggcgacggcggccatcaagggctgatagaggccggatgctgcatcccaaggagcgtcaccctcacccaagagttcgtttgttcggaga

SEQ ID NO: 826 - DNA, 5271 bp, Artificial Sequence
  Synthetic Oligonucleotide
gggctccggcccatggccctccggcgccctgccggccgcgctcggccgtcagccttcacccatcagcccgtccgggggcaggagcgccgagcggcgccggattttgctgcttgcaatcccgaccgctggggggataatgcgtggggtaagggaagtgggaattctcaggcccggggcttcgtggccggggcgtcgttcgattcgttccccggcagctccgctgcggaatcctgttcgactgcgcgcgccgccctcgcggccgcgaggctgaagggagcaggcatggcgttcaacctcttggaggacccgttcatacctgtcttgtggctggacggatgttcaggtgagtaccgggttgggatcaagcgggcactgacgcaagcggccagggtccggcagatcgcggcatccaacccgatggacaacgtggccctgttgcggttgctgctggccgtcctgcaatggtgcaagggggatgccacggacggcgaccgcgccgaactcaggcaagagacgagttccggggtcccagccgagtggctatccaagctcgaccgacacgcggctgcgttcgaagtgctggggaaggaccacggcttccttcaggtgcccgccgcgcgggggcaggcgacacgtccagcgacggacctgctgcacgagatgccgagcggaacgaatgttgcccacttccggcacacgcgcgacttccgcgatgggctctgtcccgcctgttgcgtgctggggctccttcgccagacctgctttgccaccgcaagcaagcacgggcgcgagaggcagaaggcagccgggctgaacgggcctgcacccgcgtacgccgtccccctggggaagacccttctcgaaaccttgcagttgtcttggccttgccctggagaagagaacgatgcgccggcatgggaagaggccgggggagcgggggcaggaagccccccgcagagcatcggtcccctttgcgcgttgacttggcagccgcgcgtggtttggctcgaacgcgcgcccgacaccagaggtgtgtgctgcaactgcggatcggagacgcagttggtgaggaggattgcgttcctcccgggatggggacggccgttcgagaaggggtactggtcgcgggatccgcacttgctcagaaccacacaagtggtgaagaagagaaacgcgaaacctacgaccaatgaggtgattccacggttgcccgggccgggcgaaccactggagaatcacgccgcagtttggcagagcgtggttgaggggctgcttcagcgccaggccggacggggcgagaccgcccggcaatcacgggtggtcctcgtcggggtcagtcgcgggctctacaagaacgctggggagcatcactggagatggccgccggtagtggcttccactgcgagcctcttggggaaggagatcgagtggacacgccagacagtcgcggtaacgggcgcggcccgcgcgcacagcgcaggttggggcaagcccgccggaggccaagtcgttgtcgacgccttgcgggggcagaaagcaaaggcgcacgggatccgcgctgcgttgtgcgccttcaggcccattcttgagggagaactcggacggcagttcgtccgtctcttgcgccaattggccgagggggccgggcgcgcggaggagctggggcagcctgtgaagcgatggcgcggggacgccatcgcggccatacagcgggccgcagcgcatgcggcacgcctcacgctggcctgcggccctttggagcgcgtgttgatgttggccaaagtcaggaaggtcgtaacaaaggcagcggctcgcccgccgctgacgtctctgtctgcgggaagcgaggagcgtacgcccgggcagaaaggagcttcggtgtgaggcagacggatagcttcgtcgcacgactgagtgacccgaacatagtcggccccgcggaactggcgctcctgcgccagcttgctgggcagcgactcgatgaacgcgtggagggctttgacttgttcgcgggcgtctggtggccgcttcggcagaagagccgggcgagcccgcgccgggaggtggcatggctcatcgccaagctctatgcagctgcctccttgccacacgtgcgccgggccaatggaccggggccaaggcttgcagaggtagtaggacgatgcgagccgctcgagcgacgggcgcgggagagataccggcgacgtttcgattcgctgctgcagacacccctctccgcgatcgagacccacgttgcgtgggcgttgggtgtcgcccatgatgcggtcgggcgcgcccggattcagggactcgactgggtggcactaacggacgacctgtccatctgggaccgcgcgaacgaacatcgccgtcgcgtcgatatccgagaccagtgggcaaaggactacttcggcgctatgccaaatccgaagaagggagccaacgatgctgattgaaatccacatgatacagaaccacagcccttcgaatctgaaccgcgacgacctgggggccccaaagacgtgtatcttcgggggcgtcacgcgtgcccgcatctccagccagtgtctcaagcgcagcatacggcgaagccagctattccaggcggccctggagaagggtttcggcgtgcgcacacgccgactgatcacgattctcgccgagcaagtccatcctgacggggatccccctcgtgagttggtggacttcgtcgctgaggccttcaaggaaggcggggtgaaacgcgtggacgcgcgcaggaatccccaggaacctgacaacacgaatattctcctctttgtgccacaatccgccatcgatgagatggcgcaatgcacgaaggaggagtgggagtcttcggaccgggacgaggcgagactggctgagaggttggccgaggcactgggcaaggcagcttcggttcccgacatagcgctgtgtggacgcatgaccgagctcgagccaggggggcttttcgccaagctcgatcttcacgtcgatgccgcgctggcggtggcccacgccatgtcgacgcatgaaactctgaacgaggtcgattacttcacggctgttgacgatcgagccaagggaaccggtgcgggacatgtcgacgaggcacagtacaacagcgcgtgctactacaagtacttctccgtggactgggagcaactggttcggaacctggcgggcgctgagccaaaggaccccggcaagggggcgaagaaggctaaacgtgaagcctacaagagcgctaggagagcttacgagaagagggtcagggacgcgcagggggtcgccgcagcgacactggggcacttcctcatcgcggcagcccgtacgaccccatcgggtaagcagaagagctttgcggcctacaacgagccaactgggatcctcgtggagtttaagagccagaagacgcctaccagctacgcgaacgcgttcgcggagcccgctcgcaggatcgggctgcccgatgacgatgcgcccgacgtaagcagcctggagggtcgaagcatcgcccagctgggggaccatgtgttgagcctccggaagacgtaccagtcgaagtcggagctcctctggtacagccccaagttgtggcggtttccactgcgcgggtgggaacgcgaggccgatgggaagaagaaggagccgaggccgtttgccacagcgaccttctccgtcctggtgggtgccgagggcggagcggaggccaagactcttgtcgaggcggtaattgagaaactcagcatcggccgtacgtgggcggagctaaaggggcatgggaacaggtcgccccaggagagctgacatgaccggcgccaacaccctctttctgcgcgtcgagggcgccctgcaggcgtgggggcacaactcgaagttcgttatccgacgtacgatgcccgcgccgaccaagtcgggcatcttgggcatgatctgctgcgcgaggggtttaccgcgggtggaggcacgcgggtacctccggcggctgaacgccctatgcatgggggtgcgcaccgatcgggcgggactgcgatggtgggactatcatacggtgggggcgcgcgtgggaatgctcagggcagacgggaagggggtcaagcgcaccaagcgcagcggcaagagcttcatcgagaccctcgtgacgcggcgcgagtatctctgcgacgcgagcttccttgtggctcttcagggcgacaacggactggtccgtgaggtccataggtcgctcgccgcgccagagtggccggtatgcctcgggcgcaggagctgtcctccttcactccctgtcgtcagcgggaaccagtcgatggacttgggggagttcccggacttgaggtccgcgttgtgctcacaggcctggcgcccgcgccaccggcgcgagccattcccccgggcaccgctcctgtgtttcacggagtggcgtccttcacaggagcaacccttcgccccgccggacgccgacgtctggtacgacgttcctgtgtccctggaaccacccgttcaccggcctcgactcgtgcaggagatccacgtcaaagccggtacggggaaggacgtgcccgttggatcgccgcggcagcatcacacaccaccgcccccgcgcccgcgagccgactataggaacgccgggtacatgcggaagcgcgcacagaggatcgaacaggaccagcatctctgcgtcttctgcaagacaccggccacgacggttcagcatgtcacctatcgccgagcgggaggtgacgaggaaacggaagacctccggtctctctgtcgtctgtgccacgatgccgtgacgatggtcgaatacgggttgggcatggggctggaccgaatcaacccggaggacccttgctggcgggaacgcatcatcgccacccgagagaagatcatccggtaccggtccctcgcgacgcgccgccgccggctggcagcagaggaggtcgtgtaatgtacgtgtccacactcctgatcgatgtgggtgacaacccggaccgcgaacgccgcgggcgcacttggctgcgcaacatctaccgtgtgcaccagcgcctcgcgatggcctttccgtcgaagatccgacggcagcgggatcgcatgttccttgcgccgtacaaggccgacgacttcggacaggggacggatgggcccgccgcggtgcacgtcgacaggaacgggaaggcgggcttcctcttccggattgaccaccacctggtgccgcgcctgggctatcgtccggtgatcctcgcgcaatcggcggaacgtccgaac

SEQ ID NO: 827 - DNA, 5248 bp, Artificial Sequence
  Synthetic Oligonucleotide
aacgaaggaatcaaaaagcaaggatgcagatgagaatgacgataaaggctccgatagcaagatgctggtctataccacgcaggaggcgattgaggagatggcgcgacttctgcaaaacgatgatgatcaatcggttgagaaattggctcaggaatttgcccgattaatttcggaaaagacgtttgttcccgacatggctctcgctgggcgaatgctggagccgaaatcctccaaaatttgggctaatctggataaaaccgtggaagcagctttacaagtggcgcatgcgatctccactcacgaagctcggcctgaagtggactattacgtcgccgccgacgatattcctggaaaagatgcgggggctggatttgtggatgaagcgatgttcgcttcggcatgcttctacaagtatttctctatccattgggaaacattggtatccaaccttaacggcaacaaggaactcgctgcgcatacggttggcgctttccttcgcggcgtggccctcgtgaatccaaccggaaagcagaacagtttcgccgcgcacaatccgccggatgggatgcttgtggaaattaaaaattcaccggtaagctacgcgaatgcattcgctaaacctgtcagcagagaaaacagagacattatatcgcaaagcgtagcgcaaatggctcaatacatatgggacatcgatactggatatggtaaaccgaaagataggttctggttctcaccgaatcttcgattcccactgaactatattgaggataaaaacgaaattcctgttagcgaacagaaccttaaatcacttgatgaattgattgccaatgttgtaaaggccatcggatacgattgggaggaagtacgtaaaatcgtggtgaattccggggtgcgctaatggatgcaaacactctttttcttcgtctggaaggtccgatgcaggcctggggaaatcagcagtcgaagtttgtcatccgtcgcactgcggaagcgccgacaaaatccggtgtgattggactgctttgcgccgcaatgggcgtatcccggaaagaggctcccgaaaaatggcttccgatattcaataccctgcatatgggtgtgcgcattgataagccaggattccgctggtgggactaccatacagtaggagctcggatgaagatgcataccgccgaaggcacacccaaggatggcgcaatgctcacccgacaggaatatctatgcgatgcttcatttcttgtcattatgcaggggaatccggaagtcattgatattctgctgggcgcaatgaagaaccccatgtggacgccataccttggcagaaaagcctgtcccccttcccgtccactattggaatccataccgaccggggattttcaggatatcatctccgccatgcggttcgttccatggcgtccaaggctagcagaggataaatatccagacacacttgattgccttctggattgggagtcgactccggaagaacgggaagccccgatagatgcgctcatccaatatgatgtgcctttgacctttgatcctccgtctcacggacccagatatgttattcgcaggaagctgctcgtcggttcaaatggggagataagcattagcgaaaaacccacgcaaaaaagcacgcccgctccattcagaccgcgtgcggattaccggaactcagagtatcaaaaacgtcgttcggagaggctgaagtacgaccatcacttatgtgtattctgtaaatcgcccgctaccactgttcagcatatcacctatcgtcatgccggaggaaatgagagtgaggatgatttacggtctctctgtcgcttatgtcatgatgccgttaccatgatcgagtatggccatggcatgggtttggagcgaattaatccggaagatccgaaatggcgcgattcgatcatccgcacacgcgcggagatcattcaataccgctccctcgaaacaagacggagaaagctatcgaaagaggaggtgtgagagatgttcctttcatcgttgatgatccaaatgggggataatccggaccgccctaggccggggcgactgtggctagccaatcactaccgcgttcatcaacgtctatgtatggcttttccctcatcctgtcgccaagcggatgatccgtatttccttaagccatatgaacctgcggatttcggcgaagggcatgttcatgtggctcggagtgaaaacgccggatttctgtatcgagtggattaccctccggcgaatcgtgcgatgattctcgtgcaatcctccgtcaagcccaattgggagtacgccttccataacgctgaatatctgctcgacggacctcccaggatcagaacctacacgccaatgtttgagaatgggcaaaggtgtcaattccgccttatagccaatccaacgcgtaaaatagagacgaagacaggcagcgatgggaaacgcaagcatggaaaacgcgtccctgttcgacccgatcgctttcttgattggcttatcgaaagatccgaggtgaatggtttcgaaattgaatcgaaaaccatttccatcgaatcctcctatgtctttgttaggaaatccgaccatgggaatggggaacgattatgctccgtgcgatacgacgggtttctgcgggttacgaacagcgattcctttcttcaagcaatcacaaaaggaatcggtcccgccaaggcgtatggattcggattgctttcggccattccggcgatggatggaggataaggcgaatgaaaatacacgacctgcatcaattgccgaaattcagggatggtttgagttatctctacgtggagcattgtaaaattgatcaggaatcccaatccatcgccattcatgaccaatcgggaatggttcctgtgccgtgcgcgaatctcgccctcgtcttgataggtcccggggtttccgtaacccatgcagccatcaccgccttggcggataacggatgtctcgccgcatggtgcggcgaggggggagttcgatattacgcatcgggaatgggggagacacgcagttctgcaaatctattgcatcaagctcgaaaatgggcggacgagaaaagccacatggatgtgatacgcagaatgtatcagatgcgtttttcgggtaggttggaggaatcgctcaccttgcgccagatacgcggaaaggagggattgcgtgtgagagaggcctatgcgagagcatcggaaacttacggggttccatgggatggaagaaattacaatcggagttcttgggaggaggcggatacggtaaacaaagccctctcagtagccaattcctgtctctacggtatttgtcatgcggcgatcgtgactgcgggtttttctccggctctcgggttcatacacacgggaaacatgctctcatttgtatacgatgtggcggacctgtataaaacggagatcacaatccctctggcattcgaggaggtggcgaaatccgaagcgaatcttgaacgccgcataaggcggagttgtcgggatcgatttgtcagcaaccgtcttcttgaaagaatcattcccgacattcaatccgtattgatgctaccaaaacgaggagaggggaaaaacaaggaggagacggaggaggaaccaccgcccgcaggatggttatgggaaccgaacggggagtttgtggagggagggcgtttacactcgacaaatgaggagggagaaacaacagcaaatgatggcgctgatacttgaaaatgttcctgccagtttacggggggagttgacacgttggttgttggaacctaaagccggcgttttcgtgggaaaggtctccgctcaggtgcgtgacaaactatgggaaaaggcctgcgaccgttcagagggtggaggatgcatcctcatccattcgacggataacgaacaaggtttttcacttcgaagttatggaaaaacctccagggagatcgctgatttcgatggactgcagcttgttcggattatgtgacgaggtgatatttcagtattgtccccacgcgcgtgggggtgaaccggaagttgttgagcagtactttgacctactcttattgtccccacgcgcgtgggggtgaaccggattgaatatatgattatcgaaatccaaatcaattgtccccacgcgcgtgggggtgaaccatatcatggctcgtcagcaactcaacggcaagtattgtccccacgcgcgtgggggtgaaccgttgaatgtcacgcctttttgtccggcttgctcattgtccccacgcgcgtgggggtgaaccaatgattgaccgactgccggaggcggccaagcgattgtccccacgcgcgtgggggtgaaccaaaatttggccgagcatcgcaggatggaggggcattgtccccacgcgcgtgggggtgaaccgtcgaaacccggcgcgccgcacgtcgggtcctcattgtccccacgcgcgtgggggtgaaccgcgcgcagggatcgccgagtacggcggcagcggattgtccccacgcgcgtgggggtgaaccgacatccctcagtattgtttcgtatccgttgcaattgtccccacgcgcgtgggggtgaaccggatgcgctaaaatgaatataaacgccaaaacaattgtccccacgcgcgtgggggtgaaccgagatatgaagagatgagaattaataagttggaattgtccccacgcgcgtgggggtgaaccattccctgcgtcacgatatccgcccatgttccattgtccccacgcgcgtgggggtgaaccaaaagcccccgatataataatatcgggggccccattgtccccacgcgcgtgggggtgaaccggcggctcgccagaccaccaagaccgccaagaaattgtccccacgcgcgtgggggtgaaccaacatgttgcgtcccaataacgtgatggacttcattgtccccacgcgcgtgggggtgaacctacggatttcatcatcggttccatacgccacccattgtccccacgcgcgtgggggtgaaccggatatcgcaaggagcgtcacgacgataggggcattgtccccacgcgcgtgggggtgaaccagcccaaccgaaaaccacgaatatcgtgtggttattgtccccacgcgcgtgggggtgaaccatccccgatcacactggcgcatcccgtgagagtattgtccccacgcgcgtgggggtgaattgtcaaaaacaagcacgttggcgagagtggatgtattgtccccacgcgcgtgggggtga

SEQ ID NO: 828 - DNA, 5248 bp, Artificial Sequence
  Synthetic Oligonucleotide
acggccagcgcctgtcggatgtccggcacgatccgctgcaggagccggttctcacgaaacgtatctcggcagcggatgcgcacggtccgctccaactgcgtgacctcctctgccacagcccggaacgcgagggggatcgtgagctcgaccttgtagaggtcggcgatgtcgtagacaaaggagagctgcttgcccgtgtggataaagccgatggcggggctgaagccggttgccaggatggcggcgtggcagatgccgtagagacaggagttggcgcacgagagggcacggttgacgggatcggctgcgccccagttgccccgatcgtagttgcgtccctcccagggcacaccgtgctcgcggctggcagcggcgtaggcatcccgcacgcggactccctccataccgcgcagacgctcgacggtcgcgtcgggctcgacctcgtgctggaagcgcatccggtacatccgcttcacgacttcgagccggctctcctcggaactggccaggcgggccagatggagcagtggggcggcgctgcgggtcccgcccatgcctgccgcgtagaaccggacgttctcctcgccgcaccagatgaccaggcagcagcactcggccagaacccggattgccgcatgcgtgatcgtcgtgccggggccgagcatcagaacggcgagcccggccgcggggaccgggacgatgccatccttgtcgtggatggcgatcgtccggtcctctcggtcaacgcggccccgctcgacgtagagcgagctgatgctgtcgcggaccttcggcaggatgtgcagatcgtcgagcatgacccctcactcgcgcagcggcgcgacggaaagcagaccgaagccgaaggccttggccggtccgatgcccgactcgatggctttccggaaggcatcggcgtccgtgacgcgcagaacgccgtcgtagcggacggagaacagcttcccgcgttgctcgaccttgctgtcatcgtgaccgggcttcccgaagtatacatagccggtgtctacttgcagagtgtctgccgcgaacgagaaccccgcttgtggcacccgcttggcgagccagtcggagacctgctcccgcggaactgcaatgcgcgggcgcttcttcgaggcggagctgtctcctttggggtaaggcgtccgcttcgtcacattggcctgcaggcgaaaccgcaagctctgactttccgcgaagcacgggtcgtactcccgcacgcctggcttgggggcccgcaggtagtcgacgttgtggaacgcgtagtcccagtccggaaggccggccgattggaccaggatgacggcgctgccgcctggccgagcctctacgcggtacaggaacccgtcggcggcggagcgcggcgcatgaacgcaccggccctgcttgtccgtagaccagtctccgaagtcggcggtctggtaccgctccagaaactgcggatccctggtacggcggtccgacgacggaaacgccatgcagaggcgctgatgcacgtggtaacggttgcggagccagagccggcccggccgcgggaggtcggggttcgtaccgacgtccacccggagaaccgacaggtacatggctactccacctcctcggcgctgagacgccgacgccgggtttcctgcgagcggaacctgacgatgtcgcggcgcctggcgataatctgcttgcgccatcgcgggtcctcggggttgatgcggtcgagccccatcccggcgccgtactcgatcatggtgacggcgtcgtggcacagccgacacagggaccggagctcctccagacgctcgtcgcctcccgcatggcgataggtgacgtgctggaccgttgtggcgggcgctttgcagaacacacagaggtgctcgtcgaagcttagcctctcggcccggactcgcttgtacgccgagttgctgtagtcggcgcgcggacgcggaggcggcgggacccggctgaccagcggcgtgtcctccaccgcgacctgtccgtccgcgccgatggccagttcggttcggaccacgaaccgagccgcgtgcgccggcggcgcgagcgagaccggcacgtcgtaccatatctcggcgtcttcgggcgcctcgggctgctcggccgacggtctccagtccagcagacactcaaggcgcggcggggccttctcgcccttgaggcgcggctgccacgggatcgaggcgagcgccgtgaggatgtccgggtgctcctcgatgggcttctcgaggagcggacgcgacggagggcagcacttgcggccaaggtagagggtccagcgcgggcttctcagcgccgtctcgagccggcggagcaggtcctcgtcgccctgaagcgcgaccagaaacgacgcgtcgcagaggtactcccggcgcgagagaagagcccccagcttggccccgccatcggcacggcgcatctccatacccgccccgacggtgtggtaatcccaccatcggacgccctcacgatcgatccgcccgcccatgcggaggtcgctcagctcggacagatgggctggcgcgtcgtcgcgagacagcccgagggcgcagcagagaaggccgatgacgcccgacttggtcggagcttcgcaggtacgacgcaccacgaacttcgagtcgtggctcccccacgcctgaagcggcccttccaagcggaggaagagggtcgtggtgcccatcacgcttcgcttggcgcgagcccgacctcggccacatccttccagtcgaagccaagcgccgctacgagggcttgaaccagttcatcgagcgatcggtagtcctgatccgcaagggaaggttcgtcatctccaacagcgaggcgatagcgaaggttcggggagaaccagagccgcatagtcggccgaccgaagcccacgtcgaggtcgtgggcataggacgctagctgcgtgatgctctgcgaggtgatgtcccggggtccgatctcaacaggcttggcaaaggcgttcgcgtagctgatgggcgtgtcgcggatctcgatgatgatcccgtcgggcgggttgtgtgcggcgtagctgttctgcttgccggaaggggtggtgagagcggcggcatttagcaacgctcccactgtgtgggctgccagcctcggcgccttctcgcccgtcttggccaggttggtgcagagctggtcccagtcgatcgacaggtacttgtagaagcatgcggcggcgtacatcgcttcgtccaggaagccggctcctgcatcctcccccgggatgtcgtcggcggccacgtagtaatcgacttccggcttggcctcgtgtgtcgagatggcgtgcgcgacctgcaacgctgcctcgacggttgtgtccagccccttccacgtgtccttggcggacttgtccggctcgagcattcggcccgagagcgccatgtcgggcacggcgatgtcggacgcgatcatctcggcgaacctgcgcgccaactcgtcgacggtgaggttggctccctctcggaacagccttgtcatcgcatcgactgccgatcgcgtcgtgtagacaagggctttgctcttgtcggctgaggtcgcctcgtcttcaccttccgtcgccttcgcggccttcttcggcaggaagccgcacgccttcaggacgtcctcagcacgcttgcgtgccttcgggtcgtcctccaagcccacggcgatcagcttcgcgagttgccgagtacggatgccgccaagaagccccgcgaactccgggctcagacggatactccgtttcagacactggctgctgatgcgggagcgcaggacgccgccgaagtagcaggaattgggcgcgcccagatcgtcgcggttgaggttggccgggctgtggttctggatggcgtggatctggatcaacatgtcttggctcctttctcaagcctcaaggaactggtccgcccacgattggcggacggctgggttctcccagcgtgagacgtcgtcggtaagggccgcccagtcgaccgcggcgtcgaagtcctgcagcaggcctagggcgaagtcaaggtgcggctccaggccggacaccggcgtcgtgagaagagcgtcgaactcgcgcacaagtcggtcgcgccgggacggctcacgccgcgcgcaccgtgcatagacgcgagcgagccgacggccccgctcatgggggaccggtctcgcggcgtagagcttcgcgacgagccatgcgagggatcgccggggcgcctgcgcgctcttctggcggagtggccaccagagccctgtgaacaggtcgaacgcctgcaaggtccggtccagaggctgcccggcataccgacggagcaggccgagttcgccttgcttcagcgccagaagcacgtcgatgtactgctcagtaggcgtagccatcagtcggtctcacctccctcctcatcctgggtatcgtccgccgagcctgttgtcgcggcggcgaactccgggcggatcgcggcgatcctgcggcggcgttccgtatcggcgactgtggctgcgggagcgaccgcgcgggctacggccaccatcataggcgcatactcctcggcagctcgtgcccaaccgtcctcgccgccggtcaggagttcgcttgcctgctgagatacgcggtgctcgacatgggggcggatggatgcgatgagcgaggccgctctgggaggcttctggctcttggggtgttcagctatgcgtcgaagcgcgaacccaaccgcgcgggacgcggagtcccaccgcatgtacacgccttcgttctgagccacgcccagcgggccggatgggttcgcgacgacgcgttcggttgcctctaggtacttgtcattctggacggttgcgaagtttgccaccgatgctcggtcaccctcgttgcgcaccacgtcactgcccagcagccccgtctggataaggctccactgcccaaccgccgcgtcgggcctcgcaacgggatcgcgtccgtgaacgggcacgacctcccccttgtcgtcgggagcccgcagcacgtgcgggtcgacccagtcgcgcttcgtggttccttcctccttcgtgctgcctagtccctcaaacacgcaggtccgcaccagtgtcgtccattccccgcaggcagcgcacgcagcaggcgggccagaccgatcgtccagccacacgcgcctcggcagccacgtcagtcccatcagcaaaggcacctggcccgagctcggcagagaccgcttgggcttgatccagctcggatgccctaggtcgc

SEQ ID NO: 829 - DNA, 5223 bp, Artificial Sequence
  Synthetic Oligonucleotide
agctcgtcgttgacctgttccggttcacccccacgtgcgtggggaagacactggcaagttgaacgtattttaaggacttgcgcgcgttgaagcaagaaaaaggccatcgaagtcttcgacgagtttgctggtccggccgagcgtttgtagggtaaacccctgttcggtgttgctggagtaggccatcacggcggcgccgcgttttgccagggctttttggacccgctgccaaagcaggtcgcggacgcgggcgggcaggcggccgatgaagacgcccgtctttggctggatgagccagcgggtcagttcaccccgcagagacggtgtcgcccgttccactatcatcactatcatggcgagttgttcctttgcgctttggcagggtgtcggggtccagtttgagcacccggctgatgggcatgtcctcggtgaggcacctgggcgtccagtattcgcccggcttggcggggtcgtcggcgaactcgtcctcgccggcgtccgggactttcaggacttcctcgatgtccggcaggatttgctcgatgagtcggccggtgcggaatgcctctcggcaggcgattcggacgttccgttcgatatcggttgtcccggccgcaactgcgcggaaggccagcgggatggtcaggtcggccttgtagaggtcggccacgtcgtaaacgaatgacaactgcttgccggtatggacgaatcccatcgcggggctgtagccgccggaaatgatggcggcgtggacgaggccgtagaggcaggcgttagcggacgagagggcccggttgacggggtcggcggcggaccactcgttccgctggtaatttcgcccggcccagacaacgccggtttcgcgtgaagcctcggcgtatgcctggcggactcggatgccttcctttcccctgatctgctggagcgtcaggccggggtcgaggcgttcggtgaatctaaaggcgtacattcggatgacgacctggaggcgggtgacgtcgttgctgaccagtcgtgcctggcgcaggaggtttcggctgtggcgcgacccgcccaggccgtgggcatagaacctgacggcgtgctcgccaacccagacgacctggcagttgtcatcggccagggccttgactgcggcgtgggtgatggtggtgccgggtccgaggataagcagggccagcgccgcggccgggacgggcgtcacctggtcggcacggtggacggcgatggatttctcgtgctggtcgatgacggcatgctcgacgtagaggtagctgagcttgtcgccgaaacgcggcaattcctgaaggttctgcataggccacccatttcccgttgctgttatcggcatttggggccggcgtgttgagtttgaaccttcctgcaccctgtttacttgtcaaagatcgcgccgcggcctcatcgccgggcgggttcactcagtcgcgcaggggcgcgacggaaagcaggccgaagccgtagcccttggccgggccgatgccggcggcaagggccttggcaaatgcgccggcgtccgtgacttcgagaatgccttcgtaaatcacggagcgaaggcgatgcccttgacccggcttgccgtccttgctgacatatacgtacccgggttggatcagcggttcgccttcgacacggaagcctgtgcgggcgccctgcttgcaaagccagccgagaaggccctccttggtagcaggaaccggcacgcgccgcccgttctttgtcagcggcgttgtgcggcgcgagctcgcgtgcagcttgtggaccttcatggttgggtttgcccggagccggaatcggaaccgtttgccggactcgatggtcagtttcaggggccggggcttttccggcggcccggccagcagatgcccggcgttgccgacaggccgcccgcggtcgtcaagtaatcccggcttgagtccgaaggcgtagtcccagtcgggctcgattgctgacagaaccagaatgacagccattccgccgggctgaggatcgacgcggaacaggaagccggcgttgttgtgtcgcggaacatggacctggccgtccccgaaatcgtctgggttgtagggttgaagcatttcggggtcacgttgcttgcgatccctgtccttgtctggaaacgccatgcagaggcgttgatggacgcggtagagattgcggagccacagccggccggggcgtgggcgatcggggttatcgccaacattgatgagtagcgttgagataaacattactcgacctcctcgggcgcaagccgccgacggcgggtctccatggagcggaaggcgacgatctcatcacgcttggcgatgatcttgtcccgccactcgggcaattccgggttgatgcggtccaggcccatgcccaggccgtactcgatcatcgtcactgcgtcgtggcagaggcggcaaagcgcgcgcaggtcctctggtgtttcacccccgccggcgcggcggtaggtgatgtgctgaacggtaccggccggggccttgcagaagacgcacaagccgtggtcggaatcgaggcgttcttggcggcgcttcctatactcgctgttaccgtaatccgctcgcgggcgcggcggcgcgggagtgcgggtttggcgcggtttggggtgaatggcaatatccttaccgtcgccgacggtcaactgggtccggacaacgaaccgcgggtggtgccccggaacgtcgaaggactgggccacgtcgtaccagacttcggcgacggccggggcttcgggctcgtcggcggagggccgccattccagaacgcattcgagaaactcgggccgctcgtcgccggcaagtcgcgggcgccaggggacagagcgcagtgcggacgtaaggtccgggaaatcgcccgtgtccggttcgtctatgcgcccgacaagcggcagcgacggcgggcagcttcttcggccgagaaacatcggccatttagggtagaccagcttttcttttgcgtctcgcagcaagccgggatcgccctgaagtgcgacaaggaaactggcgtcgcagaggtattcccggcgggtgagcatggcgccgggcttggtcttgccctcggcggtgggcatttccatgcgcgctccgacggtatggtagtcccaccatcgaacgccgggacgatcgacgcggacgcccattagcagggcattgagggcagcaagcctttgccgggcatccgtccgggagattcccatcgcggcgcaaagcaggccaacaatcccggacttggtgggcgcgtcagcggtccttcgaatgacgaacttcgactcgtggccgccccaggattgcagcggcccttcgagccgaagcaggagagtatttgcgttcatcgtcgcgacctccttacttcattgtgacggtctgcacctcggcccaatcgaacccgatagcccgcacgaccgcgacgacaagttcgtcaagggacttgagattgttgttggtcagggcgatctccttcttgtcttccgtggccttcaaggcgtgccgcagattgggggagaaccagaaccgactgtcgggcttgccatagccaatgtccaggtcgtggacgtattgtccgagtccggcgatgctctctcggaccatgtctcgtggacctttacacggcactgggttggcgaaggcgttggcgtagctgatggggttctgcctgatttcgacgagcattccttccggcgggttgtgggcggcgaaactgttctgcttgccggtgggagtggtcagggccgcgccgcggaggaatgcgccgacggtgtgggcggccaggtgctctttgttgccctggaatccgtggaggttctccagcaactgttcccagtggatcgagaagtacttgtagaagcaggcggaagcgaacatggcctcatccacaaagccggcgccggcatcgtcaccgggtatatcgtccgcggcgacgtagtaatcgacttccgggcgggcctcgtgggtcgagattgcatgggcaacctgcaaggacgcatcgactgtggtttcggccagaacgccggtttcaagcattctgccgctgagcgccatatcgggaacggcgacgagttgcgatatgagcttcccgcattgctcggcaagttgatcggtcgggtcgtcgttttccgacaggagcttggctatggcgccgatcgcctcatgcgtggtatagacgagcatgtcgctcttcttgtcgtccttggatttgatcccgcacttgtcgagtatcttcgcggcgcgtttcttgacatcggccttgccggtcacgctttccgcgattagtctggcaagctgcctggtgcgtattcccccgcagagcagcttgaattgctcgctggtgcggatgctccgcttgaggcactggctggaaatgcgggatcgcattactccgccgaagtagcaggtcttcggcgcgcccaggtcgtcgcggttgaggttggccgggctgtggttctgaatggcatgaatctcgatcagcatggtgttctccttctggtacggttttgatcagataaggcccaggaattccccggaccatttcaggcgtgtctgttcccgttcccatatggacagatcatcggtgagccggacccaatccagccctttgccgttgtccgcaatctgcgtcaggccccatcgcaaggccggttcgatttgagctagcggaagcagtagcaattcatcgaatcgctgctggtggcggcctttcgtttgcttatcctggatgtgaatatgtactccgccaagcagaagcgcgagcgttgccccgctggtttgagccagaggccggaaggcatacaacttggcgatgagccaggcgacttgccgacggggggctttctggttcttctgcctgagcggccaccagagcccggcgaacaggtcgaacccgtccaccgattcgtctagagcaagatcggtcagattccgcagccggccgaggtcgccgggctttagggcttgcagcgtgcgaatgaattcctcggtgggtgtgggattcatttcgtggcccccttctttgttttgggcttcttcggctcggcatgggcctttggcgtcatatccggcaaagcacgcgcgatctcgcctcgcctccttgtcgccttaaccgtgaaccccggcgcgagcgacccagcgacggcgggcagaatttgccgatattcatcgacggctttcggccaggctttttccggctgggaaaggaggtccg

SEQ ID NO: 830 - DNA, 5198 bp, Artificial Sequence
  Synthetic Oligonucleotide
tggggtcttccgggttgattcggtccaagcccatgccggcgccatattcgagcatggtcacggcgtcatggcagagacgacaaagggaacgtaaatcttccggggtctcattcccgccggcccttcggtaggtgatgtgctggacagtggttgcgggcgacttgcagaagacgcacagatgatggtcaagagcaaggcgattttcccgggccttcttgtattcggaattatcataatcggctctcggtcggggaggcgatggtgtgcgatgctgggccggctcctttgcaatctgcacatcgccgtcaatactcaattccttgcggatgacaaagcgaggttcatgagcgggcgggtcaaaagaataaggcacatcgtaccagacctcggcgtcttccggtgcttcaggctgttcgggcgtgggttgccaatcaatcaggcaagcgatggttgccggcggtttatcatcttcgagccgcttgcgccaggggacgaatttcagggccgacaacaaatcggagaaatctccgatttgatgctccttatccaaaacaggacacgagggagggcagcattttcttcccaggtaggggggccactttggattttgcattgcttcatggagttcgtcaaccaagtcggcctttccctgcaacgccacgagaaaggatgcgtcggccaggtattcccggcgcgtgatgagcgtgccttgggcgccggtcttgagaccgccccctgcggttgtcatgcctattcccgctcctaccgtgtggtagtcccaccagcggacgccgggccggtcaatgcgaacagccatcgcaagccctttcagtcccgggaggcgttcgcgcgccgtctggcgcgacagtcccatggcgcagcagagcaggcccagcacgccggacttggtcggcgcatccatggtccgccggatgacgaactttgatgtatcgccccaagcctggaggggcccttcaaggcggaggaagagggttttggttttggtcatttcgccgcctccgcagtcttcccggttgccttaatcttgtccatgactttattgacgaattgaccgaaatcaccgaactcatttgaaccgaccacggattgttcttgttcgtgttccttcttgcttctgtctatccaggtcaaacgatggcgcagattcggcgagaaccagaaacgttcggcttcgattttataacctgcaatgagatcgtgggcgtactgtccaagtctagcgatgctttcgccaatcaaaccgcgttctgacttttccggcacgggatcggcgaaggcgttggtgtagctgacgggcgaggccgatttagttttcacctcaaccagaactccatctggtcgattgaatgccgcgcatgcatgctgtttgccggaggggttggctttggcggctgcttcaaggaagaaccgtactgtcttgcaggcgagctcggcatcgttcgccaggttcttcttcaactgctcgaagtcaatgacgaagtatttgtagaagcaggccgagttaaacatggcctcgttgatgtgggccgcgccggcgtcctggccgggcacgtcatcggcagtagtgaagtagtctacctcgttcacgaccgcgtgagtggagatggcatgagcggcggagagtgcagcctcaacggcaaacttgcctttgaggtcctgaaaaggcccttttgcatcgaactccgtcatgcggccaaaaagtgcgatgtcgggtgtcttgataaacttaccgaggatctcggcgaatttctttcccaagtcctcgcttcctgcccgcacagcctcgcccatttcgttgatgtccgattgaggcagaaagaataatatctcgaaaatgtcctcgtccttcttcagggggacccccccgttctcgaaaacattccggatggccttgcgctttttctcatccccggccgcctctgcgatcaattcaatcagccgccgtgtacgtacgccgccgcccccctccaaagctaccgcgaactcttcactgcggcggatgctccgtttgagacattggctggagatgcgcgcacgtgtgactccgccgaaaatgcaggtctttggtgcaccgaggtcgtcccggttaaggttcgccgggctgtgattctggatcatgtggatttcaattaacatttctattctctcctttcttttgaattagtagcgttgagatacatttctgcccatatgtcgcgaacatcgcgtccgcgacggtgctcctcgccccggtcccagatggagagatcgtcgaggagttgtaaccagtcgatgccctttacatcccgcgcctgcggcacatgcccggcaacaacccgggcgacctctcccaacgcccaatgtaaatacggctccagagacgagagggacgagcaaagcatagcgtcgaatcgagttcggtagcgcttacggtcatcctcgtcctgcggttcgcatcggcccaggacttcgggcaaagatggccccgcacctgaatcgggccggatgtgcgggatgggaaaggcgccgaaaagcttggcaacgagccatgacggttcccggcgcggggtcgccgggctttccttccgtagtggccaccagagtcccgtgaagaggtcgaaaccctggagtgtcgcgtcgagcggccgtccggccagacagcgcagccgcgagcgctcgccttcctgcaattctgaaagccttttgatgtattcagcggtctgactcattttgagcctcccttcttgcggctatgtttcggtttgccaggcgcggctgcaggcgtacccatgttcgatatatgagcctgcttctcaatcagctctttgattctattgttcaacaggacttgtgcgcatttcttagcttcgcgccggcgtagcggagagccaggtgttacggaagtgataatctgttccactaccggcgcatatacttcatgcaggaatgccttgtcatcgcttgcgttatcgccggttgaggcattgattcggcttagacgttcacgaatctgagcctcggcattcggaatcagaagctttaaggatgcgccaatttgggtgtgctgccggtcagggttgtatgtaactgtcctaagtaacccgcgacttaagatttcagtgcaatagcttgtaagctccaccaacctagcagcagcggtatccggtaaacgtacagcgggcgtatcgtggaagatatactgaccgtcaccgacgatgccgatagcaagtgccttagtgccgcgcagacgaaaggcatcgcgccagaacttggaggcgtgcaggccaacatcctcgctgagtttgggcaggctgatgggctcggcttctttgagaagatgaggatcttcaacccagaactttttcacctgcgtatcctgttgatcaagcaggggttgctcatccttcgagggctttctggtcaactctttaattttctccttgttgtccgccgcatacaactgctcgaagactcgtgcaatcttcgcggcagggctctcgttttctggtgcttgcgttgcattggaatcggcttgcgagagctcttgcatcctgcgctttaggatgacaggagcgatcttgacaaccttgtttgccagcttgcgtctatcctttttttgggacttgtattcggcattgagcttctggaactcgcccagcacttccttgccgaattgctggcctgtggtgaggggagtgggccaacccttttcaatagagagggttttgaccagcgttccgatttgtccgcagtatgcacaaaggccgtcgctttcttcgacattcaaccacaacttacgaggccgccaagcaagcatggctactgcgtccggcgactccggctgtttgtcgcacaaccatggaggcttatcaactttaggatttgtttctggaagattcgcgcaaagggtctggaataggttcttcccttcaatgaatgcgtaggccgcagagcccgggttgactgctgcgggataaaacttgttggccggagcccagaccgagagccgcaagattcccatcgcgcaacacgcagggcaaaacccgtaggaactgtcgtgcacaacatggtgcatgtggttcaccgaatctgctccagggaactcgacgagcagatcgccgattggccgagattccttgcccctcaacgattcgtcctgatagaacctcttaccgtcgcccagcagattgaacgcggccttgttttcattcagtttagacagccagttctccggtatgtcggcgtttttctcttccaacgccgcgagggaagacttcgcgtcctctttgcaccacatgagcacggccaacagaaagcgcaggagcgccacccggtccattgggttgctcgctgcgatttgtctgatatggcctgcttgcgtcagcgcttccttgatgccaacacgactcactttcccgtttgtataaagaacgggaatccaatcttcttcgagcaagttatagttagttgacttcaaataacccctccctttttcagtagtttcaatagcatgagcatctataaccttgccaaatttttttcttcaattctagcaaagtcaattaaattatacaataatttaatgtcagattcggtcacaaacagaaagtttgggtggaattgaagaacctcccggttatggggggttagcctgccatgagagagctaaattccgagcaccaggaaattatcttttaatttcaggtcgttggggcttgaggaggggccgaccagggctgtgtattcgatgttttcgatttgccattcacctttttcggcatcgtaaaaggcgagttcccgggcgttgaattcgagggttgcggtttttgtctgtcctggttcgagcgcgagcttggtgaaggctttgaggtctttaaaaggccggtcaatcctggttcctgggtaagtgacataaagctggacgatttcttctccggacattttgccgatgttggtgatttcgactcgggcgatgactttgtcttgcttgtccacgactttcttttccaggcgcaggttggagtattggaatttggtgtagctcaagccgaatccaaaaggaaaggccggttccagcttttgtttgtcaaaccatctatacccgtggtaatagccgtattgtgaggttttcgcccgggagttgaattccggcagctggttttcggattttgggaacaggagggggagttttccggagg

SEQ ID NO: 831 - DNA, 5178 bp, Artificial Sequence
  Synthetic Oligonucleotide
ttggtgtcgatttttcgtgtcgggtttgcaacgagacgaaatcgaaaatgctctgctttcgcaaagcagggatcaaatgtcttcacatccggagtagccgcaagtagataatcggcgttatggaaggcatagtgccaatcgggcttcacggcagactgaactagaatcacgacccggccactagttattgggtcaatgcgaaatagaaaaccggtgtcggtcctccgagcaacatgaacctgattggagccgaagtctttaggatcataaggtttgaggaaatcagcatcatcggatttcctgtctgccgacggaaacgccatgcacaggcgttgatgcacccgataacggttacgaagccatagtcttcccggtcgtgggcggtctggattatcacccacatcgattaataggaaagataggtacatagctattccacctcctcggcgttgaaatgacgtcggcgggtctccagcgagcgaaactcgatgatctcggcacgttttctgatgatctgctcgcgccagcgtggttcctccgggtttatacgatccaggcccatgcccaggccgtactcgatcatcgtcaccgcatcgtggcagagccggcagagagatcggaggtcctctaccgtttcatctccaccggcacggcggtaggtgacgtgttgaacagttgtggctggagccttgcagaaaacgcagaggtgctggtcggcatcgaggcgagcagcacgggcattgcgatacttggtattcgtatagcccgcacgcgggcgataaggggcaggtgtggacctttgcaaaggtttctccgcaataatgacctctccgtccttacctagccgcagcttgcggcggatgacgaaccggggatgatgtgccgggggctcgaacgtcaacggcacgtcgtaccagactagagcgtcagcaggagcttccggctgttcaggtgtcggctcccagtcaagcaggcagatcacgatatccggcggtttgtctcccttgagccgtaaccgccagtggacagatttgagggctgaaagtaagtctgggaaagcgcctgtagtgggcgtttgagggttagtggcatgggcctcttgtcgatgaatcacgggctggcagcacgtgccatattcaagcagcgggcgggaaggagggcagcattttcttcccaggtatagagcccaattcgggttttgtaccgccgcaaccaattcggcaatgagcgcaggctcgccttgcatggcgacgaggaaactggcgtcgcataggaattcgcgccgagtaagcatcgcaccgggcttggtttttccctcgccttctgcaatttgcatccgcataccagcgccgaccgtatgatagtcccaccaacggacaccggggcggtcgattcgcacgcccatcaggagttgattgagttccggcagtcgaatgcgtgcctcctgccgcgaaaaacccaacgcacagcagatcaggccgatgacgccggacttggtgggagcctcggccgtccgccggacgacgaatttcgattcttgatcgccccaagcctgcaatgggccttccaggcggagaaacagagtgttggcactcatgatgccgtctctgtgctcacgacgaccttttgaaccgcttcccagtcatagccgatggcggcgatcacggcggggattaactcgtcgagcgatttgatattgtgttcggcaatttcgatttcctgcttattctcgacgatccttaaggggaatcgaaggttcggcgagaaccagaatcgcttttgcggcttgccatatccgatatccagatcgaaaacatactggcccaattgcgcgatgctctgcgagatcatgccgcgctcgcacttggccggcacagggttggtgaaggcattggtgtaacttatcggggtgtttttaatctcgatcaacattccatcgggggggttgtgcgcggcaaagctgttctgtttgccagttggattgaccttggccgcgctacgaatgaacgccccgactgtatgagcggcaagttccttattccccttcagattagcgaccaacgttttccaatggatcgagaaatacttatagaaacaggcagaggtgaacattgcttcgtccaagtagcctgcacctgcatcgtcgccgggaatgtcgtcagcggcgacgtagtagtcaacctccgggcgggcctcgtgcgtagaaatggcatgagccacttggagggcagcttccacagtggtgtcaagtcgttgccatatatccttagaggatttgtcaggctccaacatgcgacccgacaatgccatatccggcacagccactcgctcactgatcaatttcccgaagtcgagtgcaagttgtttatcggtcttcccctcgtcactttgcaggagttgggccatctcctcaatcgcttggcgggttgtatagacaagcattttgctcttgtcatcatctttggaatcatcttcctctgtgttttccttctttgccttcttcggcttgaagccacacatttcgagaatcttctctgcacgtttctgcacgcctgatttgccagtgattttctctgcaatcaatttcgccaactgacgtgtgcgaaccccgccgcataacgccttgaattcctcgctcattcggatgcttcgctttaggcattggctggagattcgcgagcgcaggactccgccaaagtagcatgtcttgggagcgcccaagtcgtcccggttcagattcgccgggctgtggttctggatcatatggatttcaattaacatttccggattctcctttcactttgcggcctccaggtattggcaggcccattcttcacggacgtctatgccgcgacgatgttcttcgcctcggtcccaaatcgacaggtcatccagcagtcgcgcccaatcgatgccgctgaccaaaccggtatccgccaagtcagccacaacagacaccgctctacgcaggtgaggctccaacctcgacagtggtgtttgcaacaaggagtcgaaccaatggcagtaacgcgctctcaggaatggcttgcgcggttcgtaacggccgagaatctgagccagttgcgtccctttcttgtcatccggccgagcattaggtataggaaatgctccataaagcttggcgattagccatgccgtctcccgccgtggagtgggtttatttttcgcccgcagcggccaccaaagaccggtgaacaagtcgaatccatccactgtttcatcgagcccttgcccggcatgggagcgcagcagaccaagttcgccggttttcaatttcgtcaagacgtgaatgaactgctccgtaggggtcacttctcgcctccctttttgcggtgtgttttctctgccgattcggcctttggtcgcatgtctggcaacaccttggcaatctcctttcgccgttgaacagccgagatcgtgaaaccaggggaaagggatttggcaatggcgtccatcatcggactatactccgccgccgcttgttcccatgcgttgtcgccaccggaaagcagtttgtccatcctcgcagagactgtgccctcgacatgggggcgaatagcagctagcactggcggaatctcaacatgctttcgggaggacgctttcacatgttgtgttttgactttgcgaacaagatttctaacaagccctccacattgcttctgccattgttcgatcttttcaataaaagtttcagtctgattctgtgaactgaggaaaggaacaaggtattcgatcgcctcaaggtacttatcattttgcactgttgagaaaccaacagcccacaagctgatcctgtcattcctggccactttccggagcatcccggccataatctttgcccattggccagctgccgcgtcagcggcgccaagagcatcataggcatggagggagtggagggatgggatatcacctttgccgctctgttcatagatgacatgcgggtcgcgccaaatccgacccggactaccttcaccagtctttgtgctcccaatgggggcaaacacgcaaagctttatcatgtgctctatacgaccgcatgaaatgcaggcagattcgggtcctttgggattgtccaaccacacacgtcgcggtaaccatgtcaatcctgtaagcaggggcacctcgccaatctcaggaagttgcaaatcgggttgctcccatgctggtatccctaggtccgaaatctgccgccaagagagccgtagagttactgcaagcgactcgcccatcggtatgacgtaaattggcggtttagcgttaatgccgggcggcttgccacgtcctccggatgtggagaacaatggcaggcgtaataggcccatggcgcagcatgccgggcataagccttccacttcgtcggtcgaatgtcggaagtgccatttattcgtgcctgtaggtatctcatggattagataattcgcggaaagcagtttatcgccatgtttcctgtattgataaaatcttttcccatcactcaacagattgaagcagtcaaaactgtcatcgagtttcgagaaccaatcagcagggaacgagtcgccggaagtggcatccgcgtcgggcaaaggatcacccttgcaccaatacagcaccgcgagcaggaaccggattatcgccacacggtccatcggattgctcgcagcgatctgacggatatggcccgactccgtcagtgcggtcttgatgcccacgcgaccaacttccccattggtccaaagtacggggatccaccgctcctgaagcaggttataattcatgttcttgctccaatatctttgctgacttttctttacgttatgccgtacatggcagcgcaaccgcctccacatgttcccgctcgtaccctccgaaaggttctgtcgccgggaaccttaatcgcgctgcgcttggtctcctgcgcacaataaaacgtggtttcatctttggtgagactgagaaccacggtctcgcccttctttgctccaactgattgtaagttcattatcgagaaacagcggccaacagttgacgcatgtgtccccctcagaaatgaaaccaggtgctgtcgcttgtccccgcctataatcattaatcgggactttctggctacggagcaaatatctaatgaacaagcgtgggtaaagtttgactctgtttagttcgcatcaaaat

SEQ ID NO: 832 - DNA, 5174 bp, Artificial Sequence
  Synthetic Oligonucleotide
gtggggaatacacttgatcaatagagagctaacaggtcattgagctccttcaagccttagttcaaggatgtttggtcattagtttgataccctcccattccgtaacgactcttgatgcggcaccccagaattcgatatcaaaaccctgttcggtctggctactccagatcatcaggcaagtcccaccgctgcagttgcttctaaccttgtcccacagtttgtctctaaccattgctgagactttacccacaaacacccccgcctttacttccagcagccaacgtgtgatctgaccccgcaaggagttcggcacgttttccaaaaccaaaaccaccatcaatcttcctttggcagatcatcctgcccgtaagatatgccccctggggacacttctccatctggagaccagagtcctccaggcaaggctggttcttcggcaaaacagtcatccgggctatcctctggcataatatcaccgaagagagaactaatgtcagcgacaatgcgtttgagtagattctgcctgtggaattcatcacggcaggcaagcctgactctgcggtcgagttcgccgatcccttcagcggtcgcccggaatgcggcgggagcagccatttccattttgtatagatccgcgatatcatagacaaatgacagttgcttgccagtgtggacaaagcccaatccgggagagaatcctgcagcaacaatggcagcgtgcgatatgccgtagaggcaggagtttgccacagataatgcccggtttatgggatccgctttattccagttgtctctttgatagtttctgccctgcatgggcacaccatacttttgggagagttggaaatatgtatcgcgcacccgggcaccttccttgcccctgatctggttcaaagttaaatcaggagaaagctcatcctggaacctcaactgatacatggagcgcacaacccgtaaatgcaaaaccgggtctgcccagtactttgcctgtttcataagattgacggcgctacgggttgtacctgtgcctgcggcatagaacctgacgccatgttcccccacccaggctaccagacagccacaggcagccagtgaaagtattgccgcatgggtgatggttatgcccggtcccagcatcagcatagccaagccggcacaaggaaccggggtttctcccagggcatcgtgaatggcgatggcttgcccgttctgatcaattttggcatgctccacatagagatagctaagccgatctctgatccgggggatagagtgcaggtctttattcatcattcctgattggcagaacggacagcaggccaaagccgaagcttttcgcttttccaatgccgcttctaagcgtttccaggaacagtttcgggtcatccactttgagaattccctccagtagagccgaacggaagcgcagaggattgtatgtgtgttcacgccagtagccctgtccctgttcctttgctttgacatttttaggttcaggcttggagccataaacccaacccagttgaagaagctcacagcgctgaagggtgaagcccagctttgggcttttggcagccagccagtcggcaagggcctgatccggggtggaagagggatcccaggtgagagaaacccttttgtgcaggatgttgccagtttctatggtttgaccgtcctgttgcaccttctcaggaatatgacggcgtacgctggcgtttacccgcagcctgaaccggagcagttgtcccgcttgaaactctggattatactcctttgtttccggtggcgctgccaggaaatcaagcgcgttttggaagcaataatcccaatccggctcaagaacggactggacgataataatcgcccttttatcgtttccgtcgatgttgttatcgacccggaaaaggaagggagttttttggaagtcgtttggcgaaaagggcttcaggaaatgcggatcctgctcccggcgcaaacctgaagggaacgccatggaaaggcggcggtggacgttatagatattgtccagccactttctgccggggcggggacggtctggattgcctccagtatcgatcaatagcttggacaagtagatcatccgttttcctcctctggcttcattttgcggaaacgctgcccgcgcgaacggaactcgactatatctttgcgctttgccagtattcgctcccgccagatggggtcgcaggggtcgatgcggtcggtggtcatgccggaaccgtattccagcatggtgcaggcgtcgtggcagaggcggcacagcgcccgcaggtcttccggtatttccttgcctcccgccctgcggtaattcacgtgttgaacagtcgtggcgggagctttgcataccatgcacgcggcatggtccatcacaagccgctccgccctgaccttcttatactcggaattgttataatccgcccgggttcctttgggcctccaaacgctggttccggtttccctgctcacttgcacatcctctcccacaaccagctcacgcctgatcacgaagcgcggcaaatggcggggcggctgaaaagaaaccggcagatcgtaatgaatctccgcgtcatcaggcgcatgttctccgtcctggctggggatccagtccatgacgcaaggcagtatttgcggcaggggttcattgtgccagcgcttttgcaggggaaccgcggacagcgcctcctccaaagtgttataaaagcccggagcatgctcgcccacgggacgtgaagggggacaggatttgcgccccagataaattgcccagaccggcttggccagagcggcggagagcttttccacaagttccggctcaccctgcaaggcgaccagaaaactggcgtcggcaagatattcgcggcgtgagagcaaggtctctgccctggtttttactttgcttggtgtcagggtatcagccagggcagctccaaccatggaaggttttttgggtgccttcagctctgccatgcgcattctttgtcccgctccaacagtatggaagtcccaccagcgtatgccggggcggtctatccgcacgcccatgcgcaggttggcgagttttgggagccatgaatcagcagcctccgcgcgcccaattcccatggccgcgcaaagcagccccaggacacctgattttgtgggagcgtcggtagtcctgcgcaaagcaaacttagcctcgttgctgccccaagactgcaaagccccctccaagcgcaagaataaggtgttgggtggcgcactcatgtcagccgccaacataagccttgcttttctgaacttcttcccacttgaagccgccaatataatccaacacagcgcctacaagctcattgaggttgccaatgtttctggaagccagtttggaatgctcattgccaagggaatagcgattgtttggagaaaaccagaagctgataactggggattgctcatcataatagccaagcctgatgtcgttcacgtagttggaaagctggccgatgctttgttccaccaggtccgattccttgaccacggaaactggcctgacgaatgcgttggcgtagctaataggggaattcttgaactcaacaaggatgccatcgggatagttatgagcggcgaagctgttctgtttgccactggggttggttttggcagcggcgaggagaaaggcacccacggtgtgggctgccagattcgtgtcccctttcaggttcttgaccaactgttcccaatcaatggagaagtatttgtagaaacaggctgaggcaaacatggattcgccaatatgacccgctccggcgtcttcaccgggaacatcatcggccgccacaaaatagtctatctcaggtctggcaatgtgggtggagatcgcatgtgcaacctgtagggcgccttcaacgccagtgtttttaagctctttggtctccaacatcctgccgcaaagtgctatatccggagaatggacgcagtttgtgagcaaatctttgaactgcagcagtttttcgctttcacttagtttggagtcggaaagcagctctgccatttggcgcagggcatcataagtggtaaaaaccagcatgtcagatgtatcagccgcctgctgctcatcctgatcttcatcggcttccgcgggtatcttttcggacttttttgcagctttcttggaagatttggttttgattccgcaggcttcaagaaacttggcaaccagcttcttatctttgttttccagcatttcttcaagtttctctgccagacgccttgttcggatacctcctctaaggtccgcgaattccggggcaaaacggatgctgcgcttgatgcattggctggagatgcgagaacgtaatactccaccgaaataacaggtcttgggggcgcccaagtcgtcccggttaagatttgccgggctgtgattctgaatcatatgaatttcaatcaacatctgaatcctccttgttgatcttgtatgctttaataaatgaatccgaccattctcttttgacaggttcctgctcccaaaatgacagaacatcagtaagccctacccagtccaggcagacctgctggtgcttgcgcaagatacccataatgaccgacagcggctcttccatctgcataatgtcaagcgatgcgagttgatcaaagcgtgccaatacacggggtaattcctttttgggttccaacttccggcagatgcctcccataagaatgggcaatgtggctccctcgcgctgttcaaagcggaattcagcaaaaagtttggcgatcaaccaagccacttcacgcttgggagcgcgttgattcttttgccgcaaaggccaccatagggcggaaaacaggtcaaatccgggaagcttttcatcaagccgggctcccctgagttttctaagaatgcccaaatcgccttctttgaggttctccaggcttgcaatgaagtcaacggttcctctattcattctggtcctcctctgcgggttttgttttggattctggtataactggccagggcttgcgggaaatgaatttacctctcttgagcctggcgtccactgtttgagccggctccaaagagcatgcaaccttggtgagcagttctccgtattcagtatcggcatcctgccaggaatagcccctgttctcagtcattttacccgcattgatggcaa

SEQ ID NO: 833 - DNA, 5132 bp, Artificial Sequence
  Synthetic Oligonucleotide
acagttgcttgccagtgtggacaaagcccaatccgggagagaatcctgccgctacgatggcagcgtgtgatatgccgtagaggcatgagtttgccacagataaagcccggtttatggggtctgctttgttccagttgtctctttgatagtttctgccctgcatgggcacaccatacttttgggagagttggaaatatgtatcgcgcacccgggcaccttccttgcccctgatctggttcaaagttaaatctggagaaagctcatcctgaaaccttaactggtacatggcgcgtacaacccgtagatgcaaaactgggtctgcccagtattttgcctgcttcataagattgacagcgctgcgggttgtacctgtgcctgcggcatagaacctgacgccatgttctcccacccaggctacgagacagccacaggcagccagtgaaagtattgccgcatgtgtgatggttatgcccggtcccagcatcagcatagccaagccggcacaaggaaccggggtttcacccagagcgtcgtgaatggcgatggcttgcccgttctggtcaattttggcatgctccacatagagatagctaagccggtctctgatccggggaatagagtgcaggtctttatccatcattcctgattggcagaacggacagcaggccaaagccgaagcttttcgcttttccaatgccgctgctaagcgttttcaggaacagtttcgggtcatccacctcgagaactccctccaggagagccgcacgaaagcgcagaggattgtatttgtgttcacgccagtagccctgcccctgttcctttactttgacattttttggttctggcttggagccataaacccaacccagttgaagaagctcacagcgcttaagggtgaagcccagctttgggcttttggcagccagccagtcggcaagggccttatccggggtggaagagggatcccaggtgagagaaacccttttgtgcaggatgttgccagtttctatggtttgaccgtcctgttgcaccttctcaggaatataacggcgtacgctggcgtttacccgcagcctgaaccggagcagttgtcccgcttgaaactctggattatactcctttgtttccggcggcgcggccaggaaatcaaacgcgttttggaagcaataatcccaatccggctcaagattggactggacaataataatcgcccttttatcatttccgtcgatgttgttatcgacccggaaaaggaagggagttttttggaagtcgtttggcgaaaagggcttcaggaaatgcggatcctgctcccgccgcaaacctgaagggaacgccatggaaaggcggcggtggacgttatagatattgtccagccactttctgccggggcggggacggtctggattgcctccagtatcgatcaatagcctggacaagtagatcatccgttttcctcctctggcttcattttgcggaaacgctgcccgcgcgaacggaactcgactatttctttgcgctttgccagtattcgctcccgccagatggggtcgcagggatcgatgcggttggtggtcatgccggaaccgtattccagcatggtgcaggcgtcgtggcagaggcggcacagcgcccgcaggtcttccggtatttccttgccccccgccctgcggtaattcacgtgttgaacagtcgtggcgggagctttgcataccatgcacgcggcatggtccatcacaagccgttccgccctgaccttcttatactcggaattgttataatccgcccgggttcctttgggcctccaaacgctggttccggtttccctgctcacttgcacatcctctcccacaaccagctcacgcctgatcacgaagcgcggcaaatggcggggcggctgaaaagaaaccggcagatcgtaatgaatctccgcgtcatcaggcgcatgttctccgtcatagccgggaatccagtccatgacgcaaggcagtatttgcggcaggggttcattgtgccagcgcttttgcaggggaaccgcggacagcgcctcctccaaagtgttgtaaaagcccggaggatgctcgcacacgggacgtgaagggggacaggatttgcgccccagataaatagcccagaccggcttggccagagcggcggagagctttgccacaagttccggctcaccctgcaaggcgaccagaaaactggcgtcggcaagatattcgcggcgtgagagcaaggtctctgccctggtttttactttgcttggtgtcagggtttcagccagggcagctccaaccatggaaggttttttgggtgccttcaattctgccatgcgcattctttgtcccgctccaacagtatggaagtcccaccagcgtatgccggggcggtctatccgcacgcccatgcgcaggttggcgagttttgggagccatgaatcagcagcctccgcgcgcccaattcccatggccgcacaaagcagccccaggacacctgattttgtgggagcgtcggcagttctgcgcaaagcaaacttagcctcgttgctgccccaggactgcaaagccccctccaagcgcaagaataaggtgttgggtggcgcactcatgttagccgccaatataagccttgcttttctgaacttcttcccacttgaagccgccaatataatccaacacagcgcctacaagctcattgaggttgccaatgttcctggaagccagtttggaatgcttatagccaaggggatagcgattgtttggagaaaaccagaagccgataactggggattgctcatcataatagccaagcctgatgtcgttcacgtagttggaaagctggccgatgctttgttccaccaggtccgattccttgaccacggaaactggcctgacgaatgcgttggcgtagctaataggggaattcttgaactcaacaaggatgccatcgggatagttatgagcggcgaagctgttctgtttgccactggggttggttttggcagcagcgaggagaaaggcacccacggtgtgggctgccagattcgtgtcccctttcaggttcttgaccaactgttcccaatcaatggagaagtatttgtagaaacaggctgaggcaaacatggattcgccaatatgacccgccccggcgtcttcaccgggaacatcatcggccgccacaaaatagtctatctcaggtctggcaatgtgggtggagatcgcatgtgcaacctgtagggctgcctcgacagttgtattggaccatttgacttttttgtccttgtccttgtcattgggctcaagcatccttccacagagggcaatgtcgggagcaagggtcgcttgggctataacattggcgacttgctgagcggcttccgtgagccccagggaattatccaggacaattcgagcaaggtctttgatcttgtctttggacataaacacaagcatcttggtattgtcgtccttatttttgaagccacatttgttgagtatctcctgagcctttttccagcattctgtttcaccggcttcctgttggatcagatcagccagtctgcgggtgcggaccccgcccagcaaagccttaaaatcgttactggtcctgatgctgcgcttgatgcattggctggagatgcgagaacgtaatactccaccgaaataacaggtcttgggggcgcccaagtcgtcccggttaagatttgccgggctgtgattctgaatcatatgaatttcaatcaacatctgaatcctccttgttgatcttgtatgctttaataaatgaatccgaccattctcttttgacaggttcctgctcccaaaatgacagaacatcagtaagccctacccagtccaggcagacctgctggtgcttgcgcaaaatacccatgatgaccgacagcggctcttccatctgcataatgtcaagcgatgcgagttgatcaaagcgtgccaatacccggggtaattcctttttgggttccaacttccggcagatgcctcccataagaatgggcaatgtagctccctcgcgctgttcaaagcggaattcagcaaaaagtttggcgatcaaccaagccacttcacgcttgggagcgcgttgattcttttgccgcaaaggccaccatagggcggaaaacaggtcaaatccgggaagcttttcatcaagccgggctcccctgagttttctaagaatgcccaaatcgccttctttgaggttctccaagcttgcaatgaagtcaacggttcctctattcattctggtccccctctgcgggttttgttttggattctggtataattggccagggcttgcgggaaatgaagttacctctcttgagcctggcgtccactgtttgagccggctccaaagagtatgcaaccttggtgagcagttctccgtattcagtatcggcatcctgccaggaatagcccctgttctcagtcattttacccgcattgatggcaattctgttttcggcgtgggggataatgtcagcaatctggggagtgcccactgactttttgaaatcacctctgagaggcttcttgcgcatggcattaagggcagtagccctgtttgccaattgagccagtagctcatcatttgtatcagttccctcaagctcgatgatcttgtcccagatgtctatgctttttgctttatcgctggcaaatccaaccaaccatagttttccttgtctggagtttccttccgcgtgcaaatagctgaacaacgggctataccaatcccggtccgcgaaagtgtatctatcattggacatcagtttgattttggactggagactttttccctgatcggtgtaaacaccatgagggtctttccactcaagtccctttggcactggctccacttctatgctgcaggaatagacgagagcttcggagggtaagccgcaggaacaacatgctgcctgacctgggacaggatcatgcagatacaccttgcgcggcagccaggtcattccagcaagtaagcctacttccctgctttctttttgaaaagaacccaaccatgccggaatccccatattatcccagggttgccaattttgagccagcatgccagcgagatcatttgcatgccagagcaggtaaaatggagga

SEQ ID NO: 834 - DNA, 5106 bp, Artificial Sequence
  Synthetic Oligonucleotide
ccacccggcaatgctcgacgtagaggtaactccacccgtcgctgaacttcggcaggacgtggaggtccttgactctcacagggtctcctttgacgtcgcgggcgtgaccggcgccaccgacagcagcccgaacccgaaggccttccccggcccgacgccgcggatgacggcgtcgacgagacgaccgggagccacaatttcgagaatgccgtcatatcgaacggaacgcatccggcgcccattgccttcccgccgctcactcacgtagatgtagccgggttgaaccgtggtggaattcttccgaacggagaaccccgcctgttcggcgcggcgagagagccaatcgaataaccgatcttcgcgcaccggaacccgtttcccgtgtcgccttttgccatccggaccggttttcgtgtctatcttgcgagtcgggttcgccagaagacggaagcgggcggtttgtccttcgctgaaacttggattgtaggatttcatggcaggcggcgccgccagaagatatgcagcattctggaacgcatattcccagtcgggcgccagggcggattgcacgaggatcacggctcggccaactgttcgagggtcaacccgaaagagaaacccggtcccttgcccgcgtggaacatggacctggttttgtgcgaaatcggccggcctataagggttgaggaatcttgcgtcctctgccttccgctgggaactcgggaaggccatgcacaagcgctgatggacgcggtagaggttcctcaaccaagtccggcctggtcgagggcgatccggattttcaccggtgtcgatcaagagatgagacagatacattactccacctcctcggcggcaagtctgcgacgccggatttctagagagcggaactggacgatttccgcgcgcttggcgaggatgagatcgcgccattgcggctcttcgggattgatccgatcgaggcccatgccctggccgtactcgatcatggtcaccgcgtcatggcaaagtcggcaaagcgatcggaggtcctcctgcgtttcatcgccgcctgccctgcggtaggtgatatgttgaacggtcgtggcggggttcttgcagaagacacagaggccacaatcggaatcgaggcgttttttgcgagccttctcgtattccttgttcttataatctgcccgtggccgcggcggaggcggcgttcgtcgctggagagggggaccgacctccaccgggaggcgatcgcgtatcacaaaccgtggatgatggaccggcgggtcgaaggaagacgggacgtcgtaccagacttcggcttctgagggggccgtcggctccttgtcagtggcgcgccactcgataagagatggcaagtcaattgacctctcacggcgccgcgagtcgctgtatcgtgggcgccatcgaatcgacttgagggccgactcaatatccgaatgccgctcgagtagcggcgcgaagctgccgtcatcttccgctcgttcgacaagtacaggcacgcttggtggacacgatttgcggccgaggaagacgggccacttgggcgaagttaaccctttcgcgatttcctcgagcatttccggtttgccctgaagtgcaacaaggaagcttgcgtcggaaaggtattctctccgcgtaatgagagtttcgtattccccagtgctggccgtcttcttgacctgtccctttgcgttcaagatgccgatcttcgcgcctaccgtgtgccaatcccaccagcggattccggcgcggtcgatgcgaactcccatggccagctcgctcagcttgggcaacgcttcgcgagccgcctgccgggacagtcccatggcgcagcaaatcaggccgatgacgccggatttcgtgggggcgtccatgctccggcgaatgacgaacttcgacgggtcaccccacgcctggagagggccttccaggcggaggaaaagtgtgttggggatcgacgctgtcatgacgtggctccagcctgttgtgccgttgctgcgctgttgacggtttgcatcgtgcgggtgacaagctcatccaacgatcctacgttcccgtcgctatcgatgaccgatctttctttccggggttccttggcggcgcgatcgacgtaggtcagcgggtgtcggttcgatggcgagaaccagaaacgggtcgctttgacgccaaacccctgcgccgtctcgtacacatgctgtccaaggcgcgcaatgctctctccgataaggccgcgttgtgtctttgggggtacgggatcggcaaacgcattcgcgtaactgaccggcgtcggatgttctgtcttgacttcgacgagaattccttccggagggttgaaagcggcaaaacttttctgtttgccggagggcgtgctcagggctgcggcgtacagaaaatgcttgaccgtggcggccgcaagctcaaggttaccgccgaggttgctcaccagttggtcccagtcaatgcagaagtgcttgtagaaacaagccgacgcgaacatggcctcgttaacatgtcccgcggcaggtcccgttgccaagtcatcaaccgctgtgaagtaatccacttcgttgatcacttcatgcgtcgagattgcgtgggcagcagccagggcggcctcaaccctgaacgactcgagattcgtgaaaggccccttcgcgtcgaactccgtcatccgcccggaaagcgcaatgtccggaactcgcggcttctcacccaggacagatgcaatcgctttagccaaatcggccttctggctacgtgcggcctcccccatcttttcaatcccagagttcggaacaaaccacagaatgtctgtggcgttggcgtcaccctcgatgttcttgatcgccaagccgccgtcttcgaatactttgcgtatgcgcttgatcagaccttccggcggctgcccattgccgtgagcgcgacgggcaatttcccggatgaggctccgggtccgaacaccgccatcttcctccagcgccttctgaaagtgttcacttcgccgaatgctgcgcttgaggcactggctcgagatgcgtgcccgcgttacaccgccgaagaggcacgttttgggcgcacctaggtcgtcgcggttgaggtttgaaggactgtggttctggatcatgtggatctcgatcaacatggttggctccttaaggttctcggttagggtgaatggcggcggtcagatattcttccgcccagatgtcgcgaatgtcccgatggcgtttatgttcttccccacggtcccagatcgataggtcatccaacaactgcgcccaatccatgccggaaagcccgccgtgatcgacggcaccggcgattaccgagagggcccaatgaagatgcggctccaacgccggcagagccgagcagaggatagtgtcgaaacgattgcggaaacgcgcttgcgcgcgttcgtcgcgcggttcgcattggccgagcaggcgggccagtgtcggcggagctccaggcggatcgggccggatgtgtggaatcgcgaaactcccatagagtttcgcgatcaaccaactggtttctctccggggcgcaaaagggctcctctgtctcaagcgccaccacacgccggtgaaaaggtcgaaaccggggacggcttcgtccagtggctttccagtaagccggcgtaaacgcgcgagatcgccctccttgagttcttcgagccgctctacgtacttgatagtttcactcatcttgcaccccctctccgccaaccgatctggggatttccggcgcattcgaagcccgtaatgaactccagtcggtgattaagtcttccatcttgtgaatcagaagattcctcgctcgatcgagcgcttcacgacggcggaaaggcgagccccgagtagttgcacgggcaacgtattcaatgacggcagcaaattcctgcgcgaggcgctgcgaagaaaggccggcctcaaacccttcccgaagcgtcgcctcgaggtatggagacagggcatcgagtgcggctctcctgttggggtgctgccgtttgggattcggagtgcttcgcatgagcacaccggtcagtgactccaccaacattctaagtgtgtcaagataagccgcggtgccggcctgcacgcaagcgcctggaaacctgagcgctgcagcgtcctgatagagccccttgttggccgccggacccgcgacaatgaaggcatgaggggcggttacgtcgcgggttacattggatcccagaatggcctgaagcgcacgccgccagaaacgtgtatgcacggcggctcttgaagccggtatgggaaaacccagcgttgttttttcttcggaacggttgccacggcgacccttgcgtaatgatggttccgggctcttttcctcgctcccctccacctccacgttgtccctattatgtttctcatccaagacaagatgaggatctctcggccagaatttcttgtcctggcccttaacctgaatgggcgacggccaatttccagtgaacgccatttgcttgatgagtttcgaaacgttgccgcagtacgcgcaggtctcatcctcctttcctgggtcgccgagccagagccggcgtgatcgccatgccatgaccgtagtcacgtcaaggtcagattctccttccgggccttcagtgtttagccaaggcggttcccgtttcgaggtacgacttggggtccaattcatgaccaatgtttggtatagattgccgccgtgcggaaccgcaaaggctggcgcaggtccgtttaccgccgaagtgtaacggccacccccgtaggcattggcccacgtgcaaaacctgacaataccaagagcgcaacaggccggacacagtccatacctcttgtcttgcaggcggtgcaagtgagcgatctttgtttccgtcgggaactccacaagaaggtcgccaattggacggctgtttgctggcgtgctcttgtcctgatagaagcgattcgaatcccccaacagattgaagcactctctgttcaggtcgagctgggtgaaccactcatcgcgaaacgaatcagctgagatcgcaacatccgtcctgtcttcagcacaccagtagaagatcgcaagcaagaagcgcaagac

SEQ ID NO: 835 - DNA, 5088 bp, Artificial Sequence
  Synthetic Oligonucleotide
gggaaaagttcagcgcgcccgtcgcgacgggcgcggagcccggttcacccccacgggcgtggggaaaaggcgatcacgccgccgccggggtcgcgcctcgtcggttcacccccacgggcgtggggaaaagatcgacgcggaccagccgagcatgggccgcggcggttcacccccacgggcgtggggaaaagcttgacttttcaccatgcagcgtgctacactagggttcacccccacgggcgtggggaaaagtcgcacacgcgctgcaggacggccgcgtcgttcggttcacccccacgggcgtggggaaaaggcctccctcatacgctccgcctccgcgcgggccggttcacccccacgggcgtggggaaaagctcgtcgacgtggtgaccagcggccgcggcgtgggttcacccccacgggcgtggggaaaagcaggaaaaaattcctcaaatcccgtggcgggttggttcacccccacgggcgtggggaaaagtcctgggcgcggtcgacatcgagccgaccccgcggttcacccccacgggcgtggggaaaagccaggtggagatcgtgctcaggagggtcgcctcggttcacccccacgggcgtggggaaaagggggtggcaacgaaagccgtgtccaggcgggcaggttcacccccacgggcgtggggaaaaggacaccagacacgggcgaaccatattctatatgggttcacccccacgggcgtggggaaaagatcaggggtgcggtagtggattcagccagccgaggttcacccccacgggcgtggggaaaagatctcccgcgcaatccgatctacgcgatgggacggttcacccccacgggcgtggggaaaagcccgggcgttttggggtcggggaaatcgatgatggttcacccccacgggcgtggggaaaaggtcggcgcgtggagcaaaattgggtcgtcgccgggttcacccccacgggcgtggggaaaagggctgttgatccgcctgacccatcaccctctccggttcacccccacgggcgtggggaaaagcctggcgcagcagccacgcgaacagcgcggggcggttcacccccacgggcgtggggaaaaggctaaagttgttttcagtagaatcgcatctattatacctgattcttccgtataaggtcatttttcgttgggctgtcgcggcaggatgataccgtcgagatcgacaaactggcgcctggtgttaccgaaggaacggatggtgtagccctgttcgttggcgtcggagtagatgaagatgacaccgccgttgcggatttttttacagcagcgttcccaaagtttttcgcgaacgagggcggagatttcagcgatgaatacgccagggtggggttcgatggcccagcgggagacttcgccccgcagggcgggcggggcggagacgaggatgataaccgtcatggcgtggtttcttccggggaggtgggatcttcggactgaccagtgttgggagggttctgctgttccatgagttcagggtcatagttctgggcggcggggcattcgccctcgtcgggatcccacagggccaggggagcgtcggcgatgtcggcggcggggtctcctttccgggtcatgccgagggcagcccggatatcgggaatgacccggcttagcagcctggtctggtagaaccactgcctgcaggtcatgcggaccacccgttcgagttcggacgggttttgcgcgccgagctggaaggcaatagggatggagtactcggttttgtacaggtcggcgatgtcgtaaacgaaggacagcatgttaccctgatgaataaagccaagggcaggcgaaaatccacccgcgagaatagcggcgtggcagagcccatacaggcacgcattggcgacagagagcgcgcgatttactggatccgcatcattccagttgtcgaccttatagttacgccccgtccagttcacgccggtctgctgtgcccaggactcgtacacccgacggacgcggcgtccttccatggcgcgcaactgggccatggagatgcccggcggcacaggatcggggaaacgcacgccgtacaggcgcacggctacctcgaaacgggtctgtggattggcccacagggtcgcctggtgatacaggttccgcgcgtgacgggccttggagtgtccgaaggcgtagcagcgcacggcatcctctcccgtccacgcaaccaggacgccatgttcaatcagaaggctcatggcggcatgggttacgctgactcccggcccgaacaggagcaggttgatgccggcgcagggcacggcggttttcccactggcgtcgatcaggacgatggcgtgctcgtcccgttcgacgatgacgtgttccaggtaagcgtatgaccaggaatcggtgaagcggggcagggcccgcaggtcatcggaaggcgccattcgtacctgttcctttcccgatacgttacgtaccgtccacgtacgggccggacggccagttaccccaaggcatgcttcctgctcgaggcactaaccggatgagccggcgggggcgggacggatcccgcccccaccggggagaggtttcacggtttcgcgatggtgagtagtccacaaccgaaggcccgggctggcccgattcccgaggcgatggtggcgtaaaatgcccgcggatccgttacttccagcaggccttcatagcgcgcgcagaacaactggggaatacaggccctgcctggctgttccgatccgttggcattcgcgaaacccgcgcggttcacgtagtagtaatttacctggatattcagagcttccgggccgggcacgaccttgaagcctccggtctccccccgccggatcagccagtcgggcaactgttcccgtggtacaggcacgcgcgtgccattgcgggtgcgacggtcgcgtcgccaaggcccggagagatccccggggggctcgaggatcacgctgtccgggttttccctgcgttgcgccgccgtgagggtgccgacctttctcgtggcattggccatgagccggaagcggtagcgttgtccggactggaacaccgggttccaggatcgcacttcagggggggctgccagcaggtaatccgcgttatgaaaggcgtaatcccagtctggctcgatggcggactgcaccagaatgaccggattaccgccaggctggggatcgatccggaagagaaaacccgcctgccccgaccggggtatatgcaggtgttcgccgaagtcttccggccggaagggctggagaaactggggatcggtggttttgcgcgccggcgcggggaaagccatgctcagccgctgatgcacccggtacacgttacgcagccagtttcttcccgggcggatccggtccggatccttcccggcgtcgatcagcaaggtagacaggtacatgcccggatcctcctattccttgaccttttcgcccagcaggcgcgcgcgggtttcccgggatcggaaccggataatctctcttcggcgctgaatgaccaggtcgcgccagaagggatcttccggattaatccggtccatgcccatgttatggccgtactcgatcatcgtgcacgcgtcgtgacagagcctgcacagggagcgtaactcgtcgacccgttcgttaccccctgcgtggcggtaggtgatgtgctgtaccgtggtggccggggccttgcagaagacgcacaggccatggtcctgctcgaggcgccttgcccggatattccggtattcggcgttggtgtagtccgcccggggcctggggggtgatttaggaagttcatcttcggttttgttggtcagtcttacctgtccctcccctgttccacattccagaaacccgcgcgcgacgacccgcgacgtataggcgggcgcggggggaatgaagtgcacgggcacgtcgtgggcggtatccaggtcacaaggctcaaacgccacgttacccaggggccagtccatgtacacggtaagtacatccggttttttctcgaaagcgtaacgctgttcccacggcacggagagcagggcctcgatcgggttggccgtggctcgcaacgatccctggtccttcaggaagaggggtaccgaggggacgcaggactttcggccaaggtacaggggccatgtgggctcgagcagggcgtcatgtaactgccggatgagcgagggctctccccacagggccaccaggaacgaagcatcgccaaggtactcgcgaagggtcagcatcgtttcgccatgacggagcccgccttccgcggatcgccgggagatgccgcccgcgccgaccgtgtgatagtcgagccagcgggtgccggggcgatccacccggacggccatcttgagactggccataggtttcatgacttccggggtggcctcggaccggggaatgccccgggcggcgcacagcaggccaatcacgccagacttggtgggcgcgggggccacgcgccgaatcgcgaagcgggactccgcgagcccccacgcctggaaaggtccctcgaggcggatcagcagggtgttgtgctcggccatggctcaggcctcccccaccggcgaatggttcacaaccgccgcccgcgcctgggtccaggtcaggccgggatcaatggcgggaatgagggcgtttaccaggtcgttgaggctgctgaacgaggcattgtcgtcgaccaccgtggtaccgttgcactggaggggataccgcaggttcggcgagaaccagaagcgtttttctggtgctccgtagccgttatccaggtcttgcacgtgcatggccagccgggcaatggattcggcgacgaggtctttgcggtcctccacgtcgacgggttgcacgaaggcgttggcatagttgacggggtacttgcgcaactccacgagaatgcccagcggcggattgtgcgcggcgaaactgttctgcttgcccgtggggttcaccagcgcggcgccccgcagaaacgccccgaccgtgtgggcggccagttcgcggttgtcccggagattcttgagcagttgtggccaggagatagagaagtacttgtaataacaggcggaggca

SEQ ID NO: 836 - DNA, 5081 bp, Artificial Sequence
  Synthetic Oligonucleotide
gggacaatgccttccttgattctttgaatcgcatgacggtcggttcacccccacgtgcgtggggacaatgtatcccataggatactatacaacaagttacccggttcacccccacgtgcgtggggacaattgtttgaccctcgaatcaaggtcaacccgtttcggttcacccccacgtgcgtggggacaatttttgcaccatcgaaggctgcgacaatgagcgcggttcacccccacgtgcgtggggacaatctgctgccgtgcaaccatcacccacaactgttcggttcacccccacgtgcgtggggacaattgtttcccgtttggctaattctgcctcaatggcggttcacccccacgtgcgtggggacaatactgaaaaaatattaaatctgtggtacccgaataagcaataatccttcgaagtcttcaattgctctcaatgtttgaccagaactaagaatttgatatccctgttcattatcactgcgatagatcatcaagcaaccgccttcctttacttgtttgcaaaccatttcccaaatcttctcccttaccattgccgaaacattccccacaaaaacacctgcctttggttcgaggaaccagcgagataattctcctcttaacctcagtggcacattttcaaggatgaaaactaccatcatcttccctttcagtcatttgatccatttccagaggatgcgagcgcccgccttccaccgtgcctaactccggatcccacaaagaacctggtgcggtagcatcccggtcgaatggttcattatcatctgctgttttctgcgttgaaagccccaaagccatctggatatccggaatgattcgtttcagcaggcggatagaaacgaacatatccctgcaggccacccgtacacgtttttccagaacatctttggattcagcaacaacacgaaatgcaattgggatcgtaatctcgtttttataaagatcagcaacatcataaacgaatgacaacattttccccgtatgaatgaaccccagcgccggcgaaaagcctgctgacaccactgccgcgtggcagatgccataaagacaggaattagcagttgacaaagctctgttaacggggtctgcactgttccattcgttagatttgtagctgcgaccggtccaggagacaccggactccttggctgctctggaataagccgagcgaacccgtaatccttccattccgcgaatttgctgaagggtcagggatgtatccaatttttcgggaaatcgtaactgataaagacgacgtatcacttgtatgcgacaattatcatccgcccacatcttcgcctggtgcaacaggttagctgaactgcgcgtctctcccatgcccactgcatagaaacgaacgccctgttccccgcaccagaccacaaggcaaccatgatcagcaagaacagatattgcggcgtgagttattgaaacaccgggaccgagcatcaagagagccagggtcgcacagggaacaggtacttttccgcgcgcgtcatggatggcgatagccaaagattcttgatcaattcgacagtgttccacgtagagataactcaaaccatcacgaaacttcggaagaatgtgtaggtccttgattttcatagcgttccacactgcatttgtgctaacgaaagaaggccaaaaccaaaggctttgcctgaccctatgccacgttcaatagctaaatgaaaaaggttaatgtcatcaattgtgagaactccatcataacggaccaatcgcaggcgagcttgataatcgcctttccctggtgatatttcactcaaataattttcctgttgtgtattcggtttgtgaaaaaagatataggatgtctgaatgataatattatcactcataatagagaatcccgaccgaatgctcttttgaaccagccattccaaaaagttttctggccttaccggaactcgtcttccgttacgcttttttccatcaggcccactttttgtgtctatttttttagttggatttgctgtcagccgaaacagtagtttttgcccaattgaaaattgaggatcaaaaggctttatatcgggcggtgcagacagcagaaacatagcattatggaatgcaaaatcccagtcgggttccactgcagactgcaccagaatgatggccctgcctcccggaatgggatcgatacgaaacaggaatccggcatcctttattcgtggtacatgaacttgatgatatccaaaatcctccggtttatagggcttgagaaaatcctcatcagcctgttttcgctccccggagggaaatgccatgcacagccgctgatgaaccctgtaaacattccgcaaccatgaccttccagggcgtggtcggtcgggatgatcgccagcgttgatcaaaagcgttgataagtacattagacctcctggttggaaagatgccgccgtcgggtttctattgaccgaaaacgaataatttcgcttcgcttctcaatgatttgttcccgccactttttttcttccggattgatgcggtccaatcccatgcctgcgccatattcaatcatcgtcactgcatcatgacaaagccgacacagggaacggaggtcatccggggtttcattccctccggccctgcggtaggtgatatgctggacggtcgtggccggggatttacaaagtatgcacagatggtggtcagcatcaagacgttttatgcgagcatggcggtattccgtatttctgtagtctgcccgtggttgtgacggtcgtggcgttttattctgcgccggcttttctgcaatgccaatttcccggtttttccccactatcaaagactctctgatgacaaaacgaggacaatgcgatggaggatcgaatgtcagcggcacatcgtagaaaatgagcgcatcgtctggcggctctggttgatcgattgtcggttcccagtcgataagacaatcaactgtttgcggcatcggatcaccggcaagtcttggttgccagggtatggacttcagtgctgaaaccaaattcggaaaatcgcctgccggatgcaccagcagtggacgagatagagtacaacattttctgcccaggtaaattggccacctgggattgttgactgcaatctccaattcggcgaccagactatgctcaccctgaaggataaccagaaaacttgcatcacagagatattcgcgtcgggtaaccagggggcctggctttgtcttgcttcggttttcactggtgcgcatcatcatgcctgctccaaccgtatgataatcccaccatcggacccccggcacatcaatccggactgccatacgaagctcactcagtttttgaagccaaccgtttgcagcctcctgccgtgaaatgccgagcgctgcacaacacattccaattattcctgatttcgtaggggcttcgcttgtccttcttatcacaaatttcgactgctccgtaccccacgattgcaatggtccttccaaacggagaaagagggtgttaacactcatgacggtacctcaggatttacaatgcttttctgaacatcgctccagtcgtatccgacctctttcattacgctggtaatcagaccttcaagggacattatattttgttcggaaagtgcaaattccttatcttctttcatggcgttaagtggaaaacgaagatttggtgaaaaccagaatcttttttgaggtttgccgaagccgatgtcaaggtcatgtatgtattgcccaagctgtgcaatgctctgcgagacgatatctctatcattgacatcaactggtttagcgaaggcgttagcgtagctgattgggatgtttctatcctggatttgcacaagtatcccatcggggggattgtgggcggcgaaactgttttgtttgcctgttggtgtaaccagagcagcagcacgcataaaggcccctacagtgtgtgcggcaaggtccatatttccctccaggttttggaccaatgtttcccagtgaatcgaaaaatatttgtaaaaacaagatgatacaaacaaagattcatcaaggtagccagcacctgcatcatcgccaggtatgtcgtctgcggcaacataataatctacttccgagcgggcctcgtgtgttgatatggcgtgagccacctgaagggaagcctctactgtggtgtttttaagaatgcctgtctctaacattcttccgctgagcgccatatcaggaacggatgttttttcactaataagcgtgccaaaagctaacgccagttgttgatcgtcggttttaccttcgtcgttatccaagagattcgccatttcctgtatagcctcacgggaggtataaaccaacatatcgcttttatcatcatccttatccttcttctccttggatttgataccacagcaaccaagaatttttgcagctcgtttcctattatccgctccggctttgcttgccttggcaatctcatccgccagtttccgggtgcggatcccgccacgcaacaacaagaattcgtcactcatacggatgcttcgcttaatgcactggctggagatgcgcgagcgcaacactcctccgaaataacaggttttgggagcccccaaatcatcccggttcaagttggatgggctatggttttgaatcgtgtgaatctcgattaacatcactgtctccttttgttaattgcaaaaattggtttgcccatttgagccgagtggcgtctctttcccaaatggacagatcgtatgtcagtctcacccaatcaagtttgggatatttcaactctgctatgcacttcagcgcccattgcagcgccgattcgattttattaagcggaagaaccaacatcctgtcgaatctttgagcaaaacgattactgtcttgggtttgggttggttggcgtttttttaattgactcgcaagtgtttcattcgggaaatgcggaatcggataagaagcaaaaatttttgcaaccaaccatgccacctcacggcggggcgctttggagctattttgtcgcagtggccaccaaattccggcgaacaaatcgaacccctgtaccgattgatcgagaccc

SEQ ID NO: 837 - DNA, 5075 bp, Artificial Sequence
  Synthetic Oligonucleotide
ggagtcttgtaaggtgtcgccggaacccgcttagcacgtcccccaagaacttcacagtgtaggtgtgcccccgggttgccagttctagaggagatgcaatgcaccgcgccgaatggcgcggcgacggcgggtgcgccgggagaccgcgccgcgcaaatccaggatgcgtcttcgtggggccaaggagggagaccggtgtgagctacaacctgcttgaagaacgctggattccggttctggggaccgatggcaaggcgggtcgcgagggcatcaaggccgcgctgacgcaggcgggcacgatccgccagatcgccgcgtcgaacccgatggacaatgtcagtctgctccgcctgctgctggcggtgctccagtggtgtaagcccaaggtgaggaaggaggaactggacacgctgcgcggtggcgggagcgggggtgtgccacaggactggctgaagaagctggagcgcaacaggggccggttcgagttgcttggcgacggcccgcggttctatcaggctgcctctgaagccaaggaacggccgaggtgggaggtgtccgtgctcttcgctgatctcccgggcggtacggagatcgagcattttcggcacgtgtacgaccgcgccgtcgcactgtgccccgcgtgctgtgcactggggctggcgggccttcccgcgtcagcgacggcgggcggctccggcctatcgccctccatcaacaacgcaccgcccatctacttcgtaccggcaggcgagacgctgctgcagaccctggtgctgaactggcccatgcaaagacaacccaacgatcacccggcatgggaggggggggagggctcagggacaacgatcggcgtcctcgaaggcctcacctggcagccacgtgccgtctggcttggaacgcccaccgacaggccggaacagacctgcgcccgctgtcgggccaccggattcctggtctccggtatggtgttcaagaagggtcgcaaacgcgcagacgacacccgcgactggcgcgacccccacgtcgcatgggacgatggtctggacagggacgacaaggctctgcggcctcctaacccgctcaggtactcaaggcgcgccgccatcttctggcgggacgaggcccgcgccattcttgagtcactgaatccgccgagtgacggtcccccggttgcggccgttgcgcacgcgatccaccgtctgcctgagcgctcgcccttgcgcatttgctgcttcaagccagccacgaagccgggtcagaagaaatggttcgatgaagacggggagacgtggcgcatctctcatggcctcctacgaaacacggagctgagggcccgggcgttggcggaactggagtgggtcggccgcctggacgtgcggtggatgcttcagagggcgctcccccgggaggccgaccaggtcaacgccgcgctaaccaacgccgccgccgggaccgaacagctcttgcgcaaacgcttcgagcaactcctggcggcattgggcgaggccgacgggcatgacgaagcccgccggtgcacacaggattggcgggagcgcgttgagagcgtgctccgagacgagctagacgaggcgtgtgccgttgtcgcggtgggctccccgctgcggcgacgcgaagccgccagacgggcgcagtgggcgctgggccaggcgatgaagaggctggcggcagacgaggccgagccttcgagcggggacgcccccggcaagtccaggaggcgccaggaaaagggaggcgagtcgtgacccagaccgaggcattcatccagcgattgcagtccctccaggccggtgagcagtcgcggctgcgccgtctcgccggccaaccgctggacgagacgctgccgggattcgacctcttcaccggcctgtggtggccgctgcggcagaggagcccggcggtgccgcgccgggagccgagttggctggttgccaaggtctttggggctttcccattgcccgacgcgccggcggcccggctggccagcgtgctcggccggtgtgagccacgggatgagctgggccgggaccgcttccgcgcccgcttcgactcgctgctgcagacgccgtcgtcgcgcctggagcggccgctgctatgggccctttcggtggcggcggatgtcgtcgctgctggccgagccaggggcatcgcctgggcacaactgctcgacgacctctccatctgggagcggggcgagcagcaccggcgcaggcgcgacgtgcgtgatgactgggctgagcagtatctcaaggctgtgtaccagccggaaaggagctgaccatgctgattgagatccacatgatccagaaccacagtccctcgaacctgaatcgggacgacctgggcgcgccgaagacgtgcctgttcggtggcgtgacccgcgcccgcatctccagccagtgcctgaaacgatcgattcgccgcagcccggagttcgagacagtgcttgagagcgaggggggcgtgcgcacgcggcgactcatcaccgttctcgcggagcgagtgcatggcgacccggacccgccaagcgaattgattgagttcatcgccaaggcgttcgagaaaggcggcgtcaaacggaccaagaggggtgaagagccggacaacaccaatatcttgttgttcgtccccgagtcatccatcgacagcatggcggataaggtaaggcaggagcaagctcagaagaaacctgatcatgaggcgcttgcgcaagccatcgccgagattcttggggcgtcggcctcggtacctgatatcgccctctccggacgcatgaccgagctggatacggcaggcctcttcgccagactcgacttgcgggtggaggcatcgctctccgcggcgcatgccatctcgacacacgcggtcatcaacgaggtagattacttcactgccgttgacgatctgggtacgggtgccggagccgggcacgtggacgaggccatgttcaactccgcctgcttctacaagtacttctgcctcgactgggaccagcttgtgcagaacctcgccgggccggagcccgaccaggacaaggcggatgaagcgaggcgtctggccgccgcgactctggggcacttcctccgcgccgccgccctcactacgcccaccggcaagcagaacagcttcgccgcccacaacccgcccgacggcatcctcgttgagatcaagaagaacggcaagacccccatgagctacgccaacgccttcgccgatccggtagacccggggtcgcaacgcggactggtgggccagagcctggcgcagttgggccaatacgtgcatgacatggccgacggctacggcattgaggcagagcgattctggttctccccctccgggcggcatccgctcatctgggtggaccgggacgccaaggccccggaggccgagaagcccaccgtgacgcccgaggaccgcaatctcaagtcgctcgacaagctggtcgaagtcgtggtcaaggccgcgaccggtgcgccatggtcccacgtcaaggacgccggaagggcccagtcggaggtgacctgacatgagcgcctccgcagccaacaccgtgttcctgcgcctcgagggtccgctccaggcgtggggggatgcgtcgaagttcgtgatgcggcgcaccgctgaggcccccaccaagtcgggcgtgctgggtctcatctgctgtgccatgggcctcccgcggcacgcggcgggcgagcgcctgcgggagctcaacgagctccgcatgggcgtacgcatcgaccggcccggcacccgctggtgggactatcacaccgtgggcgcccgctacgggctggtaaccgccgagggcaagatcaagagaacggcaagcaccggggagtacgaaacgctggtgagccggcgcgagtatctctgcgatgcgagcttcctcgtagcgcttcagggcgatgccgagcggatcgaggacattcgcgatgccttgcagaatccgaagtggccggtttttctgggccggaagtcgtgtccgccggccatgccgatcgccgcaggacaagaccattaccccgacctgttggcggcgttggcagatcaaccttggcggccacgctctcggaatgaggagcgacccgaagacgtgccttgcctgatcgaatggcgaccatcgcaagacgagtcaactgcccccgaggacgcggaggtgtggtacgacgcgccgaaatccttcgacccgcccgtccacgaggcgcgtctggtccagcgcatgcgagtcaaggtggatgtgggtgacccgatccagcgccgtactccgcccccgccccgggcccgggcggactacggcaacacagagtaccggcgccgacgcgaagagcgcctcgcccacgaccaccgcctctgcatcttctgcaagtcgcccgccaccaccgtccagcacgtaacctaccgccgggccggcggcggcgaaaccttcgacgacctgcgctcgctctgccggctctgccacgatgcggtgaccatgatcgagtacggcctgggcatgggcctggaccgcatcaacccggaggacccgcggtggcgcgaccggatcattgagaagcgcgacgagatcgtccagttccgttccctggcgacccgccggcggcgcctcagtgccgaggaggtggagtagacatgtacctgtcctgcctgttgatcgacgtcggtacgaaccccgaccggccgcgtccggcccgatcgtggctccggaaccgctaccgggtgcatcagcgcttgtgcatggcgtttccgtcggcgtctcgccggtccgaggatccgcagttcctcaaacccttcgatcctgaggacttcgcacggccggacgttcatgtcgctcgggcaaagaagggtggcttcctgttccgcatcgatccgcggtcgggcgcctccgtcccgatcctcgtacagtcggcaagcaagccggattgggactatgcgttccacaacgcgcggcacatgctccggtgtttcgatgttcgctccttctcaccggcgtatgctggcgccgacatgctgcggttccggctgcttgcgaatcccacgaagcgcctccgggcgga

SEQ ID NO: 838 - DNA, 5047 bp, Artificial Sequence
  Synthetic Oligonucleotide
aaaaaggagcgcaccatgctgattgaaatccacatgatccagaaccacagcccgtcgaacctgaaccgcgacgacctcggtgcacccaagacatgcctctttggaggggtcacgcgggcgcgcatctccagccagtgcctcaaacgcagcatccggcgcagcgccgagttccagacagcaatggagaaggacggcggcaaacggacgcgtggcctcatccgcgagatcgcccgtcgggcgcacggggaaggtgaaccgcccgaagcgctcatcaaacggatccggaaagtcttcgaggacggcggcgttacgttcaagaaggccccagagaatgaccctcacaggatggccattctctggttcctccccgactccgccatcgaccgaatggctgaagcagctaaaaacaatgccgacttggcttcgactatcgcatccatcctgaacgaaaagccacgggtccccgacatcggactctccggccgcatgaccgagttcgacgctaagggaccgctagcgaatctcgactccttcagagtcgaagccgctctggccgccgcccacgctatctccacacacgaagcgaccaacgaagtggactacttcacagccgtcgatgaccttgccaccgaactcggcgctggtcacgtgaacgaggccatattcgcgtccgcctgcttctataagcatttctgcatcgactgggatcaactcgtcgccaacgttggcggagacaccgggcttgcgacaaccaccgtcagacagttcctctatgccgccgccctcaccacgccgtcgggcaagcagaagagcttcgcggccttcaacccgcccgatggcatgctcgtcgagatcaagacggaacgctgcgtgcccatcagctatgccaacgccttcgccgatgccgtgccgccgaagtcggcccgtggtctgatcggggagagcatcgcgcggctcggtcagcacgtccacgagacggccgagggctacggcatcccagcgatgcggttctggttctcgccgaaaggccgtcataacctcacctggatcgaccccagtgcgcccagggagacggagaaggaaaaccccgtcgtcgagaacgccaggaacgtcggctcacttgacgacctcgtgaagaacgtcatggccgcagttaagacgaagggcgccaaagctacccccggaggcgcgtcatgacagcgcccaacaccgtgttccttcgcctcgaaggcccgctacaggcgtggggcgacacgtccaagttcgtgatccggcgcaccatggaggccccgacgaagtccggtgtgctcggcctaatctgctgtgcgatggggttgtcgcgtgggaaagccgtggaagaccctgtcgccgccgccgggttgcgcggtttggcgcaacgactcatcacgccccgcggaagtgacaaggaggatccgcgccgttcgatcctcgacctcctgaacacgctgacaatgaccgtgcgcatcgaccgccctggaacgcgctggtgggactggcacaccgttggggcgggcactgggatgctgacggcgtcggggagggtcaaaaccggcgcgcagggcacgctcatcacgcgccgcgagtaccttgccgacgcgagcttcctcgtcgtgcttcacggtgatgcggacctcgtccactgcgctgcggcggccgtggccagcccggtgtggccggtctacctcggccgcaagtgctgtccaccggcggcgccagtgttcgcgggtgtcgggcacttcgacgatcttgatgcggcgctgcggtcgcagccgtggcgcccacgctacggcaaggacatcccccgggatgagaatcgccgcccgcgcgccacgatcgtccgcaactgcctcatcgagtggcggtcgcgcgatggcgcccacgcgcctgccgacgccgaggtgtggtacgacgcaccggtgtcgttcgacccgccggtgcacgaggcccggctgctgcgccgggttccggtgacggcggaaatcagcgaacccttacagcaccacatccagcccccgccgcgcccgcgcgccgattaccagaatggtaagtacaagaagcgccgtgatgagcgccttgaggcggatcgccacctatgtgtattctgcaaggctccgtgcgaccggccgcaccaggcgaccgtccagcacgtcacttatcggagcgccggcggcggcgaaagcctcgatgatctcaggtcgctctgccgcctttgccacgacgccgtcaccatgatcgagtacggcttgggcatgggtctcgaccgcatcgacccgtgccagctgcgctggcgcgacaggatcatcgcaaagcgcgacgaaatcatccgctttcggtctctggaaacccgtcggcgccggctgagcctggaggaggttgaatagccatgtatctgtcctgccttctcatagacgtaggaaccgaccccgaccggccgcgccctgggcggctatggcttcgaaaccgttaccgtattcaccagcgcctctgcatggccttcccgtctgccgagcgcaaagacgaagatcccagcatgctccaacccttcgcgcccgagcagtttgcgggcggcgacgttcacgtcgaacgggacggccacgcggggtttctctaccgcatcgacccacagccgggcggacgcgtcatcattgtcgtgttctcggcgcgcaagccggaatgggagtacgccttccgcaacgcagcgtaccttctcgccgcaccgccatcggccccgcggcccgtcgaggtgaggattgcagtcggcagccggttccgctttcgtctggcggccaatcccgtctttcgggtccgtgaggcgtccgtagaccggcgaggcgaaccctttgacgccaagtgggtcggcaagcggattcctgtccccgccgacgagaagtcgctgcggaattggctggaacgccgcgccacccgtaacggattcactctggaggacgtgccgtttatgcaggctggctatgcgtatgtgaataagacccgcaagaccgcgaactgccgtcgcctgcgctccgtccggtatgaaggcatcctcaaggtcaccgaccccgaccggttccgctgtgcattagccaccggcatcggccccgcgaaggccttcggcttcggactcctgtcgatcgcaccgaccaacggctgaatgagcgacggcgcggatgctctttggcaagtgaataggtgcgcggttcacggcgaggcgacccatggacgatctacaccagcttgcccgcttcgacgaccggctgagctacctgtacctggagcacgcccgggtggaacaggcggacaaggccattgcggtccacgatgagggtggggtgacggacgttcccgtggccggtctggcgctgctgatgctcggccccggcacgacggtcacccacgccgcggtccgtgctctggccgacaacaactgcctgatcgcgtgggtcggcgaggcgggagtgcggctgtacgcccacagcacggggggcacacgccgggcagcggggatcatcaggcaggcggctctggtcagcaacgaggccacgcggctggcggtggtgaagcggatgtacctggcccgtttcgcggccccgctggacccgtccctgtcgctgcagcagatccggggcatggagggtatccgggtgcgcgaggcctacgcagccgccagccgggcctcgggggtggcgtggcagggccgcaactacgaccgggggagttgggccaatgccgatcccgtcaaccgggcgctttcgaccgcgaatgcctgcctgtacggcctggttcacgcggccatcgtgtcggccgggtactcggcggcgctggggttcatccacacgggcaagcagctctccttcgtgtacgacatcgccgacctctacaaggtggagttcaccatcccggtggccttcgaggtggccgccagtgggcgggggccgctggagcgggaaacccgcctcgcctgccgcgaccgcttccgttcggggcggctgctggagcggatcctgccggacatcgcgtcgctgttggatgtcgacccggccggtgaagacgccggccccgtggacgaagatcaggccttgccggggcgcctgtgggaccccgaacatcccgatggcctcgaaggagggcagaattatggtgctgctgatgcttgagcgcgtctctccgagtctgcgcggcgagctgacccggtggctgctgcagccgagaccgggtgtgttcgttgggaatgtgtcggccctggtccgcgacaagctgtgggagaaggtcctccggagcaagcgaacgggggcggccatgatgatccacaacagcaacactgaacagggcttcgccatccgcaccgcggggccaaccgaccggatcatcgaagacttcgacgggctgatgcttgtcaaaaggccgtccaagaggtaggaatccagtgttgtccccacgcacgtgggggtgaaccgaaaaccgggacagagcacaccacctttccgaaggttgtccccacgcacgtgggggtgaaccgttaagcggcatcgctcagccaccccagccggtgttgtccccacgcacgtgggggtgaaccgtccgagtcgcaggcctgggcccgatttcacgagttgtccccacgcacgtgggggtgaaccggaggactccacggccgatcagtgttgcccgcagttgtccccacgcacgtgggggtgaaccgacaactgccgcgcggccatctcggctgcccgggttgtccccacgcacgtgggggtgaaccggatgccgctcggtccagcggtgctgaagggcggttgtccccacgcacgtgggggtgcggattgaaacgccgacacggccggcggggacgccggccgctacgatcacgccccccgtgggggtgaaccggcgcagatcggcgctgcacagaggagaggagagttgtcaccacgcacgtgggggtgagccgggagcgaagtcggaattgggaattgggaattgggaattgagaattgagaattgagaagtgagaattgagaattgagaagtg

SEQ ID NO: 839 - DNA, 4927 bp, Artificial Sequence
  Synthetic Oligonucleotide
gatcgcggcgtgacagacgccatagaggcaggagttcgccgcagaaagggcccggtttagcgggtccgcttgccgccagtcgtcctgattgtaggcgcgccccttccattcgacgcccacctcgcacgcgatgcgctcgtattcgcgcctcaccctctgcccttccttgctgcggatttgggcgatgttcagattctggttgagttcttccataaacctcttctgatacatgcgccgaacgacggacatccgcgatcttttgttggcccaaagctccatctgtcgcagcaggcgatgactgctatgtgtgccgcctgtgctgtgggcataaagccgaacgccctgctcaccggtccagcagacgaggcagttgttgtcggcgagtgagcgcatggcggcgtgggagatacgagttccgggacccagcatcacgaacgcgagctggtcgattgggattcgcatctgcccctctttgtcgtagaagaggagcgacgacttctcaacgtccagtctgccatgctcgaggtatagatggctccagcggtcttgaaactttggcaggtcatgcagattccgcatcactactcctttccggtctcacactggggccacgcttagcagcccaaagccaaatgccttggcggggccaatgccgcggaggagagtctgcctaagacgggccggatcagtgatttcaaggatgccctcgaatcttgcagagaagaggcgatttcctttcttccggttggtgttcttctcggcttcgtgtcctcttatgtaaacataccccggctggatggctgtcagatgctgcaaactaaagcctgaatcctcggccttgcgtgtgagccattcttctagcttgctgtgcggaacggggacgcgtttgcctgtccatttcttgtccaacggttgccctttatcatccaaggatcttgggctgattcttcgcaccgggtttgccaggatgcggaatctaaggcgctggttcttttcgaagtggggaacgaatgagctcacctgcggaggggccgctaggaagtagccggcattgtggaaggcgtagtcccagtcgggcttcagggcggactgcacgaggatcacgacccgtgctggtgggtctgggtcgatgcgaaataggaacccggcatcggccccccgagtgacatgaacttgcttgtcgaagtcatccggcttgaagggctccaggaagtccggatcatcgctcttttgggacgccgacggaaacgccatgcacaaccgctggtggacgtagtagaggttccgcagccacagccgtccggggcggggccggtcagggttatccccaacgttgattaggagactggacaggtacatgtcattccacctcctctgcactcagccttcgcctgcgcgtttcaagcgagcggaagtggatgatctcgtcgcgcttcttgatgatctcgtcgcgccagtagggttcgcacgggtcaatccggtccaggcccatgcccaagccgtattcgatcattgtgacggcgtcgtggcagaggcggcagagcgcgcgcagatcgtgctgcgcctcacctccgccggctcggcgataagtgatgtgctgcacagtgttcgccggggacttgcagaagacgcagaggtgatggtctgcatcgaggcgctcggcgcgcgccttgcgatactcggtgttacggtagtttgcgcgcggccgtagcggacgtggcgtgtagttctgcgaggccttatccgcagttgtgacctggccgtctttgccaacctgcaattgctcccggatgacgaaccgggcgtcgtgcgacggaggttcgaacgtcaacggcacgtcgtaccaaacgagcgcgtcggttggcgcctcgggctgctcactcgtcgggatccagtccaaaaggcagtccagagacgccggtggccggtcgcctttgaggcgagggcgccaaggaaccgactttagcgcggaaaggagatcgtcgaactggccaacaggattgtcgggattctgcagcagcggacgggacggcgggcagcactttctaccgaggtagagcgtccattttggatttcgaaccgcatgttctagttgggcaatgaggtccggttcgccttgaagagcgacaaggaaagaggcgtcgcaaaggtactcgcggcgcgtgagcattgcacccgacttgctttttctttcgccttccgcaatgcgcatcagcatcttcgcacctactgtgtgatagtcccaccaccggattcccgggacatcgatgcggacgccgaaactcagcctggccagcgtggggagcaagttctccggggcctctcgcctgggaacgcccctggccgcgcaaagcaatccgatcacggccgatttggtgggggcctcgcctgtccgccgcactacgaacttcgattcttgatcaccccaagcctgaagtggcccttctaggcgcaagaagagtgtattcccgttcatttcggcacctcaggattcacgacgactctctgaacctcgtcccagtcatgccccacggcagagagaacggcggggatgagttcgcccagcgatttcatattgttctcggtaagggggatttgctgttttcttttcttcccgttctcttccaccgtgatctcagcggtcagctggtgccggagatttggtgagaaccagaagcgctctcgcggcctgccatatccggtatcgagatcgtggatgtaatggcccatctgtgcgatgctctgggaaataatgtctcggtcgtctttagttacgggcttggcgaaggcattagcatagctgataggactgtccttgatctcgaccaggatcccatccggcggattgtgcgcggcgaagctgttctgcttaccggtgggattgaccttggtcgcaccgcgaatgaacgcgccaacagtatgcgcggctagctctttgtggtcttcgccgaagccctttaggttcttgaccagctgctcccagtcgatagagaagtacttgtagaagcaggcggaggcgaacatcgcctcgtccacatagcccgcaccggcgtcctcgccggggatgtcatcggccgcgacgtaatagtccacctccgggcgcgcctcgtgcgtggatatcgcgtgggcaacctgcaatgccgcctcgacggtcgtatcatgttgctgccagacctttttagccgatttgtcgggctccaacatccgcccggagagcgacatgtccggtaccgcggtccgcgtcgctatgagctggccgaactccgctgccagttgttcatccgttctgccggcgtcgtcttgcaggaacctcgccatctcatggatcgcctcgcgggtcgtatagacgagcatcttactccttccgctgtccttcgaatcagattcctcgacggacttcgtgggcttcttggccttgaagccacaaagcttcaggacacggtccgctcgtttcttcacgtcggccttgcccctaacctcgtcggctatgagtttggccaactgccgcgttcgaacgccgccgcacagtctctcaaacgcgtcgctcatgcggatgctccgcttgatgcattggctggagatgcgcgagcggagaacgccgccgaagtagcaggttttgggtgcgcccaggtcgtcccggttcagattcgccgggctatggttttggatgatatgtacctcgatcaacatcgtcctcactccttccttcatggttacttggtcgattccaaatagtactgttctgcccagatataacggacattgcgatttcggcgggtcggctctcggtcttgcacatctggacctcggacccagagccggagatcgtctagcaggcggacccagtcgagacccctggtgtgtccctcggccaccgcctcacgtatccccgagagcgcccaggataaatgcggctctagtttagcaagcggcgtttgcaggatagcgtcgaagcgggcacgaaatcgctggcgttgagactcctctcggagccgcttctcgagacgccctattagcttggccagctccaccccctggtcgcgcacatctgccacaggaaaagcgccgtagagcttcgtcacaagccaggcgctttggcgctccggcgtgcggacattgtccttccgcaacggccaccagaggccggtgaagatgtcgaagccgttaacggattcatcgaggccttggcccgcgtgagtccgaaggaggccaagatcgccttccttgagtctggttagtgtattgatgaagtcttcagtggcagtcattcctgatctccttcctctttgcaggctttcttcttccgatcagttttgagcttcatgttcggtcggatactctcaatcgcctttcggcgcttcagtgccgccactgtgaagcctggcgcaagcgatctggcgatcatgttcatcatggggcgatattcgtttgcggcttcttcccaggccgactcgcctcctataagcagatcaccgacccctgcggatactcggtgctcgatgtcggggcggatggaggccacgctagcggcgccagccgggcctccgacagctcgtttacggacgtccttctctacccatcttcccctatctccccattgctgcacaaaggatgctgctgctgtatggcttgattctctcgaccgaatcggaaccgttcgctcccatacgtcaatgttctttgccttgtcggtcgcgaaagcaaccatgaaaagcgatgtgaactgactgtgtgcgtcaaaccgtcctattctgaccatccgagcatgaagagcttgccagggtcgatccatccggaatcggccagcagcagttaggtcaggtgctctgaaggccgtccgtggagtcctgtcggagtaaacgacgtgcggatcgtcccattgctcgttctcgttttcgcctgtcgtctgaaactcacaggtccgaat

SEQ ID NO: 840 - DNA, 4924 bp, Artificial Sequence
  Synthetic Oligonucleotide
cccgtctccgcaggaggaggaagatcgcctcagtggggacgggcgcttcccgcctgattggttcaaaaaactcgatgactgccggaagtacttcaatctgcttggagatggcccccgtttctttcagaatgagggcctcaagaaccggccaccgaagcacaccacacattacctgatgcacgaagtgccgagcggtacgaatgcgtggcacttccatcacactaccgaccaatcgggtggcttgtgcgcagcttgttgtgccacgggtttggcccggctgccggtcttcgcgacctcgggtggcaagggaaagtcgccagggatcaactcaaagccacccctctacgtcataccggtcggcacgacgcttgcgacgactctgcgattgtcctggagatatggggatgcgtcactgggcatgccagaatgggaaacaccaggatacgaactcccccgacggggtaatgtgcccctgctgccaggaatgacctggcttcctcgcaatgtatggttgggaaaccgggaaaagaacgaaacggcctgtgtctcctgtgggcgggccgagcgcgtccttcggcgatgtgtgttcgacggcaaaggcggctccaggggtgaagaccggaggtggcgtgatccacacgtggtccccgtgccgctgggaagaaacgcgaccggaccacttcagacaagcgacgctctgaaatcgaaggatgccgcggcggggcagtgggtgagggctctggcagccattctcggacaaaggacggttgaccaaggagcgggcatctgggcagtcggcttctccacagtcaagaacgacaagtacctcgaggcaactgaactcctggtcgcgccggaacggtggccgtcgccagcggaagactggatcgcgttggcggagcagtggcaacaagaaggaagagcggtcatgcgacgggcgcgttcgccaagtgcttcctccactcgacacgaagtcgaactggacatcgttctcggtgctgttcgggcacatgtcgagtcacggcttgccagccgcatcgacgggctgctgtcagacgctgaaggtgagtgggtgaaggcaacgagagagtaccagaagatgatggcggcagtggcgatgtcgcttgcgccagggtttacgacgcgcgcgatccgccgacgcaatcagattgcccgatccggtccggacatggcgcccacatcgcggtgcaggaagggagaagcaccaccacggaaaggcggcgaacgatgacgccaacagagaagtttgtccgaacgctggaatcgcttgagcctggcagccttgggcgattgcgcagcctgggtgggcgcagcctggatgagtcagtggagggtttcgaccttttcacggggatttggtggccactgagggaacagaaccagagagcccctcgccgtgaggtggcgtggctggttgccaaagtgtatgcgtaccgcccgatgcgacaatgcaaaggagcaaggcttgccatgcagctggggaatgtgaaaggcgagagcgagccagtgatgcagcgacgacaagccaagttcgacgaactcctcctgctccctctgaccctgatcgagccagcgctgtgttgggcgctggatctgattgcgaaagacagcggtgagttggactgggtgcgcctcaccgatgagttgtccgcatgggagcgtgaagaaacgcggctcaactgggcgacgcaatacctgcacttcgggcagtgacatgctcaaaaggagaatactatgctgatcgaaatccatgggattcagaaccacagcccggccaatctcaaccgtgatgatctgggtgctccaaagacatgcttcttcggcggggtgatgcgctcacgtatctccagccagtgcatcaagaggagcatccggaccagcgagcagttcaagctgctgtgtggtgggatccgcacgcgaagactgccgcaatacctggcgtcccagatcgcagaaaaagacatgctttcgctggccactgcggtggttcaggcgtgcgggcttgcgaaggacgacgcggcaaagaacgggaagaaggatgtcatcgttttcctgtcaaagagcgcgactgcgcacatggtggatatgcttcgtgcggaagaggcggaagtgacagagaagcgagtcgccaaactctcgcgagaattcgcccgcctcgttgcacaggatcgctatgcgccggacatggcattgtcaggacgcatgctggaaccagccaagccccccaagagcaaaaagggtcgcaacgcggacacggacgaacaggaggacgagaaggccgacagcagcgccaaggacaagggggtctggaagggccttgatctagacatcgaggctgcgttgcaggtggcccatgggatatcaacccacgaagctcgtccggaagtggactacttcgtagctgcagatgacataccaggtgaggatgcgggtggtgcgcacattggcgaagccatgttcgcgtcggcctgcttctataaatacttctcgatacactgggaaacattggtggacaacttgaacgggaacagggagctggccgcccacaccgtcggggccttcattcgtggagccgcgctggcgaacccgaccgggaagcagaacagcttcgctgcccacaaccctccggacggcatcctcgtagaggtaaagcaaactcgctccacgccaatcagctacgcgaacgcattcgctgcaccggtgccgagcaagggaacgcgcgatattgtgtcgcaaagcatcgcacagctcggtcagtacgtgcatgacctggacaccgggtacggcaaggagcgcgaggacaagcggttctggttctcccccaatctccggtatccgctcacctatcagcacgagaagcaggagaccccctgtgctgacgaaaacgtaggatccctcgatggcctagtggctcttgtcgtgaaggaaatcgggtttgactggtcgcgcgttcagtccgtgacggtcgagtgaggagatgcgccgatgaatgcgaatacgctcctgctccgcctcgaaggtcctcttcaatcgtggggagaccagcaatcgagattcgtcgtccgaaggacttccgaagctccgaccaaatcggggatcgccgggctgctctgcgctgcaatgggcgtgtcgcgctccgatgctcggcaacggctcatcaagttgaacgctttgatgatgggcgtccgcatcgatcgtccaggcgtgcgctggtgggactaccacacggtgggggcgggaatgcagatgcaaagcgcggagggaatcggaaagaccaaacccggcccgattctgacgcgtagggaatacctctgcgacgcgagcttcgtggttgctttgcgtggcgattcctcactgatcgtttcgttgcacaaagctgttcagcatccggtgtggccggtgtatctcggccggaagtcgtgcgcggcatcgcttccactggtgggctgccatgacgatccggatgtgggcgggtttcctgacctggaatctgcgcttcgatctgttccctggcggagccgccacgcgggagaggccgtgcccgatgtagtcgaatgcgtgatcgaatggcggggtgccgcagcgggtgaggttgctccactagacggggaagtctggtacgatgtcgcagactcgtttgatgtgccagcacactccccaagaatggttgttcgcaagaagatgggcgtcggctccggcacggacatccgagtcggtgcggcacgccagagtcgccttccggcgccgctgcgcccccgcgccgattacgcgaatgctgagtatcgccggaagcgtcagagccgcctggacgcagatgggggcctgtgtgttttctgcaagtctccggcgacgacggttcagcatgtgacgtatcgccgcgccggcggcgatgaggagcaagatgatttacgctcgctctgccggttgtgtcacgacgcggtgacgatgatcgagtacgggatgggcatggggctcgaccggatcaaccccgaagacagacaatggcgcgaccagattatcgccaagcgtgaggagatcattcggtttcgttcgctggagactcgacgtcgacggcttagcgccgaggaggtcgaatgatcatgtatcactcctatctgctcattgatactggtgacaatccggaccgcccgaggcccgggcgtctctggttacgaaatgtctatcgagtacaccagcggctttgcatggctttcccgaatgatgccagaaagcgagaggatccagagtttctcaaaccgtacgatccgaacggctttgtccacgttcacggcagccgcacaaccgaccaggcgtttctcttccggattgacgcgcatgcggggggcagcgtggtcatcgtgacacagtctgccgtaaaaccggattgggcgtatgccttccagaacgcgatgtatcttctgcatgccccgccgtcggagccgcgtgaggcacaactcacgtttccagccggcacgctgttgggattccggctgctggccaacccgacgcgccggttgcgagagagttctcgtgacgccaagggagaacctatcgaaggacgatgggcgggaaaacgggttcccgtgccgacaggcaagctggatgattggctgacacggcgatcggagcgttgtggttttgccgtcgagactttgtgggaagctcggccgggatttgtttacttcagcaagtcggcgagccggggcgagggacagtgccttagatccgttcgatatgaggggaagcttcgcgtcagcaactctgcagcatttcgcgagacgcttatccggggcatcgggccgggcaaggcgttcgggttcgggttgctgtcggtcgcgccggtgcgcgaggggggctgaatggggcatgcgtgaagggtgcggctctttggcaagtgaatagt

SEQ ID NO: 841 - DNA, 4914 bp, Artificial Sequence
  Synthetic Oligonucleotide
gccaggatggcggcgtggcaaataccatagagacagctattggccgcggacagggcccggttcaccggatcggccgcgtgccaggcgtcccgccggtaggcccgcccgtgccagggaaccccggtttcccggctggcccgggcataggcctccctgacccgcactccttctttgccccggatctgggggagagtcagggtctcgtccaggggctcctcaaagcgcaggcgataaagccgcaggaccacctgcagcctggagtcggcatcggcccacaacctggcctggtgcaggagattagccgcgtttctggtcaggcccatgccctgggcatagaggcggacgccttcctcgccgcaccacagcaccaggcagccgttatccgccagggtagttaccgcggcatgggtgatggaggtccccggaccgagcatgaggagccccaagccggcgcaggggaccggcaccttgcccttggcgtcccagaacgcaatggcccggctttcctgctcaatgcggcagtgctccacgtagagatagctcaggcagtcccgaaatttgggcagaaaatgaaggtctttcaatctcataaccatcctcacggcggagatagggagagaaggcccagcccataggctttaccggggccgattccccggataacagtatcctgaatacgatccgcatcggtgacttggagaataccgtcgtaacggacagtgcgcaggcgctggcctttatcgtcctggctcttttttttatgcacatagatatagcccggctgaattgtgatggattcttccttgacagagaaccccttcttttcaccctggtaagcgagccagtggaaaagttgggagtctataaaaatgcgagcatctttgccgggattcttgaggcgccattctttgatctcggtcgcgcatggtaccggaaggcgcctgccgtggcgcccttttatttccttaagctcctctttggtgtaattctgccggtcttttttctttatcgtctcgactttctttgtcggattcgccaggaggcggaagcgaagagactgtccctttacgaaacaaggttcgtatgtcttcacctcgcaggccgccaaaaaactggcattgtgaaaggcgtaatcccaatcgggccatgcggcgcattgaacgagaatcatggcccggccgccggggaggggatcgacgcggaagaggaagccggaatccgcctggcgggttacatgaacctggttgatgccaaattcctccggcttgaaaggtttgaggaagtcggggtcttcggatattcgggaatcggacggaaacgccatgcacaggcgctgatggacatgatagaggttgcgcagccacaagcgccccggccgggggcgatcagggttgtcacccacgtcgatcaagagggaggacaggtacatagctctattccacctcctccgcggccagacgccggcggcgggtctgaagcgagcggaatcggatgatctcgtcccgcttccggatgatcaggtcgcgccagcgcggctcttcgggattgatgcggtccaggcccatgcccaggccatattcgagcatggtcacggcatcgtggcagaggcggcataaggaacgcaaatcgtccaggtcttcatgccccccggcccgccggtaggtgacatgttgcacggtggtggccggggacttgcaaaagaggcacagatgatggtcgtggtccagcctctcctgccgtttcttccggtattccgtgtggcgataatttgcccgcgggcgcggcggcgccggggtgtgattctgcgccggctctttggcaagttctagccctccgtcggcgcccacttttaattcccggcgcaggacgaagcgcggcagatgggccgggggctcaaaggaaacgggcacatcgtaccagatgagggcctcatcgggggcttcgggctgttccggcgtcggctcccagtcaagcaggcaatccacggttggcggcgactgatctctcttgagccgccgacgccagggaaccgcttgcagagcagaaagcaaatccgggaaatcgccggccggatgcgccccgtctccctgatggcttaagagcaacgggcgggacggcgggcaggactttctgcccaggtaaagagtccaatggggcgctttgatagcggcctccagttgggcaatcaggcccggttcgccctgcagggccaccaggaaagaggcatcgcagagatactcgcgcctggtgagcatggcgccgggtttggacttcccttccccttcggcaatgcgcatctgcatgccggcgccgaccgtatgataatcccaccagcgcaccccgggccggtccaggcgcacgcccaggcgcaaggcgcagagtttgggaagccacttatcaatagcctctggacgggaaactcccaaggccgcgcccagcatcccgatcacaccggatttcgtcggagcctcagccgtccgccggacgacgaatttcgattgctgatcgccccaggcctggagagggccttccaggcggagaaacagggtgttggcgctcatcaggctacctccggctttaccaccaccttctggacctcctgccactcatgaccaagttccctgatcactgcagggatcaattcttccaacgatttgaggttctttccggccagggggaattccttcttgccttccccaaagctcaagggatagcaaagattgggcgagaaccagaaccggttcttaggtttgccgtatccggtgtccaggtcgtgaacatattggccaagttgggcgatactctgcgatatgatatctctctcgccttgactcaccggcctggcaaaggcgttggcgtagctgatggggctgttttccctgatctccaccaagatgccatcgggaggattgtgcgccgcgaagctgttttgcttgccggtggggttggccaaggcggctcctcgtatgaacgccccgacggtatgtgcggccagtttctcattgttgtgaagatttttgaccagggtttcccaattgatggagaagtacttgtagaaacaggccgaggcgaacattgcttcatccacatagccggcgccggcatcttcgccggggatatcatcggcggcgacataataatcgacttcggggcgggcctcgtgagtcgatatggcgtgggccacctgaagagccgcctcaatggtcttatcaagtcctttccacacgtcattatcaccttttttcggttccagcatcctgccgcagagggccatatccggtgcgatgatatgcttagcgatgattttggcaaattcctttgccatatcattatcagatctacccgtttccaaaagtttagacatcttatccaccgcttcgttgctcacatataccagtccatcacttttatcttccccgataaggtcgtcatcctcgcttttcttttttctcttttcttttggtgcaatcccacaaatctccaataccgtcattgccttcttaaacgacgccggaccatctccggcaatcaattgcgccaaccgccgggtgcggaccccgccgagcaactgcttaaactcagcgctcaggcggatactccgcttaaggcactgactggaaaggcgcgagcgcagcaccccgccgaaatagcaggtcttgggcgcgcccaggtcatcccggttgaggttggccgggctgtggttttgaatggcgtgaatctcgattaacatgggtgtcatcctccgtaggttcttaaaaattggttcgcccatttgagccgcgtggattcgcgttcccagatggaaagatcatccgtcagtcgtgcccagtcgagtttcaggtttcttgtggcgagcaggcccagcgcccagcgcaggtgaggttccatcttgccaagcggtttagtcagcaccctgtcgaacctttgcgtgaaacgctttttggctggatccttgttcggttggcatcgtgcaagctggcgggcgagcatctcgccgggcgatggtggaattggacggaaggcgtatagtttagctatcagccaggccacttcgcgccggggtgtgcgctcacttttcgcccgcagcggccaccagcagcccgcgaacaggtcgaagccgtccaccgtttcatcgagaccctgacccgcgtgctggcgcagcaacccgagttctccggatttcatacgcgtcaggtattcaatgtactgttcggttgcagtcacttttcccctcccttcttcctgtcggactttttgacgccttggaactcggtcccaggttcggtttaacgtcggcaatctgtttctgtctttccaccgcagcagtcgtataacccggagaaagcgatttggcgatggcggtcatcatcggactatattcgcgggctgcctggtcccaggcatcttcacctccggtaatcaattcgcccgcttgcgcggagaccctggcttcgacatgagggcggatagcggcgataaaggcaggtccctcgaccttcgatcttcctatctccttctccatctcttttgccttttcctgccattgctttatcgaaggtgccgccgtttctgagattgatcctgttgatgacatatcaataattcgctcccacacatcaacgttctttgccttgttcgtcgcaaaaccgatgacaagtagaggagtagatttacctgtttccactatacgggcaagcagatcggaccatgggcggtccattctgaacttgcctgccgaagttaaatctgctgccctcaaggtttttcgtgttttgccgtccaaatagatcacatggggatcgttccacttttcattctcctttttgccggccgtctgaaactcgcaggtcaaaataaccgctgttttctggccacaactgatgcacatggccggttctttgaccggatcatgca

SEQ ID NO: 842 - DNA, 4884 bp, Artificial Sequence
  Synthetic Oligonucleotide
  misc_feature (3242)..(3242): n is a, c, g, or t
  misc_feature (3262)..(3262): n is a, c, g, or t
  misc_feature (3275)..(3275): n is a, c, g, or t
  misc_feature (3277)..(3277): n is a, c, g, or t
  misc_feature (3319)..(3319): n is a, c, g, or t
  misc_feature (3332)..(3332): n is a, c, g, or t
agtaaatctctatggcctctttccaaccgctgtctgcctcactataggccgtctcatcgctggtcgtctcgtcgctagtcgtaagatcggtctcctccattaagcctgatctccatgcgctgtaggggtaattgttttatccccacgccgctatcgcgaaatctgcctgctctccatgcgctgtagggttaagctccaatgccgactgcctacctgccctctccatgcgctgtaggggtaattgttttatccccacgccgctatcgcgaaatctgcctgctctccatgcgctgtaaggttaagaaacagttaaaatcccgtttcaagcctctctgcctcctccatgcgctgtagggctaccaaaacacctataaaaaaacatccgctaaaattctttcactgccatcgagaagaacttttaactgtcgagttaaatattactcaagttgagttaaatgttactcaacaggtttccttaaacgcttatatttaatattttaccattcgataacataggaattccagtaatttttacccctggattcccgcttttgcgggagtgagggaattgtaaagtgcgcaagcttggggcggaccttgtgtctgcccctgcaattagcttatccgcacctacaaacgatagcgtaattgatccactgtgcgctttgtgttacgcacttagcgaaagaaccatctgctgatccctacacaatttattgtgtaatcggatctgctcttgcgcctagagcttttgcgcttagcaataaccaattagtattcatgagcatcatcattaacctccgggaaggttaagtttaggtttatctggatcaagcggctggatgcggccagcttcgacttctcccacctcaggatcccataatgcgcctggggaggtaaggtcctgatctaatagttcggcctcttttacctggtttggtgacagcatcagggctgattgaatatcgggaataatccttttgagaagacgcttttgcaggaattgatcgcgacaggcgattcgcacctttcgctccaggctttcagtttctgttgcggctgttctaaaggcaacagggatggtaatttctgctttgtagatatcagcgacatcgtagacaaaggagagcattctgccggtgtggataaagccaagggtaggagagaagccagcagagataatggcggcatgacagattccatagaggcaggcattagcggctgagagggctctgtttacggggtcggttttagtccagttatttcgctgataatttcggcctgaccatgggacgccggtttccttggcagccttggcgtatgcttctcgaacgcggattccttccaggccacggatttgcctaagggttaaatcaggggcgaatttttcggaaaatcgaagctgatagagacggcgcactacctgcatccgggattgatcatctgcccacattttggcctggtgtagaaaattggcagcagttctggtttcacccatacctgaggcatagaacctgactccttcttctccgcaccaggcgataagacagccgtggtctgacaagacaagaacagcggcgtgggtgatggagacgccagggcctagcatcagaagggagagattagcacaggggacagctaccttgcctgtttctctgtggatagcaatagcctgctcttcctggtcgattcggcagtgctccagatagaggtaggaccagccgtcattgaatttaggaaggatatgtaggtcttgaattctcatatttcacctttaagcagatttcacctttagcggagcaatcaacctccagcagaccaaagccaaaggctttgccagggccaaggccgctgataagagcttgcctcaggcggtcagcatcggtaaccttgaggatgcctatatagcgggcagagcgaagccgggctttgtgctccttatgttcctccttatcattcttagattcataatatattttgctgaaatagacatagccagtttgaacgatgagtccctgtgtttccacagagaagccattttcttcggctcgcttgatgagccactcgttgaggttatcatcgcggacagggactcgcctgccttgcttagctttttggccgtcagggccgactttggcgatcttgcgggttgggttggccaagagatggaatatgaggcgttggccattttcaaattgcggatagaagggctttatctctggcggtgcggctaagagatattcggcattatggaaagcatagtcccagtcaggttctagcgcggattgaacgatgattaccgggtttctgggaggatatctgtgaggataaatgccaatctctctgggtggatgaatgtcaatccgaaagaggaagccgtgctcaggacctcggcggacatgaacttgatcatgaacttgattagggtcgatgcttcctggcttatttgggctaaagtcttccggtctaaagggttttagaaagtgagggtcaacacgctttttaaaaggggctgggaaagccatagacagacgctggtggacgtggtagatgtttcgcagccacagccgaccgggtcttgggcggtctggattatcgccaacatcaatcaagaggatagatctatacaacatttattacacctcctcgggagcaagacggcggcggcgggtacttaaggagcgaaatttgataatctccgctctttttttgatgatttcctgacgccagcgttcctcttcggggtttatcctatgtaggcccatccctaagccgtattcaatcatggttacggcatcgtggcagaggcggcagagggagcgaaggtcgtctatggcctcatggccgccagctcggctataggtgatatgctggacagtggtggccggagctttacagaagacacagaggttatagtcatatttgaggcgctccttccgacgctttttgtattcgctgttggtgtaattagctcgagggcgaggcggcggttgggggaggctctggctaggctttttgtcgattttgatctggccgttatctcctacagtcaatatcttgcggatgacaatgcgggggagatgagcagggggatcaaaggttacgggcacatcataccatatttcttcggtttcttcgggccagttttgttcggctgagggctcagcggctgaggctgagggctcggcggctgaggctgagggctcggtcggcggcggcagcagctcaggcggtggggactnatgcagtgtgggttcctgancgagcggctgagntncctgatcacggtcgaggaggcaggttatggttttgggcgggngatctttctcaanccgcgggcgccaggggatggcagtaatggccgaaagaagatcgggatagtaggctggattggagtaagaacaattggagtaagaataagaggatgatggaggagattctaagggttttgaagaagtagattctgagtactctgagggataagaagaagatgatgaagattttgatgtttttgagggataagattcaaagattggccgactgggcggacaagactttctgccgaggtaaagcgtccatttaggtttttgaactgcttcggccagctcagcgatcagagcatgatccccttggagggcgactagaaaagaggcatcacagagatactcacgataggtaatcattgtctcttcctttagtttgccttcagcagtaggcattgcccttttggcgccgacagtgttatagtcagaccaaaggaagccaggggcatcgaggcgagcggccatgcgaaggcctgctaactgtgcaattttagccacttcggagcgagggacacccaaggcggcacagagtatgccgatcacgccagatttagtaggggccttggctgttcgtcggacaatgaactttgagcgatgatcaccccaggcttgcagtgggccttcaagccgaagaaaaagagtgtttggggcaggggaggttgatgcagtagaaagatcgtaagcagccatcatcccctcctattcctaatggttactatactctttatgtttagcacttctttttggacctcttcccaggtcaggtcagggtggttgatctccttgccgagtttttcgattaggttagagagggtttcatcgagcgaggtaacatctgaatctacaacattagcggcggctgaatctatagcgacgttagcggtggctgaatctacagcgacattagcggcggcggtggcctttaggccatcatcaatattttttggagaatagcggccgttaggtgaaaaccacaagcggtaatcaggccggccataccctttatctatgtcgttgatgtaggtagctaactggacgatgctctgccagatgagatcacgatcgtcgtcttgattaaccggcttagcgaaggcattggcgtagttaacaggtgtatttttctttttgagctcgatcactagacaagagggtgggttatgagcggcgaagctgttttgcttgccggttgggttaaccagagctgcggccttgataaatgctccgactgtgtgggcagcgagtttttggttgcccttgagattggcgagcagtgtttcccaattgatggaaaagtatttgtaaaagcaggctgaagtaaacatagcttcatcaagatagcctgctcctgcatcttcacctgggatatcgtcagcagctacataataatcaatttcaagacgggcctcatgggtacttatggcatgggcaacctgaagagcggcttcaacctgagtattgaggttttcccagcttttagcatttttactaggctccaacatccgaccgcagagggccatgtctggcgctactgttagctcggcgatcaggcgggcgaattctt

SEQ ID NO: 843 - DNA, 4858 bp, Artificial Sequence
  Synthetic Oligonucleotide
acggttcacccccacgtgcgtggggaatacgggccgaagcacgggctgagcacgtcacgggacggttcacccccacgtgcgtggggaatactgtgtcggcggaggcaaatactccagcgatggcggttcacccccacgtgcgtggggaatacgttcacggtgaggccgaacctgcccgcggccagcggttcacccccacgtgcgtggggaatacgatcccctccaacgcgcgcaccggcgcacacacggttcacccccacgtgcgtggggaatactgcgagatagcgcacaatcaggggcggcctgacggttcacccccacgtgcgtggggaatacactggctatttcgctggaatccgcctttttatcaatgtaacgccctcgaagtcctcaatcaagcgtgtagtttccccaacacttctgatgacaaaaccctgctcgacaggtgccgggtagataagtattgccgccccgtcgcggatggatcggcagacgcgttgccagagaagatcgcgcactctggccgacacacacccgacgaacacgccgctgtgcggttcgatcagccagcgggtgagttcacctcgcagtgatggtgctgctttctccaccagaaggacgatcatggtttttcctcccgggccaggaagagggcgagaggctgagcagctggcctacgggcatggcggcgatttccggcggctcccacagttccgagggtgcggcagggtcttcggcgtagatatcgggcgcctgagcctcggcgggtttgaggtcgagcaggcgtgctatatccgggaccatccgttccatcaggcgttcctgatggaaaacgtcgcgacactcaaggcggacgcggcgttcaaggtcaggagggttttcggcggctatgcgaaaggccacgggcactgtgcagcgggttttgtagaggtcggcgatatcatacacgaacgacagttgcttaccggtgtggatgaaacccagggccggagaccagccgccggcaagtatggcggcgtgtgccaggccgtagaggcaggcgtttgcgcaggaaagggcgcggttgacgggatcggcgccatcccattgatcgcgggtgtaggagcggcctttccactcgatgccgtagtgtctggcggcggcggcgtacgcctcgcggatgcggatgccctctttgccgcgcagctgctggagggtgagggagaggtcgacgggttcagcgaagcgcatgcagtacatgcgtacgacgacctggaggcgggttatttcgttgcacaggagggcggcctgatggaggaggttacggctgtggcgggagccgccgagaccctgggcatagaagcgcacgccctgttcgccggtccagcacaccaggcagttgttgtcggcgagggtgcggatggcggcatgggagattttcgtgccgggcccgagcaggaggacggccagtgccgcgaccggaacggaggagaccccgtcggtctggaagacggcgatggccttatcctcctgctcgatgacggcgtgctcgacgtagaggtaggcgcgtttgtcgctgaaccgaggaagttcctggaggttgatcatggctattcacttgtcaaagagcggcgtatgcagcggggcgcctgtggcggcggatatcaggtatccgccgggcgcgctggctgcacagacaggagtccgaagccgaaggctttggccggtccgacgccggccgtaagggcctttctgaacaggtcggtgtcggttacgcgcagggtgccttcgtagagggcggagcggagtcgctgagaagaggaggaggcgttcttgcggacatagacgtaaccgatgcgggggacggcgaggtcgtcgagggtcaggaagccaaggcggctttcgcggcggcggagccaggctttgaaaatgtcggtcgggttttcgtgggactgccatttcagctggaggcgtttgcgctggacgcgctggccggcggcttccttctggaggcgctgctctctggggagcgggtcgcgggttgtggggttggcgaggagacggaagcgcagatggcagccgacggggaagtccggcgagaaggcgcggacctgcgggcatgcggcgaggaggtagcgggcgttgtggaaggcgtagtcccagtcgggctggcaggcggagagcacgaggatggcggcgcgggcgggggggagggggtcgatgcggaagaggaagccgtgccggtcgtcgcggggtgcatggacgtggcggaggagttgggggtcgagcgcggaggccgggcggtcggcgaggtgatggtcttcggggaagtcttcgggggaatagggtttgaggaaatgggggtcgtcgagtttgcggttgtgcgaggggaaggccatgcacaggcgctggtggacacggtagaggtttctgagccagaggcgcccgggtcgcgggcggtcggggttggttccgagatctataaggagcgttgagagatacatggtcagacctcctcgggttcgagacgacggcggcgtgtttcaagggaccggaaggcgattatttccttgcgtttgcggatgatgaggtcgcgccagcgtgggtcttcggggtttatgcggtcgaggcccatgttgtagccgtattcgatcatggttacggcgtcgtggcagaggcggcagagggagcggagatcatcgatggtttcgttgccgccggcgcggcggtaggtgatgtgctggacggtggcagcgggggctttgcagaagacgcagaggccgtggtcggctttgaggcgttcctcgcggcgttgctgatactcggagttggtatagtcggcgcgagggcgcgggggagccggagcaggcgtctgaagcgggtcggggtgaacggggacatcgcgtgcgtcgccgacggacaggtcggtagggatgacgaaacggggcagatgggccggcatgtcgaacgactgggcaacgtcgtaccagacttcggcgtctgaaggggcaggctggccggacttatccgggcgccattcgatgagggattgcaggactgcggggggttgttcatcgcggaggcgtctgcgccacggtatggcgcggagggcgtggaggaggtcggggaaatcaccgcaatccggctcggcgggatcgcggcgtccgacgaggggaagcgatggcgggcagtttttccggccgagatagggcggccagacgggatggagcagggcgttatggaaggtagcgatgaggtcgggaggggcctgaagagcgacgaggaagctggcgtcgcagaggtgttcgcggcgtgtgggcagagggtcttcgcggagtttgccttcggcggtgcgcatgcggagatgcgcgccggtggtgtgatagtcccaccagcggaagccggggcggtcgatgcggacggccatgcggacagcatcgttgaaatgcggcagatgctggcgggcatcctgacgggagatgcccatggcggcgcagagtatgcccatgacgccggatttcgtgggcgcgtgccaggttttgcggacgacgaaacgggagtggtgatcgccccatgcctgcatggggccctcaagacggagaaagagggtattgtgtgtcatggctgcacctcggtgagctgcgggagtgccttctgaacgtcattccagtcgaagccgataacgccgacgaaggcgctgacgagcttatcgagcgtggggatgttttcgtcggcgagcggcgtttcggagccatcgcgctggacgacgagcgggtagcgcagattgggcgagaaccacaggcgtttgtggggccggccatatgcgacgtcgaggtcgttggcgtactgggcgagctgggcgatgctctgagctatgatgttgcgtcctctgtcgggggtgacgggatcggcgaaggcgttggcgtagctgatggggacatcgcggaaatcgatgagtatgccatccggagggttgtgcgcggcgaagctgttctgcttgccggtgggggtggtgagggcggcggcgcggaggaaggcgccgacggtgtgggcggccagcggagcattatccttgaggttgcgtttgagctgttcccagtcgatggagaagtacttgtagaaacaggcagaggcgaacagggcctcatcgacgtaaccggcgccggcgtcggttccgggaatgtcgtctttggcgacgtagtaatccacctccggatgggcttcgtgggtggagatggcatgggcaacctggagagcggcttcgacggtggtgttggccatttcgccggtttcgagcattctgccgctgagagccatatcgggcacatgaacgagggattcgatgagggtgcggcagcgggcgaccagagcgtcggagtcggtggttgcggctttcagttcggcggcgatcctgtcgatggcttcgtgagtcgtgtacacgagcatatcgctgcggccgtcgtcatcgcaggcgatcccgagcttggcaaggatctgtacggcgcgcttgcggagggtggcactgccgtcgatacggtcggcaatcagtctggccagttgacgtgtgcggacgcccttgcagagatgtttgaattgctcgctggtgcggatgctgcgcttgatgcattgactggaaatgcgcaggcgcagcactccgccgaagtagcatgttttgggcgaaccgatgtcgtcacgattgaggtttgccggactgtggttctgaatgaagtgcatgtcgatccgcatgagcgtctcccatgaagtgagccaggtcaaggccgaaccgtgcgatgatgaaccgtaacggtggaagcgaaccagcctcccattcgcgctagccccgaggactgcacactaagctggtccagttcgccccgga

SEQ ID NO: 844 - DNA, 4856 bp, Artificial Sequence
  Synthetic Oligonucleotide
aggttccaaaaaccagcgagtcagctcgcctcgcaaccctggggggacgcgctcaagaatcaggaccaccatcgccgggctccgtttcaccgatttcgggggctagcaggcggccgccttcgacctctccttccagattgtcccagaggaagccgggggcggcggcatccaggtcgaaggtagtgtcccaggccgtcgcttttgccagcatcaacgccctttggacatccgggatgattctctccagaagccgcgtggatacgaactgatcgcggcaggtgatgcgcacccggcgttccaactgtcccgtcccctcggcggcggcgcgaaatgccactggaacggtaatttcagccttgtacaggtcggcgagatcgtagacgaaggacagcatcttgccggtgtggataaacccgagtgcgggcgaaaaacctgctgacacgatggcagcatggcagattccatataggcaggagttagcggcggacaaggctcggttggcagggtccgccttgctccactcatcgcgtttatagctgcggcccgaccacgtgatgccggcttcctgggcggccttggcgtaggcatcgcgcacccgcacgccctccatgccgcggatttgctggagggtcagggcagggtcgaacttctccgaaaatcgcaactgatagaggcggcgcaccacctgcatatggaaaccctggtccgcccacagcctcgcctgatgcaggaagttggccgcgttgcgcgtctcgcccatgcccacggcgtagaagcggactccctcctccccgcaccaagccaccaggcacccatggtccgccaacacggagatggcggcgtgagtaatcgagacgcccggacccaacatcaggagagccagattggcacaggggaccggcaccttcccggcttgatcgtggacggcaatggcccgctcttcctgatcgacgtggcaatgctcgacgtacagataactccacccgtcactgaacttgggtagaacgtggagatcttgaattctcacagagcctccagcccgtgctgtagcgtcgatctccgatcgacggcggttgtagcgtcgatctccgatcgaccggggttgtagtcgatctccgatcgacgttacggcggtcggagaccgccgctacaaaaccaggcgatggatctcaccctggtacggccaatcttccgggcgcttgactaaaccggcccggaccggattctgccggacatattcatatttctcccgataggattcttgcgatctcaggacgtgatcgaaaaagtctttctcccaatgtgtgccctcgccctcatcttcccggaggactttggataaatccccgcgcagcgccttgatccatttccctaaaggtggggactcacgacaaaagccggcgaaaagatggatgtgatcaggcatgatcatgaagaacccgacccaaacaagaaaatcgctcgcccgttcggagaatctcgtgaattcccggtgaatcgcaggatttgccaacgagcgtttgcggtcctgcgtacacagcgtgagatagtagattgggctgcccgtatagagccagtccagtcgccgcaagcggggtttgaatttcatattggctcgatctccgctcaagaaatgttgcacggatccccgatcgacaagggattgtagcgtcgatctccgatcgacgtaccggcggtcggagaccgccgctacagcgagagcggcgccacggaaagcaggccgaagccgaaggctttgccgtgcccaacgccgcccacgatggtttctctgaagctgtccgcgtcctcaaccgtaagcgtcccctccaataacgccgagcgaaatttcatgcggccgcccgtcggcctcgggtcggatcggtctcctgcgccccacccgatctgcaagacccggaaagtttccacttggaatccaccttggccgcccttgccggcgaaccattttcgtatcacatcgtcgcggttctggtccttgtcccaggtcagcgccacgcgtttgccttgggccttcgggcggccccgcttatctgtcccctctcgcgtcctcgtaagatcaacgccctctgtgctggtttttatcttcttactcagattggcgcggatacggaagcgaagccgctgacccttctcaaagcgggggtcgaattcctgcacctgagggggagcggctagaggattcagaagaaaacgggcgttgtggaaggcgtagccccagtcaggctttacggcagagttagactggacgaggatcacgacccgcccgcccggttgcgggtcgatgcggaagagaaagccggagtcgccgtcacgtcttacatggacctggttgttggcaaagtccgcgggtttgaaaggcttgaggaagtggggatcgtgggatattcggtctttggatggaaacgccatgcaaaggcgctggtggacgtgatggaggtttcgcagccagagccgcccgggcctggggcggtcggggttggtgccgacgtcaatcaagaggcaggagaggtacatggctattccacctcctcagcggcaaggcgtctgcggcgagtctccagagagcggaacctgataatctcttcccgcttctcgatgatcttgtcgcgccaacggggctcttcggggttgatgcggtccaagcccattccgagcccgtactcgatcatggtcacggcgtcgtggcagaggcggcagagggagcgcaaatcgtcccggagttcgccgccgcccgcgcggcggtacgtgatgtgctgcacggtgctggcgggagacttgcaaaaaacgcacaagtgatagtcgtcgtcgagccgctccttgcgtcggtttttgtactctgtgttcgtgtaatccgctcttgggcgcggaggcggtggcgtgtcgctctgcggtggctgcaccgcaagtgttacgtcgccgtccgctccgacgcgcaactgcctgcggatgacgaatcggggttggtgcgacggcggctcgaatgtcaacggcacgtcgtaccagacgagcgcatcatcgggcgcctcgggctgctcgttggtgggttcccaatcaagcaggcaatcgacgggtcgcggctggggatcgtccttcagccgccgacgccaggggaccgattcgagggcagaaagcaagtcggggaattcacctcccggatgctccagcagagggcggcaaggggggcagcactttctgccgaggtagagtgtccacttgggcgctttgattgccgcctccagttcctcaatgaggtccggttcgccctgaagagcgacgagaaacgaggcgtcgcaaaggtattcgcggcgggtgagcatggctccggacttggttcccccctcggcggtacgcatcggcatccccgcacccaccgtgtgataatcccaccagcggacccctggcgcatcgacgcgtacgcccatgcgcagccgggccagccttggaagccagccttcgcgggcctctggccgggaaacgcccaatgccgcgcaaagcatcccgatgacgccggacttggtcggcgcctcggccgtgcgccgaatgacgaacttggattgctgatcgccccatgcctgaagaggaccttcaagccgaagtagcagcgtctttgcgctcatggggcacctccggattcaggaccactttcttggcctcctgccagtcgtaaccgatttccttgagtacagccgctatcagttcgtcaagagacttaacatctttgtcggcaagcgggacctcacgctgtttctgttttccgtcttcgctctccgtggtggtagccgtcaacggatagcggagatttggagagaaccagaaccgcttcgtcggcttgccgtatcccgtatctatgtcgttcacataatgggcaagctgcgccacgctctgcgagatgatgtcccgttcgccctgaggagccgccggtttggcgaaggcgttggcgtagctgatgggagtgtttctgacttccaccaacatcccgtcaggagggttgtgcgcggcaaaactattttgttttcccgtggggttggccaaggccgcggcgcgaatgaaggcgccgacggtatgggccgccagtttttcgtgattcgtcccgaagggcttcaggtttttgaccagcgtttcccaatgaatggagaaatacttgtagaaacatgccgaaccgaacatggcttcatccacgtaacctgcgcccgcgtcctcgccggggacatcatcggcggcgacatagtagtccacctcgggccgggcctcatgggtggaaatggcatgggcgacttgaagcgatgcctcaaccgtcgtgtctttgaggactcccgtttcaagcatcctgccgctcagcgccatgtccggcacggcgacggattcactgatgagcttgccgaactccgctgccaaggcctcgtccgtttttccgtcgccctgctggaggagttcggccatgcgtgtaatcgcctcttgggtggtgtaaaccagcatcttgctcctctcagcactttcctgttcgtcttctccttcctgtttttttgctttcttaggctccagcccgcaggctttgagaatgttctccgctcgcttcctgacgtctttgcccgtcaccttttccgcaatctctttcgccaactggcgggtgcgaactccgcccagcaattgtctgaactcctcactcatgcggatgctgcgcttaaggcactggctggaaatacgggagcgcaagactccgccaaaaaagcaagtcttgggcgcgcccaggtcatcccggttcaggttggccgggctgtgattctgaatggcgtgaatctggatcaacatgactctcctcctcttggacagttcaaaaa

SEQ ID NO: 845 - DNA, 4835 bp, Artificial Sequence
  Synthetic Oligonucleotide
acgcttccccccgcgctgtgccataatcttaacatggaggttcacccccacgtgcgtggggacgctgccatcttcgattgggtgaagttgaaggtagccggttcacccccacgtgcgtggggacgctcgaggattgccttactgaagcagaccacaatccggttcacccccacgtgcgtggggacgctccagcaccccgtctccaccggcgccggccagccggttcacccccacgtgcgtggggacgctgatggcctgagtgttggaaagaacatcgccaaggggttcacccccacgtgcgtggggacgctctccgccgccgccgctagttctttttccgtcaccggttcacccccacgtgcgtggggacgctgaagacgagctggttgagggtcgtggtcacaacggttcacccccacgtgcgtggggacgctggctggcgattgagggcgtgggcgcgctggaacggttcacccccacgtgcgtggggacgctttcctggccagaaccagggatctgctcagcgacggttcacccccacgtgcgtggggacgcttatggcaagggatatcagcacctctatgataccggttcacccccacgtgcgtggggacgcttcggcgtcatccgcatggacaccaacttctcgccggttcacccccacgtgcgtggggacgcttggaatatctgcagatccttcctggccggcggcggttcacccccacgtgcgtggggacgctgttctcgtggacggcccgcaggcgttgcgtcagaggttcacccccacgtgcgtggggacgctcggcgcatggatcagcaaccatccatctatgtcggttcacccccacgtgcgtggggacgcttgtgatctggcgaacacgagtgcgtctccggccggttcacccccacgtgcgtggggacgctttttttggctcccgctctcagccattcaggctcggttcacccccacgtgcgtggggacgctaccagatcgaagtggcacaggctcacgatgttcggttcacccccacgtgcgtggggacgctagtttgcccgattctatgtatgcggtcctcggcggttcacccccacgtgcgtggggacgctttggcccgagggggagcagcttctgctgcgctacggttcacccccacgtgcgtggggacgctcacgggcttgtccacgcccattcgcccgcgccgggttcacccccacgtgcgtggggacgctgcgggtggtttaatgcgactcaaagcgcccgccggttcacccccacgtgcgtggggacgctactgaataaacctgaatttacggcaccctgacgagaaatagcccctcgaagtcttcgaccgaccgcgccgattttccccaactccgaatccgaaaaccctgctcattgtcgctcgaatacatcatcacacaaccgcccctcctggcattcccgcaggctttttcccagagtttatcgcgcaccatggctgaaaccctccccacaaaaactcctgtcttcggttccagaaaccaccgtgtcaattcaccccgtaacccaggcggcacacgctcaagaatcagaaccaccatcgttggcctccgtttcatcagtttccaacggataggtgcacccgccctctacttctcccgtcaaggggtcccacaaagcgcctggggcggcggcgtcctggccgaatgggtcatcacttgtcgcgcctttctttggcaacatcagcgctttttggatgtcaggaatgatcctctccagaagccttgttgacacaaacaggtcacggcacgagatgcgcacatgtcgttccagcctggcctgctcttgcgctgctgcgcgaaatgccgctgggatagaaatttccgccttgtaaagatcggcgacatcataaacgaaggacagcattttgccggtatggatgaagccgagcgcgggcgagaatcccgccgaagtaacagccgcatggcaaatgccgtaaagacacgaattggccgccgacaaggccctgttcaccgggtccgcatgggcccacttgtcacgccggtagctgcggcccgcccaaggcacgccggtttccctggcggcccgggcataggcatcccggacacggacgccttccattccgcggatctggcgcagggtcagcttcggatcgaacgtctcggcaaaccgcaactggtacaaacggtgcaccaccttcaaacgaagatccgcatccgcccaagcccgcgcctgatgcaggaagttcgccgcgctccgcgtctcgcccatgcccgccgcatagaaccggactccctcttcgccgcaccagatgaccaggcaaccatggtccgccaacacggaaatggcggcatgcgtaatcgatacgcccggccccagcatgagcagcgccagattcgcacaggggacaggcaccttgccggatgcatcgtggatggcaatggcccggacttcctggtcgacgcggcaatgctcgacgtagagatagctccagccgtccctgaacttgggcagaatctgcaggtcccggactctcatgtcgcctcgtccgagcccgcagtattggccggcgcgatcgaaagcaggccgaacccgaaggatttgccggaaccgatgccgcggataagggtctgccgaaaggcatccgggtccgtgacctggaggaggccttcgaaaagaaccgaacgcagacgctgccccttgccgtttttgttcatatagacgaaccccggctgaagggtcgtggcgtcttcctcgatatggaatcctgccgattcggcccggcgggcaagccagtcgacaagccggttggtcggaacgggaacgcgctttccgatagattcttcttttgcatccggtgaatgcttgcacagacgtctggtcggatttgccgcgaggcggaaccgaaggcaccggccttccgagaagcgtgggtcgaatggtttcacctcagggggcgctgccagcagataatccgcattgtgaaaggcatagcaccagtcgggctctatggcagactgcacgatgattaccgccctgccgccgcggagaggttcgatgaggaaaagaaatcccgagcccacggcacgcttcacatggacttggcctttaccaaactcatccggtttgaacggttggaggaagtccctatcttcggccttccgggacgcggacggaaaggccatacaaaggcgctggtggacatgatagcggttcctcagccacgaccgcccgggccgaggccggtcggggttgccgcctacgtcgatcaatagacaggaccggtacatggctattccacctcctcggcggcaagacgccgacggcgggtctccagcgagcgaaattcaacgatctcggcccgcttttgaatgatcggcttgcgccagcggggctcctcaggattgatgcggtccagccccatgccgaggccgtattcgagcatggtgacggcgtcatggcacaggcggcaaagcgaacgcaggtcctccagggtttcgtctccgccggcccttcggtaggtgatgtgctggacggtgtttgccggggctttacagaagacacagaggccgtggtcacgctgaaggcggcgcggcctcatgcctttgggaaccttgcgagacggatcggcggggtcggcaatcagggtctcgcttttccattcagcgttgttgtagttcgcgtgcggacgggggggacgcggcacacgctcttgcgtggcaccgtcggtggacacaccgttcgctccgctggtgagttcggtgcgcgtgactaaacgcggatgatgtaccggaggatcgaacgcgacgggcgcgtcgtaccagacttcggcatcattgggggcttccggctcggtgtccgtcgcccgccattcgaggatacaggcgagcttatcaggcttcttgtcaggctcaaagttgggcaggcgcggttgccagggaacacacttgagggcatcaagcagggacctgcccgtttcgatatgcggctcgcaggtgccgtcctcgcgctttcgcgtcacgaggatcggcacgctcggcgggcaggacttgcggccgaggaaaaccggccacttcggcgacgcaatcgccgcggcaaggtcatggatcaacttcgcatcaccctggagcgccacgagaaagctcgcgtcggccaggtactcccggcgcgtgatgagcgtgccctgggcgccggtcttcacttcgttcccagcggttgtcatgccgattcccgctcctaccgtctgataatcccaccaccgtgtgccgtgccggtcgatgcgcacacccatcgcaagcccgttcaactccggcaggcgttcccgcgccttctcacgcgacaggcccatggcgcagcagagcaggcccagcaccccggacttggtcggggcatccatggtccgccggatgacgaacttcgacgtgtcgccccaggcctggagggggccttccaggcggaggaagattgtgttggcgtcggtcatttcgccgcctccgcaggcgccccggttgccccgagcttgtccatgaccttatggatgaactgatcgaactcgccgaactcgtcggaaccgaccacggattgttcttgctcgtgttccttctggcttttgtcgatccaggtcaggcgatggcgcagattcggcgagaaccagaaacgatcggcctcgatgccgtaaggcagtgtaaataaataaaggtatcaatgtgcctatcgcgattggggtcggatggtgtaattccagtctccgtggaacttgtcgcgctgcagattcacgcactgcatttccgcgtccgttaccttgcggccggtcgggtacttgcggcggtccaga

SEQ ID NO: 846 - DNA, 4830 bp, Artificial Sequence
  Synthetic Oligonucleotide
gaatcaacgcgctcccaagcgtgaagtggcttggttgatcgccaaactttttgctgaattccgctttgaacagcgcgagggagccacattgcccattcttatgggaggcatctgccggaagttggaacccaaaaaggaattaccccgtgtattggcacgctttgatcaactcgcatcgcttgacattatgcagatggaagagccgctgtcggtcattatgggtatcttgcgcaagcaccagcaggtctgcctggactgggtagggcttactgatgttctgtcattttgggagcaggaacctgtcaaaagagaatggtcggattcatttattaaagcatacaagatcaacaaggaggattcagatgttgattgaaattcatatgattcagaatcacagcccggcaaatcttaaccgggacgacttgggcgcccccaagacctgttatttcggtggagtattacgttctcgcatctccagccaatgcatcaagcgcagcatccgttttgccccggaattcgcggaccttagaggaggtatccgaacaaggcgtctggcagagaaacttgaagaaatgctggaaaacaaagataagaagctggttgccaagtttcttgaagcctgcggaatcaaaaccaaatcttccaagaaagctgcaaaaaagtccgaaaagatacccgcggaagccgatgaagatcaggatgagcagcaggcggctgatacatctgacatgctggtttttaccacttatgatgccctgcgccaaatggcagagctgctttccgactccaaactaagtgaaagcgaaaaactgctgcagttcaaagatttgctcacaaactgcgtccattctccggatatagcactttgcggcaggatgttggagaccaaagagcttaaaaacactggcgttgaaggcgccctacaggttgcacatgcgatctccacccacattgccagacctgagatagactattttgtggcggccgatgatgttcccggtgaagacgccggggcgggtcatattggcgaatccatgtttgcctcagcctgtttctacaaatacttctccattgattgggaacagttggtcaagaacctgaaaggggacacgaatctggcagcccacaccgtgggtgcctttctcctcgctgctgccaaaaccaaccccagtggcaaacagaacagcttcgccgctcataactatcccgatggcatccttgttgagttcaagaattcccctattagctacgccaacgcattcgtcaggccagtttccgtggtcaaggaatcggacctggtggaacaaagcatcggccagctttccaactacgtgaacgacatcaggcttggctattatgatgagcaatccccagttatcagcttctggttttctccaaacaatcgctatccccttggctataagcattccaaactggcttccaggaacattggcaacctcaatgagcttgtaggcgctgtgttggattatattggcggcttcaagtgggaagaagttcagaaaagcaaggcttatattggcggctaacatgagtgcgccacccaacaccttattcttgcgcttggagggggctttgcagtcctggggcagcaacgaggctaagtttgctttgcgcagaactgccgacgctcccacaaaatcaggtgtcctggggctgctttgtgcggccatgggaattgggcgcgcggaggctgctgattcatggctcccaaaactcgccaacctgcgcatgggcgtgcggatagaccgccccggcatacgctggtgggacttccatactgttggagcgggacaaagaatgcgcatggcagagctgaaggcacccaaaaaaccttccatggttggagctgccctggctgaaaccctgacaccaagcaaagtaaaaaccagggcagagaccttgctctcacgccgcgaatatcttgccgacgccagttttctggtcgccttgcagggtgagccggaacttgtggcaaagctctccgccgctctggccaagccggtctggacaatttatctggggcgcaaatcctgtcccccttcacatcccgtgggcgagcatgctccgggcttttacaacactttggaggaggcgctgtccgcggttcccctgcaaaagcgctggcacaatgaacccctgccgcaaatactgccttgcgtcatggactggatccccagccaggacggagaacatgcgcctgatgacgcggagattcattacgatctgccggtttcttttcagccgccccgccatttgccgcgcttcgtgatcaggcgtgagctggttgtgggagaggatgtgcaagtgagcagggaaaccggaaccagcgtttggaggcccaaaggaacccgggcggattataacaattccgagtataagaaggtcagggcggagcggcttgtgatggaccatgccgcgtgcatggtatgcaaagctcccgccacgactgttcaacacgtgaattaccgcagggcgggaggcaaggaaataccggaagacctgcgggcgctgtgccgcctctgccacgacgcctgcaccatgctggaatacggttccggcatgaccaccgaccgcatcgacccctgcgaccccatctggcgggagcgaatactggcaaagcgcaaagaaatagtcgagttccgttcgcgcgggcagcgtttccgcaaaatgaagccagaggaggaaaacggatgatctacttgtccaagctattgatcgatactggaggcaatccagaccgtccccgccccggcagaaagtggctggacaatatctataacgtccaccgccgactttccatggcgttcccttcaggtttgcgccgggagcaggatccgcatttcctgaagcccttttcgccaaacgacttccaaaaaactcccttccttttccgggtcgataacaacatcgacggaaatgataaaagggcgattattatcgtccagtccgttcttgagccggattgggattattgcttccaaaacgcgtttgatttcctggccgcgccgccggaaacaaaggagtataatccagagtttcaagcgggacaactgctccggttcaggctgcgggtaaacgccagcgtacgccgttatattcctgagaaggtgcaacaggacggtcaaaccatagaaactggcaacatcctgcacaaaagggtttctctcacctgggatccctcttccaccccggatcaggcccttgccgactggctggctgccaaaagcccaaagctgggcttcacccttaagcgctgtgagcttcttcaactgggttgggtttatggctccaagcctgaacccaaaaatgtcaaagcaaaggaacaggggcagggatactggcgtgaacacacatacaatcctctgcgcttccgttcggctctactggagggaattctcaaagtggatgacccgaaactgtttctggaaacgcttagcagcggcattggaaaagcgaaaagcttcggctttggcctgctgtccgttctgccaatcaggaatgatggttaaagacctgcactctatcccccggatcagagatcggcttagctatctctatgtggagcatgccaaaattgatcagaacgggcaagccatcgccattcacgatgccctgggagaaaccccggttccttgtgccggcttggctatgctgatgctgggaccgggcataaccatcacccatgcggcaatactttcactggctgcctgtggctgtctggtagcctgggtgggggaacatggcgtcaggttctatgccgcaggcacaggtacaacccgtagcgccgtcaatcttatgaaacaggcaaagtactgggcagacccggttttgcatttacgggttgtgcgctccatgtatcagttgaggttccaggatgagctttctcctgatttaactttgaaccagatcaggggcaaggaaggtgcccgggtgcgcgatacctatttccaactctcccaaaagtatggtgtgcccatgcagggcagaaactatcaaagagacaactggaataaagcggatcccataaaccgggcattatctgtggcaaactcctgcctctacggcatatcgcacgctgccattgttgctgcaggattctctcccggattgggctttgtccacactggcaagcaactgtcatttgtctatgatatcgcggatctatacaaaatggaaatggctgctcccgccgcattccgggcgaccgctgaagggatcggcgaactcgaccgcagagtcaggcttgcctgccgtgatgaattccacaggcagaatctactcaaacgcattgtcgcggatattagttctctcttcggtgatattatgccagaggatagcctggatgactgttttgccgaagaaccagcattgcctggaggactctggtctccagatggagaagtttccccaggcggcatatcttacgggcaggatgatctgccaaaggaagattgatggtggttttagtattggaaaatgtgccaagctccctgaggggtaagatcacacgttggctgctggaagtaaaagccggggtgtttgtgggtaaagtctcagcaatggttagagataaactgtgggataaggttagaagcaattgcaacggtggaacttgcctgatgatctggagtagtcagaccgagcaagggtttgatatcgaattctggggtgccgcatcaagagtcgttacggaatgggagggtatcaaacttatgaccaagcatccttaaactaaggcttgaaggtgttcaatgacctcttagacctctattgatcaagtgtattccccatgcatgtgggggtgaaccg

SEQ ID NO: 847 - DNA, 4820 bp, Artificial Sequence
  Synthetic Oligonucleotide
ggaaatccagttgcgtacagaggccattaccagcgcgcacggttcgccggacttgaaacgggcgcttcaaggtcctgtgcgcgatgtggtgatatcttccactgccgggtcacctctgcggaggcgggaagcgatggatcgcgcgaattccgaattgtcggcgatgttgcggaagctggccgtgaagccacagaaggaggccgcggcgtgagtaccaccgaagcgttcatcaatcgcctggcagacctcaaggacggcgagcgatcgcgcctgcgccgactcgccggtcagccgttggacaaaacgctcgagggctttgaccttttcactggcctgtggtggccgctgcgacaaggcagcccgcaagctccgcgacgcgaaacgagctggctgatcgccaggctctatggagagtttggctcatcggtgccgcacgttcggcccgagaatggccgcgggccggaccttcccgcagtcctgggccgctgcgaaccgcaggatccgcctgagttcagggcacgcaaccgcttccgcacacgttttgacacgctgctttgctcatccctggccaacatcgagacgcccctgcgctgggcgctggaccagatcgcccgcgccgtcgccgggcgcacgccctgcgcgcgtggcgtgacggggatcgactgggctgaactgttggatgacctgtccatctgggaccgcggcgaagagcaccgcggcgatcgcgacattcgcgacatctgggcggagcagtatctgaacgcaacgaaccatcaaccgcaaggagccggccatgctgattgagtttcacatgatccagaaccacagcccgtcaaacctcaaccgcgacgatctgggcgcgcccaagacgtgcatcttcggcggagtcacccgcgcccgcatctccagccagtgcctcaagcggagcatccggcgcagcccggagttcgcagcggcgctggtgaaagatcacgcggtgcgcacgcggaggctgatcgaggagattgcgaaagccgcggctggcaacggtaatccaccgcaggaaaaacatctcaaggccatccgcaaggtctttgaggagggcggcgtggggctggacaagaacgacgtatacaggtccgacatcctcttcttcctgcctcagtccgccatcgacgagatgggcaaggccgtcagcgatggggaaagcaatcttggcgcgaaatttgcggaaatcatgggcaagttcgtccagactcccgacatcgccctgtgcggacgaatgacggaattcagcgccaagggcccttttgagagtctcaagggcaagttcaccgtcgaagccgccctttcggtcgcccacgccatttctacacacgccgttatcaacgaagtggattacttcaccgcggcggatgatattcccggcccggacgccggtgcagggcatgtgaacgagggcgtgttcaactcggcatgcttctacaagcactttgccattggctgggaccagcttgtgcgcaatctcaacggggacgttgaccttgccaaaacgacggtcaagtgttttatcgaggctgctgccagggcgaacccttccggcaagcagcatgcgtacgctgcgttcaacctgcccgatggcattctcgtcgagatcaagaccgactcttccacgccggtcagctacgccaacgccttcgccgacccggtttcggagaaggcccaacgcggcctgattggcgagagcatcgcccgacttgggcagtacgttcacgacatcacaaatggatacggaatcaaggcccggcgattctggttctcgccgtcgaaccgtcacgcactgacgtatgtccaagacaagaaggagaagcccgtcatcgatggcgacggaagcatagggagcttcgacgatttcgtgaagcgtgtgatggacgccgtgaccgcttacaagcctgctggagccgcataatgaattccggcaacaacacgctctttcttcgtctggaaggtccgctccagtcctggggcgatacgtccaagttcgtcatccgccgaagcatggaggcgccgaccaagtctggcgtgctggggctgctctgctgcgcgatgggactgtcgcgccgggcggcgcgcgagaagctgccggagttgaacacgctggcgatgggcgtgcgcatcgaccggcccggcacgcgctggtgggattaccacaccgtcggcgccggcaccggcatgacgacggccgggggtgggatcaagacgggagcgcaaggcaccctcatcacccgccgggaatacctcgccgatgccagctttctggtggcgctgcaaggagaaccggccctgatcgagaagcttgccgctgcgctgcgctcgcccatttggtccctgtatctggggcgtaagtcgtgtccgccatcggcgcccgtgttcacccagccgcgcaaggaccgtgatgagcagtgggccaacccgatgactgtcgaaggcgatctgagagcggcgcttcaggccgtgccgtggtatccacgatacaagcacgatgctccacgcgattcgtcgatggacgtgccttgcctgctcgagtggcgcaaggccaaggatggcgacatcgcgccggaggatgccgaggtctggtacgacgccccgttctcgttcgatccgccggtgcatcatccgcgactggtcattcgtgattcagtcaaggtgaaagtcggctgcgcgatccagcagcacaccccgcccccgccaaggccgcgggcggactacacgaacgagaagtaccgggccgcccgcacgcaacggatcgaattcgatcacggcctgtgtgtcttctgcaaggccccggccgcgacggtgcagcacgtgacctaccgacgcgccgggggcgacgaaacgcaggacgatttgcgctcgctgtgccgcctctgtcacgatgccgtgaccatgatcgaatacgggctgggaatgggcctggaccggatcaatccggaagatccgcagtggcgcgatcagatcatcgccaggcgcgagcagatcattcagttccgttccctggaaacgcgccgccgacggctggagccgcaggaagtagaataatgtacgtctcgacgcttctgatcaatgtgggagacaaccccgatcgtccgcgaccggggcggctgtggctgcgcaacctctaccgggtccaccagcggctgtgcatggcgtttccatcgtcgcagcggcggcgcgacgatccgatgttcctcaagcggtacgaaccgggcgatttcgttcccggtcacgtgcatgttccgcgaagccacacacagggcttgctctattacattgatccgaggccgggcggccgcgtcgttatcgtcgtcctctccgcgcttcgtccagactgggattacgcatttcacaatgctcggtatctcctggctgcgccgccttccgaacctcgacccctcaacgtcgacatccatcctggagccaggtttgcattcagactcctggccaatccgacgaagcgccctgcgctcagcaagcagcagcggcagcagatgaagctggcgggagagagagtcaaacgcccgcggcagcagttgacctggaggccgggtgacgacccgaaaaaggtctttgcgcagtggctacacgcccgcgccaaacgcgccggattcaaactggtggaagataagctccagattccgcgtatcggctatgtctacattcgcaagggcggcccggagcaaaagagccagcggttgcgctgcgtgctctacgagggcgtgcttgagatcacggatccggacgacttccgccgtgcgctgctggccggcatcggtccggccaaagccttcggcttcggcctgctctccattgccccggtcgaacgaacttgaagaatctgctctttgacaaccgaatatcacaaatgtgcccgcccctcaggccaatctccaggagcttccgcgcttcgacgacaagctcacctacttctacgccgagcacgccatcgtcgatcaggaagacaaggcgctggccgtccaccgggccgatggaaccatctcggtcccggtggcggcgctggcggtgctgatcctggggccgggcaccagcatcacccacgaagccgttaagaccgccgccgacaacaactgcctgctgatctgggccggcgaacacgccgtccgcttctacgcccagggcagcggcggcacccgctccagccgaaacctgctccaccaggcgcagcttctgtgcaatccgctcacgaggcttcaggtcgtcgtgcgcatgtaccgccggcgattcgacgagccgatcgatgaatccctgacgcttcagcagcttcgcggaaaggaaggcgtgcgcgtccgcgacgcctacgccaaagccgccgccgtccatggcatcgactggcacggacgaacctggaaccgcgaaaagtgggacgcctccgacccggtcaaccgcgctctctcggccgccaacgcctgcctctacggactttgccatgccgccatcctggccgcgggctattccccggccctggggttcatccacaccggcaagcagctctcgttcgtctatgacatcgccgatctgtacaaggtcgatttcatcattcccctggcgtttagcatcgcaaaacaaaaccccgcggacctggatcgggcagtgcggctggcctgccgcgatcgctttcgcgagggcaaactcaaccagcgaatcctgcccgacattgcccatgtgctggatgtgcccgtcggccaggatcagcaggacgacgcctatgccgatgacccggcgcttcctgccgactggtggactccccccggcatcggcgccga

SEQ ID NO: 848 - DNA, 4785 bp, Artificial Sequence
  Synthetic Oligonucleotide
cgagacgtccgcgatatctgggcggaacagtacctagaaactgttcatcaatccgaaaggagtgttaaccatgctgattgaaatccacatgatccaaaatcacagcccgtcaaacctgaaccgtgacgacttgggagctcccaagacatgcgtctttggcggggtcacaagggctcgcatctccagccagtgcctcaaacgcagtatccggaatccgggcaacccggacgacgagcacaatcgggagccaggaatgttcgcgaaatcgatggagggccatatcggattactgacaaaattcctgccttggctggttgaaaagggactgcaaaagctaaaggtggacgaaaatgaaattcgaggagtcgggatcaaactgcaaagcatcgccaagtctgaggagaagttaggtgcaggtaagaagaagaggcgactcgacccccgcagacagaccccacaactaattcgcatacatcctggacttgctggggaacttgctgaacgtctggtcagccttagagagtctgacgaggattcgtttcgctatttcttgaatccggctgtgagcttcagacagttggtggaagcagaactcgaggattcgcaattcaacgagaaccaacgaaagtccatcttagacaaggcttggctgatcttgaactgccgaatggaggaactcgaatccgacgcagagcagcctgaagcggtggctcaacagtcgacatatgcgctcgacgcagagagtgccaagatcatcgtgactactcttgagagtctaccggatgacaagttcaagaatatcatcagaaaacagactgatccggaaaagaagcaactaaaggatgacgctcctaaaccgcccccaggatacaaagacgctgagaagaaactgtgggccgacctgcagcacaattgcgctgacattgctctctttggccgcatgacgacatcggagttttttgaggatgtcaaagccgccctgcaggtggcgcatgcgatctccacgcatgcagcggtcaatgaggtggactatttcactgcggtggacgaccgagccagggctggcggcagggctggccacgtggatgaggccatgtacaactctgcgtgcttttacaagtatttctctctcgattgggaccagttggtgtacaaccttgcgccagagccgaagaagcctgaagacaagaaggacgatagtcaggaaataaagaactgggaggaagagcacaagaactgggctgacaaactcaagccgaatgcggtgaagctcgccgcttgcacgctaggccacttcttgcgtgctgctgctcgtaccacgcctagcggtaaacaaaacagctttgcctcccattgcgaaccgtgcggcatcttggtggaaatcaagaagaacggaaagattcccacgagttatgccaacgccttcgcggaccccgcaggcaagatcggcgatccgccggacgacaacgccgattgcgagagtctggtggggcgaagtatcgcccagtttggcgaccatgtctacaacgtgcgcaatgcctacggcatcgagtcgactcttttctggcatgctttgcctctttaccgctatccgcttcagggctgggaacgtgaagctgacggtcgcaaggcgaaagtgcgagatgagaatggcgaagaaaccaaaaaggacaaaccggctgttcagttcgcaacaaagtgtttgcgtggcctcggcggcgaagatggaaagccggaaggcctggttgaagcagtgatcgaggcccttgatctcggtttcaaatgggccgacgtgaaagatcctggagagtccgctgcaaaggagtcgtgactatgatcgctgcccttaataccatcttcctacgtctggaagggccgcttcaagcatggggcgacacttccaagattgtgattcgccgaaccatggaagctcccaccaaatccggcgtcttgggtatcatctgctgcgcgatgggactgtcgcggaaggcagcgcgtgagcgtttgccggatttgaagaagttggcgatgggcgtgcgcatcgaccggacaggtattcgatggtgggattatcacaccgtaggtgccaaggtgggattgctaaaagccgaaggaggaatcaaacgcacggggggagcaaaaggcccgattgaaacgctcatcagccgcagggagtacctttgcgacgctagttttctcgtggcgctaaaaggcgattcagacttaatccaggaggtctccacagcgcttcagaaccccaagtggccgctttttctcggccgtaagtcgtgcccgcctgccgtaccgataggatggaaagctgataatggcaagtgtgctgcagacacggatcgatttgacagtctcgagcaggcgttaaagtcgcggccttggcgtccccgatttaagagtgacgctcctcgtgacgacaaaggaattccatcgaagacgaaacagctggattgtataatcgaatggcagccgcgcaatggcgtgatcgctcctgcggaggcagaggtctggtacgatttaccagcctccttcgatccaccagtgcatgaaccacgactggtgctgcggctggaaggagaccggcgcatcgaagtacgagtcgacaggccactccagcatcatacgtcccctccgcctcgcccgagagcagactaccaaaataaggaattcaggaaacgccgcaaacaaaggttggaatctgaccaaggcctctgcgttttttgcaagtctcccgccacgaccatgcaacatgtcacgtatcgacgtgccggcggcaatgaagagcaggacgatctgcgctcgctctgtcgactctgtcacgacgctgtgaccatgatcgagtacggcctgggaatgggcctggatcgcattgacccctgcgattcccgttggcgcgagcaaatcatcagaaagagggctgagatcattgagtttcggtcgttggaaacccgacgccgtcgcctcagcccagaggaggtggaatgatgtatctttccacgctgctaatcaatgttggtagtaaccctgaccgccctcgccctgggcgcctgtggctgcggaaccgctatcgcgttcatcagcgccttgcgatggcctttccgtcagatccacgaaaaggtcgcgatccagaattccttttgccttacgatttcaaagactttcccgaacagcgccacttggccgacccatttgattacctgtcggaaaaaccgaggacggagcttgattccgatttgctggccgacgtccacaccccacgcagtgcgggcaccgggtttctctttcgcgtcgaccctctccctggtggacgggcggtgattctcgtcctttcccatagaaagcccgattggcgctacgcgttcggcctgattcccggccaaatcaattcgcggccgaaatctcccatcggaaacgctgggtatctattggcagcaatgcctgacgagccacgccctctcaaggtcgcgctgaatctgggtgaaaggtttcgcttccgtctgacagcgaatccaaccaagaaaaagggcacgatcctcaagaccgaacgcctggcgatgaatgagcgcgggacgaaagacccgaagagacatggatgccgcgtaccggtgcgccccgaggaatacgagcactggcttgtctctagaagcgatacgcatggctttcggcttgtagaacctctcaaagatactcttcatatcgaagccggatatgtgtacgtcaacaagactctcgattccggcaaagggcagcgactaagaagcttgagctacgacgggcttctggaaatctgcgaccccacccgttgccgcgaggctctgcaatctggtatcgggccggccaaggctttcggatttggtcttctctcgatagcgcccgttagaccctgacttcagggaggggggatatgagaattcaagatctgcacatcttgcccaagttccgggactgttggagctacttatatgtggagcactgtgtgattgaacagcaggacaaagccatcgccattatagacgcccgcggtaaagtgcccgtgccgtgcgccactctgtgtttgctgatgctgggaccggggacgaagatcactcacgctgctgtaaccgctctggcggacaatggatgtctggtctattggtgcggcgaagaaggggtccgattctacgcatacggtcacggaaagacccgaaatgcggataatctcatgcaccaggcgaaactatggggcgacccccgcttacggttggaagtagtgatgaggctctaccggatgcggttcgaggaaaccctggacgagtctctgaccttggcgcaaatccgcggaaaagaaggggtcagagtcagagaagcctacgcgcgtgccagccgagaaacaggggtggaatggaaaggccgctcttacgataggagttcctggtctgacgctgacccggtgaatcgagcgctctcggccgcgaatagctgcttatacggcctgtgtcaggcggcaattctggcgctggggctgtctccggccctcggcttcgtccacaccgggaagatgctctcctttgtttacgatgtggccgatctgtacaaagtcgacgtgtcgattcccgtggcctttcggagcgtgctcgaaggctcggaacatctggaaagccgagcccgccgggcttgtcgtgatgcgttcaaggaacgccaaatgctcaaaaagacggttacggacattcagttcgcactgggcctgcaaacggacaagcggaccgatcagtgctcgctatttgattctgacgc

SEQ ID NO: 849 - DNA, 4699 bp, Artificial Sequence
  Synthetic Oligonucleotide
ccgtcgcgtcggcatcagggaggcgctcacgcaggcgggccatatccgacagatagcggcgagtaatccaatggaccgcgtggcaatcctgcggttcctgctggcattgctgtattggtgtaaagggaatccgccagaggtttcgaacggacgccttggcgagtcgtttccctcgcattggttctccaagctcgatgagaacagagattgcttcaacctgctcggcgaagggaagcggttctatcagtggcgtaaacgcagcgacacatgcgtcaccgccaactatctcatccatgaaatacctaccggcactaacatctggcacttccggcattccaccgacaaagtggatggcttgtgtcgcacatgttgcgccatgggattgttgcgactgccgcttttcactaccggcgggggagccggcgagacccgtgaagaggataagtcccctggcatcaatgcaaagcctcctatctacgttgtaccccaggctgagtcgcttgccgcaacactgaaattgtcgtggcgacaagcctcaaacttgggaactccaacatgggagaagccagatacaccgctgccgaagatgggagaggtttctttgctgttgggactgacatggctccctaggcgcgtctggttggacgacccagatgaacgcgaaggcaactgcatctcgtgcggacgaaaggaacgcctgatccggcaggctgtgttcaggggcctcggaagcacgaaaacggatcagattcgagtctggagcgatccgcatgcgatatatgagaagagcaagaaaggtgacgtcacatccctccgtgctgcagatgccattggtacgtccgatgttggatcggggcaatgggcaaaagtgattgccgggatcctgcgggaacatcaaccgactgataagaccagcctgctcgttgtcggcttttcgaccgtgcaacagtgcaagttcctcgaggcggttgaatcccagatccctctacccgatttgcctgaggttcagctgcccgttgagaagctcgagcaatggcggcgggaatgcggggacctggtccgaaaactcaaagatgcaattgacggagaagccccccgcagacgagacaaaaagaagattgcacggcagcaatcgacaatcgccgccattcgccccgacgtcgaacacagagtgtcagcgagggtaggtgagctgctcaccgggggagagcccgcttgggaacaggcggcaagtgaatatcgccccatgatgaagatgatcgcgaaatcgctcgcccccggcttcacagtggctgcgcttcaacggcgccgacacattcaaagcgtgatccccaacatgaagtctaaaacagaaacagagaaaaaacgcagccgaaagaaaggagatgaggaatgactgccaccgaagatttcataaaaaacctaaccaaactgaaagaaggcgacttgggcctgctgcgcacgcacgcgggacaggggctcgatgagtcgctggagggtttcgacctgttcacaggcttgtggtggccgttgagggagaagaaccagagagcgcctcggcgctcggtggcctggttgatcgcgaagctctatgccttctgcccgatcaagccatcgcccgatcacacgcttgccatgcaactgcgccgctgccagccaaacgaacagctggcgaaaaggcgatttcagcagaggttcgacgagatgctcgtcctgccgctcgacaagctcgagccggcgctgcagtgggcgcttgagcagatcgccgcctcaagcgacccgagacttgattgggtgaaattgaccgatgatctctccatttgggaacgtgaaaagacccgcctcagatgggcggaacaattcttgcaaaccgatgaaaggagctacgacgatgttgattgaaatccacattatccagaaccacagcccggccaatctgaaccgggatgacctgggcgcgcccaagacgtgctatttcggcggcgtcttgcgctcccgcatctccagccagtgcatcaaacgcagcatccgcacgagcaaggagttcgaaggattgctcggcggcaaacgcacccgccagctggccaaattgatcgctgagaaggtcacgggcaaggccgatgtgaagaaacgcgcggagaagattctcgacttatgcggactgaagcccaagaaggccaaaaagcaggaagcggaggcggatgattctaaagacgtcgaaaagagcaaggcgcttgtctatgcgaccaacgaagcgattgagcaaatggcaaagctcctgcaggacgacgttgggaaaaccgatgaacaactggcacaggagtttgcccagctcatcgcgcaaagaactgcggtgccagatatggccctgtccgggcgcatgttggagcctgataaggctgctgccaagatctggaaggagtatgacacgacggtggaggcggccttgcaggtagcgcacgctatctcgacgcacgaggcccatcccgaggttgactactacgtcgccaaggatgacgtccccggcgaggacgcgggagcgggctttgtgggcgaggcgatgttcgcctccgcctgcttctataagtatctctcgatcgactgggagcaactggtcgagaatctggaggggttcgggcagaatcacaaagagctcgccgcacacacggttggcgcgtttattcgcgccgctgcgttggtcaatccgaccggcaagcagaacagcttcgccgcgcacaatccgcccgatggaatcctggtcgagatcaaggacgtcaacaccccgatcagctacgcaaacgccttcgccaagccggcagcccagggcgagctagatatcatctctcagagcatcgcccagctcggccagtacgttcacgatctggacaccggctacggcagaccgcagaagcgtttctggttctcgccgaatctccactatcacttgactgccgagatcacggaggaagaaaacggaaaaaagaagaagcgcgaaatcacccttgctgagaacaacatcagatcgctggacgaactgatccccgccgtcatcgccgccatcggccacgactggcaggccgtccagaaggtcgtcgtcaatccagaggtgcccaaatgaacgccaataccctctttctgcgcctcgaaggccctttgcaggcgtggggcgatcaggaatccaagttcgtcgtccggcgcacggccgaagcgccgaccaaatcgggagtgattgggatgctctgcgcggcgttgggcgttccccgtcaaacggccccagatgagtggctccccaagctcgccatgctgcccttcggggtccgcattgacgcgccgggcgtccgctggtgggactatcacacggtcggcgccaagatgcggatgcgcatcgccgagggtgaggggaagaccaagtccggcgcgatgctcacccgccgagagtatctgtgtgacgccagctttctcgttgctttgcagcagcaggaccagcccgccctcattgaccaactagagaacgcgctgcgaagtcctaagtggacgctctacctgggccgcaagtgctgcccgccgtcccgcccgctcctcgagcatccggccggcgcctttccggacgtgctctccgcgctcaagtcagtcccctggcgcaaacgcctgaaatatgatgccgagcccgcggaggggaaggtggactgcctcctcgactggcagccgacgcccgaacagcccgaagcgcccgatgacgcgctcgtctggtacgatgtgccgctgacgttccagcccccctcgcatcgtcctcgattcgtcatacgtaagcaattgcagataggcgcgggcggcgaagttagcgtcgcggaaaagcccgcacagaactatacaccgcgtccgcctcgcccgagagccgactaccgcaacacagagtacaaaaaacgtcggcaagaccgcctcgatagcgaccgtcacctctgcgtcttctgcaagggaccagccacaaccgtccaacacgttacctatcgccacgccggtggtgatgaacgcctcgacgaattgcgttccctctgtcgactctgccacgacgcggtgacgatgattgaatacggactcggtatgaccctagaccgcatcaatccatgcgacccccgccggcgcgagcagattatggagaagcgcgatgagatcatccagtttcgctcgctcgaaacgcgccggcgaagacttagcccagaggaggtggaataacatgtatctctccaacttgttgatcgatgtgggtgaaaaccccgaccggccccgccctggacggctgtggctgcgcaacatctaccacgttcaccagcgattgtgcatggcgtttccgtcagaggcgcgggtcaaaggagatccggcgtttcttcagccgttcaaggacggcgacttcccgctcttgcgcaaccacaacgccaagccaggagagccgcggcacagcttcctgtttcgcgtcgataaccgtatcgaagaggatgttgcccgcgccgttatcctcgtgcagtccgaagcgaagccgaactgggattacgcattcgggctgaagcccggcctggttgatccgagaacgaagcgacccatcggcaacgcgggctgtcttctcgctgcccctcccgaggtccgggaatgcaatgcgacatacccggctggccaggagctccagttccgtatccgcttgaac

SEQ ID NO: 850 - DNA, 4678 bp, Artificial Sequence
  Synthetic Oligonucleotide
ctcagattggcgcggatacggaagcgaagccgctgacccttctcaaagcgggggtcgaattcctgcacctgagggggagcggctagaggattcagaagaaaacgggcgttgtggaaggcgtagccccagtcaggctttacggcagagttagactggacgaggatcacgacccgcccgcccggttgcgggtcgatgcggaagagaaagccggagtcgccgtcacgtcttacatggacctggttgttggcaaagtccgcgggtttgaaaggcttgaggaagtggggatcgtgggatattcggtctttggatggaaacgccatgcaaaggcgctggtggacgtgatggaggtttcgcagccagagccgcccgggcctggggcggtcggggttggtgccgacgtcaatcaagaggcaggagaggtacatggctattccacctcctcagcggcaaggcgtctgcggcgagtctccagagagcggaacctgataatctcttcccgcttctcgatgatcttgtcgcgccaacggggctcttcggggttgatgcggtccaagcccattccgagcccgtactcgatcatggtcacggcgtcgtggcagaggcggcagagggagcgcaaatcgtcccggagttcgccgccgcccgcgcggcggtacgtgatgtgctgcacggtgctggcgggagacttgcaaaaaacgcacaagtgatagtcgtcgtcgagccgctccttgcgtcggtttttgtactctgtgttcgtgtaatccgctcttgggcgcggaggcggtggcgtgtcgctctgcggtggctgcaccgcaagtgttacgtcgccgtccgctccgacgcgcaactgcctgcggatgacgaatcggggttggtgcgacggcggctcgaatgtcaacggcacgtcgtaccagacgagcgcatcatcgggcgcctcgggctgctcgttggtgggttcccaatcaagcaggcaatcgacgggtcgcggctggggatcgtccttcagccgccgacgccaggggaccgattcgagggcagaaagcaagtcggggaattcacctcccggatgctccagcagagggcggcaaggggggcagcactttctgccgaggtagagtgtccacttgggcgctttgattgccgcctccagttcctcaatgaggtccggttcgccctgaagagcgacgagaaacgaggcgtcgcaaaggtattcgcggcgggtgagcatggctccggacttggttcccccctcggcggtacgcatcggcatccccgcacccaccgtgtgataatcccaccagcggacccctggcgcatcgacgcgtacgcccatgcgcagccgggccagccttggaagccagccttcgcgggcctctggccgggaaacgcccaatgccgcgcaaagcatcccgatgacgccggacttggtcggcgcctcggccgtgcgccgaatgacgaacttggattgctgatcgccccatgcctgaagaggaccttcaagccgaagtagcagcgtctttgcgctcatggggcacctccggattcaggaccactttcttggcctcctgccagtcgtaaccgatttccttgagtacagccgctatcagttcgtcaagagacttaacatctttgtcggcaagcgggacctcacgctgtttctgttttccgtcttcgctctccgtggtggtagccgtcaacggatagcggagatttggagagaaccagaaccgcttcgtcggcttgccgtatcccgtatctatgtcgttcacataatgggcaagctgcgccacgctctgcgagatgatgtcccgttcgccctgaggagccgccggtttggcgaaggcgttggcgtagctgatgggagtgtttctgacttccaccaacatcccgtcaggagggttgtgcgcggcaaaactattttgttttcccgtggggttggccaaggccgcggcgcgaatgaaggcgccgacggtatgggccgccagtttttcgtgattcgtcccgaagggcttcaggtttttgaccagcgtttcccaatgaatggagaaatacttgtagaaacatgccgaaccgaacatggcttcatccacgtaacctgcgcccgcgtcctcgccggggacatcatcggcggcgacatagtagtccacctcgggccgggcctcatgggtggaaatggcatgggcgacttgaagcgatgcctcaaccgtcgtgtctttgaggactcccgtttcaagcatcctgccgctcagcgccatgtccggcacggcgacggattcactgatgagcttgccgaactccgctgccaaggcctcgtccgtttttccgtcgccctgctggaggagttcggccatgcgtgtaatcgcctcttgggtggtgtaaaccagcatcttgctcctctcagcactttcctgttcgtcttctccttcctgtttttttgctttcttaggctccagcccgcaggctttgagaatgttctccgctcgcttcctgacgtctttgcccgtcaccttttccgcaatctctttcgccaactggcgggtgcgaactccgcccagcaattgtctgaactcctcactcatgcggatgctgcgcttaaggcactggctggaaatacgggagcgcaagactccgccaaaaaagcaagtcttgggcgcgcccaggtcatcccggttcaggttggccgggctgtgattctgaatggcgtgaatctggatcaacatgactctcctcctcttggacagttcaaaaattcctcggcccatttgagccgggtggattcgcgttcccagatggaaagatcgttcgtcagccgcacccagtcgagttcgaggtgcttggaagctatgaggtcgattgcccactgtagggcgggttcgatttcagcaagcggcagcgtgagcatcctgtcgaagcgttgctcgaaacgctgccgcgctgttttctcgcccggccgggatcgcccgagctggcgagcgagggtctcgcggggtgaatgctcgaggggccggagggcgtagagtttggcgacaagccaggccacctcacggcgaggcgcccgttgggtttgcgcccgcagcggccaccaaaggcctgcgaaaaggtcaaagccctctaccgattcgtcgagcccttgcccggcatggttgcgcaagagcccgagctcaccgggtttcagtcgagtcagaacttcgacgtactgctccgttggagtcacttgtcccccccttcgtctttgttgtttctctttggccgcatgtccggctttacagcggcaatttcttgtcgcctccggagggaagcggttgtgtagcccggggaaagcgatttggcgacggcggccatcaacggacgatattcctgggccgcctcttcccatgccttaccgccttctgcgatcatctcgtcgatttttccggaaaccgttgcctcggcttggggacgaacagcggcgactgcggagagaatttcaaggtgtcctctgtttcgtgaagtctctcgcggtttggctctgccaacgagcttccagccttccttctgccacgcctggatttcttgcaaactcgcctgaaccttcacgtcgtcgagcgcggccaagaattgaatctcccgctcggctgcttccaggtatttgtcgttctgcactgtcgcaaagctgacgacccacaacttactgttccccttcggcttttccccgcacaggattcccgccacgaccttcgtccacttcccagccgcagcgtcggccgggccaagcgcgctgaaaggcttcacaatctcgtcgccttcgctgatggtgtgcgggtcgttccagattcgtgccagactgccttcgcctgtctttgtgctcccaatacccgcaaagacacattgacgtatcagagcctccctgcgcccgcaggcgatgcagttggactctggtgtctccggagtgtctaaccagacgcgccgcggtacccacgttaatcctatcaataatggaacattgccgtgttgagggaggcttatgtccggattttcccatgtgggcgtgcccaggttcatctccgacgtcttccgccatgagaggcgcagggtttcggaaaggcagtcgcccatcggcacgatgtagatcggcggtttttgattgacgcccgggggcttgccgcgcccggccgacgtagcaaagagcggaaggcgcaacaagcccattgcgcagcatgccggacataagccgtttctgaaatctgtcccatgccggaagtgccagaagtttgtgccggtcggcacttcttgcatcagatagttgacggacagcttcttctcaagtcggttaggcttgcgttggtaaaaccgcttcccatcgccctgaaggttgaaacagtctttgttgtcatcgagtttcttgaaccaatcagagggaaacgaagaaatcgagttcttgtcgtccgggggattccctttgcaccaatagagcaacgcaagcaggaaacgcaggatggccaggcggtccattgggttgctggccgcgatttggcgaatccggcctgcttgcctaagggcctcactaatgcccacgcgaccgctgtgcccatctttccacagaacgggaatccacttttcttcgagcaggttgtactccacggcttcctccttgcctgggcaagaggcgggtggcaggcccgttgcgctccgggggacc

SEQ ID NO: 851 - DNA, 4678 bp, Artificial Sequence
  Synthetic Oligonucleotide
gcagatggaagagccgctgtcggtcatcatgggtattttgcgcaagcaccagcaggtctgcctggactgggtagggcttactgatgttctgtcattttgggagcaggaacctgtcaaaagagaatggtcggattcatttattaaagcatacaagatcaacaaggaggattcagatgttgattgaaattcatatgattcagaatcacagcccggcaaatcttaaccgggacgacttgggcgcccccaagacctgttatttcggtggagtattacgttctcgcatctccagccaatgcatcaagcgcagcatccgttttgccccggaattcgcggaccttagaggaggtatccgaacaaggcgtctggcagagaaacttgaagaaatgctggaaaacaaagataagaagctggttgccaagtttcttgaagcctgcggaatcaaaaccaaatcttccaagaaagctgcaaaaaagtccgaaaagatacccgcggaagccgatgaagatcaggatgagcagcaggcggctgatacatctgacatgctggtttttaccacttatgatgccctgcgccaaatggcagagctgctttccgactccaaactaagtgaaagcgaaaaactgctgcagttcaaagatttgctcacaaactgcgtccattctccggatatagcactttgcggcaggatgttggagaccaaagagcttaaaaacactggcgttgaaggcgccctacaggttgcacatgcgatctccacccacattgccagacctgagatagactattttgtggcggccgatgatgttcccggtgaagacgccggagcgggtcatattggcgaatccatgtttgcctcagcctgtttctacaaatacttctccattgattgggaacagttggtcaagaacctgaaaggggacacgaatctggcagcccacaccgtgggtgcctttctcctcgccgctgccaaaaccaaccccagtggcaaacagaacagcttcgccgctcataactatcccgatggcatccttgttgagttcaagaattcccctattagctacgccaacgcattcgtcaggccagtttccgtggtcaaggaatcggacctggtggaacaaagcatcggccagctttccaactacgtgaacgacatcaggcttggctattatgatgagcaatccccagttatcagcttctggttttctccaaacaatcgctattcccttggcaatgagcattccaaactggcttccagaaacattggcaacctcaatgagcttgtaggcgctgtgttggattatattggcggcttcaagtgggaagaagttcagaaaagcaaggcttatgttggcggctgacatgagtgcgccacccaacaccttattcttgcgcttggagggggctttgcagtcttggggcagcaacgaggctaagtttgctttgcgcaggactaccgacgctcccacaaaatcaggtgtcctggggctgctttgcgcggccatgggaattgggcgcgcggaggctgctgattcatggctcccaaaactcgccaacctgcgcatgggcgtgcggatagaccgccccggcatacgctggtgggacttccatactgttggagcgggacaaagaatgcgcatggcagagctgaaggcacccaaaaaaccttccatggttggagctgccctggctgataccctgacaccaagcaaagtaaaaaccagggcagagaccttgctctcacgccgcgaatatcttgccgacgccagttttctggtcgccttgcagggtgagccggaacttgtggaaaagctctccgccgctctggccaagccggtctgggcaatttatctggggcgcaaatcctgtcccccttcacgtcccgtgggcgagcatgctccgggcttttataacactttggaggaggcgctgtccgcggttcccctgcaaaagcgctggcacaatgaacccctgccgcaaatactgccttgcgtcatggactggatccccagccaggacggagaacatgcgcctgatgacgcggagattcattacgatctgccggtttcttttcagccgccccgccatttgccgcgcttcgtgatcaggcgtgagctggttgtgggagaggatgtgcaagtgagcagggaaaccggaaccagcgtttggaggcccaaaggaacccgggcggattataacaattccgagtataagaaggtcagggcggagcggcttgtgatggaccatgccgcgtgcatggtatgcaaagctcccgccacgactgttcaacacgtgaattaccgcagggcgggaggcaaggaaataccggaagacctgcgggcgctgtgccgcctctgccacgacgcctgcaccatgctggaatacggttccggcatgaccaccgaccgcatcgacccctgcgaccccatctggcgggagcgaatactggcaaagcgcaaagatatagtcgagttccgttcgcgcgggcagcgtttccgcaaaatgaagccagaggaggaaaacggatgatctacttgtccaagctattgatcgatactggaggcaatccagaccgtccccgccccggcagaaagtggctggacaatatctataacgtccaccgccgcctttccatggcgttcccttcaggtttgcgccgggagcaggatccgcatttcctgaagcccttttcgccaaacgacttccaaaaaactcccttccttttccgggtcgataacaacatcgacggaaacgataaaagggcgattattatcgtccagtccgttcttgagccggattgggattattgcttccaaaacgcgcttgatttcctggcagcgccaccggaaacaaaggagtataatccagagtttcaagcgggacaactgctccggttcaggctgcgggtaaacgccagcgtacgccgtcatattcctgagaaggtgcaacaggacggtcaaaccatagaaactggcaacatcctgcacaaaagggtttctctcacctgggatccctcttccaccccggatcaggcccttgccgactggctggctgccaaaagcccaaagctgggcttcacccttcagcgctgtgagcttcttcaactgggttgggtttatggctccaagcctgaacctaaaaatgtcaaagcaaaggaacagggacagggctactggcgtgaacacacatacaatcctctgcgcttccgttcggctctactggagggaattctcaaagtggatgacccgaaactgttcctggaaacgcttagaagcggcattggaaaagcgaaaagcttcggctttggcctgctgtccgttctgccaatcaggaatgatgaataaagacctgcactctatcccccggatcagagatcggcttagctatctctatgtggagcatgccaaaattgatcagaacgggcaagccatcgccattcacgatgccctgggagaaaccccggttccttgtgccggcttggctatgctgatgctgggaccgggcataaccatcacccatgcggcaatactttcactggctgcctgtggctgtctggtagcctgggtgggggaacatggcgtcaggttctatgccgcaggcacaggtacaacccgtagcgccgtcaatcttatgaaacaggcaaagtactgggcagacccggttttgcatttacgggttgtgcgctccatgtatcagttgaggttccaggatgagctttctcctgatttaactttgaaccagatcaggggcaaggaaggtgcccgggtgcgcgatacatatttccaactctcccaaaagtatggtgtgcccatgcagggcagaaactatcaaagagacaactggaataaagcggatcccataaaccgggcattatctgtggcaaactcctgcctctacggcatatcgcacgctgccattgttgctgcaggattctctcccggattgggctttgtccacactggcaagcaactgtcatttgtctatgatatcgcggatctatacaaaatggaaatggctgctcccgccgcattccgggcgaccgctgaagggatcggcgaactcgaccgcagagtcaggcttgcctgccgtgatgaattccacaggcagaatctactcaaacgcattgtcgcggatattagttctctcttcggtgatattatgccagaggatagcccggatgactgttttgccgaagaaccagccttgcctggaggactctggtctccagatggagaagtttccccaggcggcatatcttacgggcaggatgatctgccaaaggaagattgatggtggttttagtattggaaaatgtgccaagctccctgaggggtaagatcacacgttggctgctggaagtaaaagccggggtgtttgtgggtaaagtctcagcaatggttagagataaactgtgggataaggttagaagcaattgcagcggtggaacttgcctgatgatctggagtagtcagaccgagcaagggtttgatatcgaattctggggtgccgcatcaagagtcgttacggaatgggagggtatcaaacttatgaccaagcatccttaaactaaggcttgaaggagttcaatgacctcttagacctctattgatcaagtgtattccccatgcatgtgggggtgaaccgccggcgcacaaaaaagcgatgtatgagcagatgtatt

SEQ ID NO: 852 - DNA, 4652 bp, Artificial Sequence
  Synthetic Oligonucleotide
ttcggttcacccccacgcaggtggggaacacatacgtctgttagttctggccccggcttcaaccggttcacccccacgcaggtggggaacacacttcgaaagtagacgctttgaggccattgaacaggcttcaagtatggatcacggatgcttggtcatcaatttcaatccttcccattctgtcactatcctttccgcggcaccccaaaactcaattccaaagccttgttcgcaatgcttgctgtaaatcatgatacaagttccaccggcacaaccagacctggccttgtcccacagcttttcccttatcatggccgatacctgaccgacaaatactccagccttgatttcgaggagccagcgtgtaatttctcctctcaggccagagggaactttttcaagcaccagaaccatcatcatggcctccaggatcatccagaccccatgacaagccgccggggctcactttatcatctgggttccaaagcccgcctggcacggctggatcgacatcagcaaggtctggctcatcgtccgaagtttccagaataccgaaaagggcgtgaatgtcggccactatcttctttagcagaccaaattgatagaactggtcacggcaggcaatgcgtgtccttctgtccaggttatcgacccctgcggctgtggctatgaaagccgcgggcacggaggtttccattttataaagatcggcaatgtcataaacaaatgacagttgtttgccagtatgaacgaaacccagggcaggtgaatagccagcggccactatcgcggcgtggcagatgccatagagacaggaattggcaacggacagggctctgttgatggggtcggttttattccagttgctcctgtcgtaattcctcgcactcatgggcacatcgaattcttttgaaagtctgaaataggtatcccgtactctcgctccctcttttccccttatctgttcaagagagagggttgggtccagtttttccttgaacctcaattcatacattctgcgaactatccgcagatgcgtatctcgatttgaccaggcggcagcctgacgcataaggttggcggaactacgggtggtccctgtcccggatgagtaaaagcggactccctgttcccccacccaagccaccaaacagccgcattctgctaaaacaaggatggccgcatgggtgatggatacgcctggccccagcatcagcagggccagtccagcgcagggaacaggagtggagcccatggcatcgtgaaaggcgattgcctgttgttctttgtctattttggcatgctccacatagagataggtgaagcggtcccgcatttttggcattaggtgaaggtctctgttacgcatcacttgccggaaccacggaaaggaggccgaagcccattcctttggcgctgccgatacctttttccaaggcttcccggaacagaaaggcatcatccactgtcagataaccttccagcagggcggaacggtatctcaggggacggtattcgttctcacgccggggcgaatttccccggggctccggtttggaaccgtatacccagcccaggcttaccagttcggtctccccgggcgtgaagcccagtctgccagccttggcggcaaaccattgcgccaccgcatcctttgggttggaatttgtgtcccaggtaagggcgacccgtttgtgcagaacccttcccgttttttcctttcctccgggtccttcccgcaactcgtcgattttgcgtttgacactggcattcacgaggatgcggaagcgcagccgctgacctgctgagaactggggatcgtattccttaacctggggaggggctgccaaaaatcccgtggcattctggaaagcccagtcccaatccggcggcagggacgactgcaccaaaaccatcgccctttgattttctccatcggtgttgttgtccacccgaaagaggaactggcgcttttcaaaatctgcggggtcaaagggctgcagaaacctcgggtctccttccttgcgcttgcgcatggggaaagccatgctgagccgccggtggacattatagatattgttcagccacaagcgcccgggccttggccggtcagggttgccgcctgtgtcgatgagcagttgggatagatacatcatccgttctcctccttcggatcgagtttgcgcctgcgctgctccagcgagcggaatttgattatttcctcgcgtttggccaagatgcgctcacgccaggcggggtcacagggatctatgcggtccatggtcatgccgctgccatattccagcatggtgcaggcatcgtggcagaggcggcagagggcgcgcaagtcctccggcttctcgctgcctccggcgcgtcggtaattcacgtgctgcacagtagtggcgggtgccttgcagaacatgcaggcggcattgtccatcaccaaacgctcagcgcggacccttttgtattcaggattgtcgtaatttgcccggttgcggggcggttgccaggctttgccggaaagcacggtctctgcctcgaagttgcggtccaatggcaggttacagcggatcaccagccggggcaagtggtggggaggctcaaaggacaccggcacgtcgtaatgcgcttcggcgttcggcggagcgtgcacgtcatcatgggccggaacccagtcgagcacacagggaacactgtcaggtatcggttcgcctttttccctcagttgcgccgggatcgaccgcaaagcctctttcagactggcataaaaccctggcgggtgttcatccaccggacgggaggggggacaggattttcgccccagataaagcgtccagactggttttttcagcgcttcagccagttgtgccacgatatccggttcaccctggagcgcaaccaggaagctggcatcagccaaatactcgcgtcgggagagcaaagccccgggtttggatttgatcttgtccgcgcccaggtttttggccagggcagtgccaaccagaactaggccgttgggcattttcaggtcagaaatgcgcagcttctgctccgctcccacagtatggtaatcccaccagcggatgcccgggcggtctatccgcacccccatgcgcaatttggcaatttcacccagccaatactgtccggcttcggcccggctgattcccagggcagcgcagagcaggcctgccactccggatttggtgggcgcgtcggctgtcctgcgcacggcgaatttggcctcattgcttccccaggcctgaaggggagcctccaatctcaggaacagggtattaggcggagaagacatttcaactctctactttctcgttttttacatcatcccattcaaaacccaacatctcaactgcttcgcgaacaagttctagcaggttgcaaactggctttatgtccagcgtgccctgttgaggctttaggggataacgtccattgggcgagaaccacagagcgttgcctttcatctgtccagggaagaaaccggcacttatatccttcacatagttggccagttggccaatgctttgttctaccaagtcagaatccttaacgattcccaccggtcgcacaaaggcatttgcatagctgacaggtgtctcttttatttctaccaatattccatcgggaaggttatgtgcggcaaagctgttctgctttccgctgggattagtgagtgcagcggcctggataaaggctccgacagtatgagctgccaacttttcattaccctggaggttgattatcaaggtattccaatcaattgagtaatatttgtagaaacaggccgaagcaaacatcgcctcgtctatgaatccagcacctgtgtcgtcgccaggctcgtcatcagctgctacatagtaatctatttctgggcgggcgatgtgggttgaaatggcgtgcgacacctgcagggctgcttcaacagtggtattttcccacttgaccttgtctgtgttcttgtccttggtatcgggctcgagcattcttccgcacagagcgatgtcaggggaatgtattgcccccgatattacatctgccgctttcttggctttctctgcaacactcaggccttcgctggtgacaatttgagcaagggcatcgatcttgttccgggtcatgaacaccagcatcttactatgtccgttttcgtgtttcaaaccggctttgttcagaacttcctctgcctgattcctgcagtcctgtcctgtagcttttgtaatcaactcggccaaccgacgggtacggatacccccgagcaagtttttgaattcatcgctcatcctgatgctccgctttaggcactggctggagatgcgggaccgcaacaccccaccgaaataacaggtcttgggcgcgcccaggtcgtcccggttcaggttggccgggctgtggttttggatcatgtgtatttcaatcaacatttgattcctccttgctgattattaaatgctgaaataaatgtgtctgaccatatcgctctgtttgattcccgttcccaagcggagaggtcatcgatgagggcaacccagtccagactggcaatgtcatgtctttttaaaatcgcgagcacttgcgccagcggttcctccagttggttcaactcgagcgtgagcaagcggtcgaac

SEQ ID NO: 853 - DNA, 4614 bp, Artificial Sequence
  Synthetic Oligonucleotide
agacgcacatttatggcccgaacggacgcgatcctgcgggcaagctccagccagttggaatacccgctcggctgggcgctgcagaccatcgggctgtataactgcgcctccctcgactggataaaacttaccaacgacctttcggcctggcacaatgaactggtgcgccagaaatgggctgaggcctttaatcaagcatcatatgaacacaacaaggagaactaaaatgttgatcgagatccacatgatccagaatcacagcccggccaatctgaaccgggacgatcttggcgcgcccaagacctgttatttcggtggagtgctgcgttcgcgcatctccagccagtgcctcaaacgcagcatcaggaccagcgaagattttcaggctttgctgggcggagttcgcacccgcagactggccgacctgatccagcaggaggccggtgagacagattgccggcaaaaagcccaggagatactcaccaaatgtggcttcaagcatgaggacaacaacagcaaaatgctcgttttcatgtccagggacaaggtaaaggaccttgcccggatcgtccttgatacttccctggagatcacggaagccgcccagcaagttgccgatgtgatcgcccatgcgacctatacccccgacattgccctctgcggcaggatgctggagccagaaggcaaggacaagagcgtgaagtggtcggacaccacggtggaggcagctctgcaggtggcccatgcaatttccacacatgcggcccggccagagatcgactactatgtcgcggctgatgacgtgaagggagcggatgccggtgcgggctacgtggatgaggccatgttcgcctcggcctgtttctacaagtatttttccatcgactgggagcagctggtcgagaacctgaaaggaaacaaagaattggctgcccataccgtcggggcattggtcctggctgccgcgcgcaccaaccccagcggcaaacagaacagcttcgctgcccataacctgcccgacggcatcctggtggagttcaaaagttccccggtcagctatgccaatgccttcgtgcggccggtcaagctggtggcggaatcggacctggtcgaactcagcgtgggacaactggccaactatgtgcaggacatcagcgagggatattttcccggccagatggaaggcaactccttttggttctcacccaacggacgctatcctctgcagccgcagaagggcgggctgcatgccgaacaggtcggccagctggaagaactggtcaggaagaccatccgcaagtgcggttatgattgggaagccatcaaacaactgaaaacagaaggctgacatggctgccaataccttgttcttaaggctggaggggccgcttcaggcctggggcagccatgaggccaaattctccgtgcgccgcacctccgaagctcccaccaaatcaggagtattcgggctgctttgcgctgccctgggtgtgggcagggcagaagccgctaaatactggctgccggaactggccaaactgcgcatgggggtccgcgtagaccgccccggtatacgctggtgggattaccatacggtgggtgcggggataaaaatgcgcatctccaatctggaagcgccgacagacctgagcgatgtgggtgaggccagggaagccaggctgcgacaaaaaaacctcaaatatgacgaccggggtatgctgacccggcgcgaatacttggctgatgccagctttctggtggccttgcagggtgagccaaggatagtggagcagttggccgaagcgttgcgaaaacctgtctgggcgctatatctgggccgtaaatcctgcccgccttcccggccggtgggggaacatccgcccggagaccatgcttcactggaagaagccctggcggccgcgccgatacagaagcgcaaagacggagaacccgatccctcaacgcttcagtgcattctcgactggatacccgcctttgacggagagccagccccggatgaggcagagatccattatgacattcccgtgtccttccagcctccgcggcacctgccccgcttcgtggtcagcagggaactggtcctgagcaatgagttggaggtacatcaggtgctcatcggtaagacctggcatccgccccgcagtcgcgctgattacagtaattcccaatacaaaagggtacgcgccgaacgtttggtgatggatgtgggactctgcatggtctgcaaggccccggccaccaccgtccagcatgtgaattaccgccgggcgggaggtaacgaggagcctgaggacctgcgagccctctgccgcctctgccatgatgcctgcaccatgctggaatacggcagcggcatgaccatggaccgcatcgacccctgcgaccctgactggcgggagcgcattctggccaaacgtgaggagatcatcaaattccgctcgctggaacagcgcaggcgcaagctcgatcccaaggaggagaacggatgatctacctatcccaactactcatcgatacaggcggaaatcccgaccgtccgaggccgggacgcctgtggctcaacaacgtgtacaacatccaccgcaggctctccatggcctttcccatgcgtcagcgcagagatggagatcctaaattcctgcagcctttcgatcctgcagatttggaacaacgccagttcctcttccgggtggacaacaacaccgacggagaggagcaaagggcgatgatattggtgcagtcacaccttaggccggattgggactgggccttccaaaacgccacgggttttctggccgctccgccccaggttaaggaatacgatccgagattctccacaggacagcggctccgctaccgcatcctcatcaatgccagcgtcaaacgcaaaattgacgaggtcagggagagccccgagggaaaggaaaaatccggacaggtcctgcacaaacgggttgcccttacctgggagaccgattccaaccctggcgacgctgtagcccaatggttcgccgccaaggccgacaggctgggcttcacgccccttaacacggagctggtgaacctgggttgggtgtatggctccaagccagagccccagggagatgcgcctcggcgtgagaacaaataccgtcccttgagataccgctccgccttactggaaggatatttgaaagtggatgatgtcgtgctgttccagtctgcgttggccaaagggatcggcagcgccaaaagcatgggcttcggcctgctctccgtggttccgttaagcgatgcgtaataaagacctgcataccattcccaagatgcgggaccgcgtcagctatctctatgtggaacacgccaaggtggacaaagaggagcaggccatcgcctttcacgatgccatgggctccactccggtcccttgcgctggccttgccttgctgatgctggggcctggagtgtccatcacccacgcggccatcctggtgctggctgattgtggctgcttggtcgcttgggtgggggaacagggggtccgcttttacgcagccgggacagggaccacccgcagttccgccaatctgatgcgtcaggcaaccgcttgggcggatcgggaggcgcatctgaggatagtgcgcaggatgtatgaactgaggttcaaggataaattggacccatccctcactcttgagcagataagaggaaaggagggggcgagggtgcgggacacctatttcaggttgtccaaagagttcaacgtgcccatggagaccagaaattacgacaggaacaactggagtaaaaccgaccccatcaaccgggccctatccgtagccaattcctgcctctatggcatctgccacgccgcgatagtagccgccggttattctcccgccctgggtttcgtccatactggcaaacagctatcctttgtttatgacattgccgatctctacaagatggaaacctccgtacccgcggccttcctggctactgccgccgggatcgaaaacctggaccgccggacacgcatggcctgccgggaccagttctatcaatttggcctgctgaagaagatcgtggctgatatccactccctgttcggtatcctggaaacaccggaagatgaaccagaccatgcggatgtcgacccagccgcaccgggcgggctttggaacccggatgagagcgccagcccaggcggcttgtcctggggcctggacgatccaggaggccatgatgatggtcctggtgcttgaaaaagtaccctcttccctgaggggagaaatcactcattggcttctcgaagtaaaagcaggtgtctttgtcggccaagtatcggccatggtgagagaaaagctgtgggacaaggtcagatccggctgtgcgggcggtacctgcctcatgatcttcagcaaacattgcgaacaaggcttcggcattgagttctggggtgcggcggaaaggatcgtgaccgagtgggaaggactaaaacttatgaccaaacatccgtgaaccatacctaaggcagtgtggttagcctgaaaccctttatttactaactaatctttcccacatatctaatcttatggggcacaggaagataac

SEQ ID NO: 854 - DNA, 4596 bp, Artificial Sequence
  Synthetic Oligonucleotide
catggctcccaatcaaagcctccttgtcatccccccgccgctttctacatcaacaaggtcggctttcccaccttaactcactgtccagttttcggggtccattatattgtctcggttcacccccacgtgtgtggggacaattttttgtattttcttgaaaaaccccccccattcggttcacccccacgtgtgtggggacaatcagaagggagtgataagagagattactcttaccggttcacccccacgtgtgtggggacaataagccggttctacaaacggccttggctctattcggttcacccccacgtgtgtggggacaattcgacaagggggatattaagaagctgagaacccggttcacccccacgtgtgtggggacaatcttttcttccttcggagcgtggacaggtcttccgtttcaccaccacgtatgtggggacaaatagctcccccactgagagaaggaaccttcccacggttcacccccacgtgtgtggggacaatccgagagcaaaatccctatcgtcagctccggacggttcacccccacgtgtgtggggacaatgggatagactgaccgcatggcggcactttcggcggttcacccccacgtgtgtggggacaatagggacgggagggtctggattcccattcttttcggttcacccccacgtgtgtggggacaatatctaacaacacgatctttttcaaatcgagttcggttcacccccacgtgtgtggggacaattcccggtcatacagaatgggaagaacttctggcggttcacccccacgtgtgtggggacaatatgatatctctgtttggtaagctcctcccagccggttcacccccacgtgtgtggggacaatactgaccaaacccgcatcactgcgggactcgtattaacgataacccgtcgaagtctacaacctcccggctgggctcacccgatatccttatagagaagccctgctccgtgttgtcgctgtggatcatcaggcacgagcctcctttcgatccatcgcacagcttctgccacaaccgctctcgcaccattcctgagacgctcccgacgaagatacccgtcttcggctcgagcatccatcgcgtcagctcgcctctcagccccctcggaaccttttcaaggatcaccataatcatcttcatctcctgcttccggctcgtcggagaagttcctgccgcccggatcatcgtcgcccgacgggttccacaagttgccgggcagcgcgggatcggcatcaaagtcaatgtcttccggtttggtccggcctctggtctgaagatccagagcggattgaatgtccgcaacgatggtcttcagaagtcttgtctccctcagcttatctcggacagccttccgaacgcggctttcgatgtgttcctcgccctccgcggcagcgtggaaagctatcgggatcgagacttgagttttgtacagatcagctatgtcatagacgaatgacagcatcttgcccgtatggatgaacccgagcgcgggcgacaggcccagagccagaatccccgcgtggctgaccccgtacaagcaactgttggcagcggacagggctcggttgaccggatccgcgttgctccaattgccccgatcgtatgagcgcccgtgccacggcacgccggtttcacggcccgcttgagcgtatgcctcccgcacccgtatgccttccttaccgcggatctgttgcagggttaacgattcatccagaggcgcgtcgaacctcatgacgtacatctttttgaccaccagcagccgcagctcggcatccgcccacaaatgggcttgacgaagcagattatgggcgtgccttgtcttcccatggccataagcgtagaagcgcacgccttcctcaccgcaccaacagacgaggcaaccgttgtccgccagcgcggtgaccgcggcatgggtgatgctggtccccgggccgagcatcagcagacagagcgttgcgcacggcacggaagtcttgcccgcggcgtcgaacacggcaatggatttgctttcctgttcgatcttgcaatgctcgacatacaggtagctccacccatctcgaaacttcggcagaacgtgcagatcctggattctcatggcgcctccgcggcgcgtcaggtgttgaccggcgctatggaaagcaaaccgaacccaaaagccttgcctgggccgatgccgcactcgataagctgcttaagaacggctggttctcccacccgaaaaacgccttcaaacagtacagaccaccactgcatactttgaccgggttggggctcatattttgtccgccatccgtaggcccagcctgggacgaaggtttcgatacaaataggagaaccggctgcgccgacaagttttctggcgagccagtccgcgtgatcatctagcgtggggctgacccgcttccgtttgccgttgcgggacccatcctgtattttccgagtcggattggcccggagccggaatcggactaagtcacccgagcggatgggtatggaacagttctggttcggactgttcaggagaagcgtgtcgccgtcaagattgatggagacgggcatggtttgtggtggcgctgcgagcagataccccgcgttaccaatgggcctgccctggtcatctagcgagtcttccgtcaagccaaaggcgtagtcccaatccggtcgcctaaaggagtttgattgcacgatgatggcgggcatgcgtccaccaactctaggattaactgggtagtcaatacggaagaggaatcctgattctccgtcgcgttcctgaagtacatcgccactgctattctccgtcggtaagtcgcgttgcagcgggaagcccttgtcatcaaacggcctgcagtacgccgctgtgcgctggtcatctgccgggttcgctgacggaaatgccatacagagacgctggtgcacgcggtacagattacgaagccagcgacggcaaatacgccagtccgggcggtcgggattgtccccgacgttgaccagcaaatgcgaatggtacattgatcaaacctcctcttcgaggatttcgcgacggacggattcagaagctttgcgaagcgagcgacgccgcccttcctcgcttcgccacttgcggatttcgtcgcgtttgcggatgatctgatcgcgccagcacgagtcctcagggttaatgcgatccagtcccatgcccagtccgtactcgatcatagtcacagcgtcgtggcagagcctgcagagcgaacgcagatcctccggttcctcattgcctccggcacgccggtacgtaatgtgctggactgtagtagcgggggacttgcaaaagacacagagcccgtggtcggatttcatccgttgctcgcggcgtttccgaaattcctgattcttgtactcggcgcgaggtctgggaggcggcggtgtggcatgctgaaggggcctgccgactgatacttcgatggctgtccggactaagagccgcggttggtgcaccggcggatcaaagaagaccggcgtatcgtaccaaacctcggcatcggaaggggcgatggcgccattgtgaggctgccattcgatgaggcaatccaaatggactgccttcagtcgccccaatttttcgtccgtggggatatcccgttcagtcctaggcatccaatgcctggaggtcaacgctgactcgagactttcgaagcggtccgtgtccgcctcaaggctgttatgatcgcgtttccatcctaccggaaccgcaggggggcacgacttaagacctaggtaaagtggccacttgggttgccgaacattgtcagccacctcctgaatcaatttctcgtcacctcgaagggcaactaagaagctggcatccgccagatactcccgacgggtgatcaacgtctcgatggggcctttcgatccccccgtgcgcttgatcccacctttcgccattaacaatccaaccttggcgcctacggtgtgataatcccaccagcgagtacccgcccggtctacgcgtacgcccatagccaacttgtttagttccggcagatgctctgcagcctcctttcgcgacagccccttcgcgcaacagatgagtcctaggaccccggattttgtgggagcctccatggttcggcgcacgaccaacttcgagttgccactccacgcctgaagcggcccttccaggcgaagaaagacagtgtttggttcctccttcacggtcagacctcctcagcagaagccttgccgacgtcgcagacctcatcccatttgaacccgctgacttcctctacgaccgcagcaatcaaccctgtaggcttgttgtcgcccttgtgctcaccacagagcacttcgtaacgttcatcagtcacgtgcttggcttctttcttcttcccatcctcagtacgttcccagtactgaagagggtatcgccagagcttggggctgtaccagtgaagcgaggactcaatgccgtatgccttgcgaatgctgtgtacatggtcagccaagcaggcaacgcttctcccttcccagctcttctcgtctgccgcgtcgtcgtccggtttaccgatccgctccacgggctctgc

SEQ ID NO: 855 - DNA, 4578 bp, Artificial Sequence
  Synthetic Oligonucleotide
ccgggaaagcgccgacggtacatgcgcctgacaacagccaggcgctgcaccggatcgctcacgagcgcggcctggcggaccagcgctgccgcgctgcgcgtaccacccgtgctatgtgcgtacatccgtacgccctgctcgccaacccaggctaccaggcaattgttgtccgccaggctgcgcatggcggcatgagtgagggtggtgccggggccgagcagcagcagcgctagcgttgccaccggcacgggcgtcgtaccgctctggtcgtgaatggcgatggccttttcacattggtcgatgcgtgcatgttcgacgtacaaatagctcagccggtcgtcgaagcgcgcgagccgatgcagatcgtccacgggttaactcctgcccaaccggtcgatgttcggaaacgtgacgctatctacttgtcagagatcggaaagcccgtcgcgggcgattagcccggggggctgatcgcggctgcctcctgtggcagcggcttgatagagagcaggccgaaaccgaaggccttggcagagccgattccggattcgagcaatccttttagcgcgggggggtgcttcaccctggctgtgccttcgaacagcactgaccaccattgcatgcgctgattgggttgcggctcgtatttcgtgcgccagccgtacgcccaggaggtcacaaacttgtctatgccgagcaaatcggctgcgctcccgaatttgcgcgatagccactgcgcatgttcgtcgaacgtcggagcgatgcgccggcgtttgccattgggcgatccgtcttgggccttgcgcgtggggttggccctgaggaggaaccgtatcaggtcgccagatttcacgcgcaggcagtctgacgggcgacagatgagaagggcatccgcgtcaagctcaaggcgaaactcgtttacctgcggcggccccgccagcagaaagccagcgttgccgatgggacggccgcgcgcatcggtcttgccgggcgtgaggccgaacgcataatcccagtcgggtttgtggtgcgactgcacgagtataaccggggtgcggacgccgcgcttcgagtctaccggcaagtctacgcggaaaaggaaagagtgcgcggcgtttcttgcctgacgcccgtccgtttcctcagatcctgttggcaccgcgctgtcatgcgacattcgggcaggattgggctgaggggcgcaattggatgctgcccgcgatggaaatgccatagacaggcgttgatggacgcggtagaggttacgcagccagcggcgggtgatgctccagtctgggcggtcgggattgtcgccggtgtttatgaggagcgtggaaaggtacatcaggacgcctcctcttcgagcaagtcgcggcggacctgcgtcggcgcggaccgtagagcgcggcggcggccttcttcactgcggaaagcgataatctcgccgcgtgtgcgaaggatcgcgtcacgccagcgcgcctcgcacgggtcgatgcggtccagccccatgcccaggccatattcgatcatcgtgacggcgtcgtggcagaggcggcagagcgagcgaagatcgtccggggtttcgttcccgccggcctgccgataggtaacgtgttgcaccgttgtggcagggtttttgcagaacacgcagaggccctgatccgctacgaggcgcgcttcgcggcgcttcttgtattcggtgttctggtagtcggcgcgcgggcgcggcggcgcaggcaggcggcgctgcagggcttggccgacggcaacagtgatccgcttgcgcagaactagtcgtggttcgtgcaccggtggattgaaaaagacgggggtgtcgtaccagacctcggcgtcgggcggtgcggcttgcccagcttgtggcgagtattccagcaggcagtccaaggcaatcgttctgcaaggggcgttatcctcatcgcgtggaacatcctcggcgaatcgtgggcaccaaggcggagactgcagggcagcttcgaggtcgggaaactcgtccacgccggcgtacaccgggcgcgcgggtggacagcacctgcgccccagaaagaccggccacttgggttgctgcagcgcgtgcgccagctcatcgacgagcgcacgatcttccgcttgcagcgccacgaggaagctggcgtcggccaggtactcccggcgcgtgatgagggtgccctgagggccggttttgagtccgccccccgcggtcgtcatgccggttcccgcccccaccgtgtggtagtcccaccaacggatgcccgggcggtccgtccgcacgcccatccggatcatgcgcaaacgggccagttcttgacgtgcccggtcgcgcgagatgcccagagcgcagcaaagcaacccaagcacacctgacttcgtgggtgcttccatcgtccggcggatgaccatcttcgacgtatcgccccaggcctgaagagccccctcgaggcggaggaagagtgtgttcggttccgtcatttcgccgtccccgcaggcgtcgcgcctgcctccaccttgtccatgactgtacgaaggaaccgatcgaactcgccgaattcgttcgggcctaccactgattgttcttgctcgtgttctttcttagtcttgtcgatccaggtcaggcgatggcgcagattcggcgagaaccagaagcggtcggcctcgatcccgtagccttcaatgagatcgtgggcatactgcccaagtctggcgacgctttcgccgatcagaccgcgttccgatttttccggcacggggtcggcgaaggcgttggcgtaactgatgggcgtcgccgaattggttttgacctcgaccagaactccgtccggtagattgaacgccgcgaatgcatgctgtttgccggaggggttggccctggcggctgcttcaaggaaacatcgtaccgtcttgcgggcgagatccgtatcattcgcgaggttcttcaccaactgctcgaagtcaatgacgaagtgtttgtagaagcaggcggagttaaacatggcctcattgacatgggccgcgccggcatcctgcccggccacgtcatcagcggcggtgaagtagtccacctcgttggtcgcggcgtgagtcgagatggcatgggcggcggagagggcggcctcaaccgtgaactggcctttgagtccctcaaacggtcccttagcctcgaattcggtcatacgcccgcaaagtgctatgtcgggggtcttcacggagttgcgcatgatctcggcaaatctcttgcccaggtcgccgtttgcctcgcgcacggcggcacccattttcgtgatggcggattggggaagaaagaagagtatgtcgaaagtgttgtcatccttgaggccgaccccgccatccacaaagactttccgaatggcctcgcaatgttcttttttcggtggattgccttcgccagccgcctcttttgcaatcgcctcaatcagccgccgtgtacgtacgccgccgtccttttccaaagcggctgaaaactccggactgcgtcggatgctgcgtttgaggcactggctggagatgcgcgcccgggtcacgccggcgaagatgcaggtcttcggtgcgcctagatcgtcccggttgaggttggccgggttgtggttttggatcatgtgaatttcgatgagcatgttcatgttctccttccgagtagatgatttgccgcattcagatactcgcaagcccataagtcctgtggtgtacggtgagcttcaccacaatgcacgagccgttcatgagcgtccagccgattcttctgcggtgggtggtggggattgtactgtccgtcccagagccagaggtcatcgagcagatacacccagtcgatccccttgacatccttcgcatgcggcacgtgccccgcgaccgcgcgggacacctctcccagggcccagcacaaatgtggctccagcgacgacagagccgagcaaagcaatgcgtcgaagcgacggcgatgcttgcgcgccgcaatgaactggctcttgcccggctcgcggtccggcacagcggaactaagcggttcggcgtccgtgcaagcaggacgcggcggttcacagcggcccaagaccgcaggcaaagagggtcctgcggccgattccggccgcacgtgcggcacgtggaaggcgctgaagagtttggctacaagccacgaaggctcgcggcgcggcgtggccggacttattgcgcgtaacggccaccagagacccgtgaagaggtcgaagccctgcacggttgcgttgagggactgtccggccaggcggcgcagcggtgagcgctgcccttcttttagcgcttcgagaccttggatgaaagctgctgtctggctcacgatttacctcgctttcgagttgacccgcctctgcgcgtgcacgtgtcgggcggtctagcttccaccgtcgccggtgcgggcatcggcgtctgtaggccttcgcctattctgcgcagttcggaccacaggagccgctgcgcacgcgcgagagcttcctgtctccgtagcggcgagccggaagtgtttgcagtaacgatctgctcaacgacgcgcgcgagtcgaagttcgag

SEQ ID NO: 856 - DNA, 4488 bp, Artificial Sequence
  Synthetic Oligonucleotide
ggatgagaagatccagaaaaggatcgtcaaggccagttggctcgtcgccaaatgccgcatgaagacgttgctgacgcctgacggcgaggacgaggatgaaccggcgctcgtcggcgaacagccgggcgaggagcacgcccgacgtattgccgaaaaactgtccgagctcttcgctgatgagaaagccaacaaggatatcttgaggaggctcgtgagcgcggcgaccgacgacgagaagaaacagatcagggacgatgctcccgacaggccaggcgcgatggacaagtttctcgcggcgttgaaagatgtccacaaatttgatgccgtggacattgccttgtttggacgcatgaccacctcggacgcttttgaggatgttgaagccgcaatgcaagtggcgcacgccatttccacgcacgcgacaataaacgaggtggattacttcactgccgtcgatgacaagggcgcaggggtcggtgcgggccacgtcggcgaggcgatgttcaactcgccgtgtttctacaaatacttctgcctggattgggaccaacttgtcaccaatctcgccgggccgcccccggatgcgcggaaagacaaggaagaattcgacaagtggaaaaccgaagccaagtcagcagccgaaaagctcgccgcagcggcgcttgggcattttatccgcgccgccgcactgaccactcccagcggaaagcagaatagctttgcagccaacaacgaaccgtgcggcattctggtcgagatcaagaagaaaggtaaggttgcaacgagctacgccaacgcattcgccgagccggtggaacggatcggcaagcctgacgatgacgccgcggatgagaagagcattgagggccggagcgtcgcctgtttggcggatcacgtgcagagcgtgggaaacgcgtacggcatcgcttcgaccctcttttggtatagccccaagctctggcgtttccctctgcaatactgggaccgcgccgccgacgggaaaaggaaatccgccaaactcgtcacccaatcgcgtttcgatgtgttgggcggcgcggaaggaatgccggccgggttggtcgaggccgttgtcaaagaggccagcggattggactgggcggatgtcagggacgtcggcaaaactcctgccagggtagcgcgaccatgagcgaccggcccaatacggtttttctgcgcctcgaaggccccctccaatcctggggtgatccatcgaaattcgtcatgcgccgaacgatggacgctccaaccaaatcaggcgtcattgggctgatctgctgcgccatggggctgtcgcgagagaaggcacgcgagcggctcggagaactgaatgcgctgcgcatgggcgttcggatcgaccgcccagggacgcggtggtgggactaccacaccgttggagccggagtcggcctgagaacggccgagggcaacgtcaaaaccggggccaagggaacgctgattacccggcgggaatatctggccgatgcgagcttccttatcgccatgcacgggaacgatgaattgattgaacgggttgccggcgcgctcttgaatccgatatggccggtgtgccttggccgtaagtcgtgtgcgccggccgtacccgttcttgtcatgcaaagacaggctgacggggcgctcaaaccggacaccgcgcaatttgccgacccgctcgaagccctggcgaatcggatttggcagccgcgttaccagcccgaagtgccgcgaaacgagaaaggtgatgcggtcaagagcgtgcggcgggactgtttgattgattgggccgccccagacggaccagatggcgaagtctggtatgacgtgccgacatctttcgatcctcaagctcatggcgcgcgcctggttgtccgaagaccagtaaccattgccgtcggcgagacgctccaacgacataccccgcctccggagcccccgagggccaactacagcaatgcgaaatggacgaaggtcacccgacccgcgcagctggcgcgcgaccaccaggtctgcgtcttctgcaagtcccccgcgacgacggtgcagcatattacctatcgtcgtgctggcggcggtgagacgcaggacgatctccgatcgctctgccgcttatgccacgatgcggtgacgatgatcgaatacggacttggaatggggctggaccggatcaatccggaagacccgctctttcgcgaccggatcatcgaaaagcggcaggaaatcatcgccttccggtcgctggagacgcgccgccgtcggctcgagccggaggaggtggaataatgtttgtgtccacgttgttaatcgacaccggcgccaaccctgatcgtccgcgtccgggccggcgctggctcggcaatttgtatcgcgtccatcagcgactttgcatggcgtttccatcaaggggcacccgcgaatccgatccgtcattcctcaagccttatgatccgcaacagttcgcgcagggccaggtccatgttccgcggagtgacggcgccgggttcctcttccgtgtcgatccgctgctgggcgggggcgcgattgtcgttgtgctttcggcgctcgcacccgattgggattacgcctttcacaatgcacggcacctcctggctgcagccccggataagccgcgcgttttccaagtggcggtcgaggcacgaaaccgattccgctttcgcatgctggccaacgcggtatcccgcgtaagccgccggtctgtacatccgagtggcgggcccgtacgggaagaatggatcggcaagcgggttggcgttggcggcgatgaaaaatcgatgcgccgttggattgaccgtcgcgctgcatcgtgcggatttgcggttgatgagataacgctgtcgcagcccggctacgtctatatcaacaacacacatcaagccggccccgggcagcgattgcgctcggtgcgatatgaaggcctgctcagggtcaccgatgcggacgctttccgccgagctctggcgggcggcatcggtcccggcaaggcattcggcttcggattgctctcgatcgccccggctggctgacctccggggctgctctttgacaactgaatatcccctttggggggaggaacatgatgaaaacctcactcgctgaaatcgggcgcttcgatgatcggctctcgttcctgtacgtcgatcgcgccatcattcgtcattcgggcaatgcaatcgcgattcatgaggtcgatccggccatcgaagcgcccggtgtcaccgaggtgccgctctcggccatcgctacgctgatgcttggccccggcacgcggatctcgcacaaggccatccaactgcttgccgagagtaactgcctggtgatctggtgcggcgaattcggcatacggttctacgcgtgcggcatgggcgggtcgcggcacagtcgcaacatgctgaaacaggcgaagcttgcgctggacgagcgatcgcgtctgcaggtcgtcgtcaatatgtaccttcaccgcttcatcggcgagccgatcgacccgggcatcacgctccaacaacttcgcgggaaagaaggcgtccgcgtccgcgaggcgtatgccgatgcgtcgaagaaatggaacgtgccgtggtcgggccggagttacgaccgccagagctggaatgccggcgatgccgtcaaccgcgctttgtcctccgccaacgcctgcctctacggcgtcgttcacgccgccatcctttccgcgggatattcgccggcaatcggtttcgttcactgcggtaagcagctctcgttcgtgtacgacattgccgacttgtacaaggcggaactgacgataccgctggcgtttgaagcggtcgccgtgggaggacccgagctcgaacgccgggtgcggctcgcgtgccgtacgcattttcacaaagcgcggctgctgacgcgggtgttgcccgacatccagaagcttctcaaggtcgagctcgacgacgcggacgagttcatagacgaccccgcgcggccggtggaatggtgggagccgaagacattttccgccgataccccgatccaaacgatcctttcgttcacaccaggggagtagcaccatgctggtcctgattctcaaacgctgccggccgtctttgcgcggccaggttacccgctggctgattcagccgcagtcgggggtgtatgtcggccacctttccggcaaggtgcgcgacctgttatggcaacgcgttgagaaggaaatcgacgagcgcggcggcagtgcaattctcatccaaccggccgataacgagcaggggtttgcgatacgaacgcggggcaagaccgacaaatccatgcgagacttcgacggcctgatattgccaaaacggccgctggcgcgtaagtaatcagtgacttccccacgcacgcacgtgggggtggtattcatcgccagatttggtgtatcgcagcgcgacttccccacgcacgcacgtgggggtgggtgaggaccgagcagcggcccgg

SEQ ID NO: 857 - DNA, 4475 bp, Artificial Sequence
  Synthetic Oligonucleotide
agtcccacgtgcgaccccgccgcagcccgagacgcaatgggtattgtcaggctgagcttgtacaggtcggccatgtcgtacacaaaggagagctgctttccggtatgtatgaacccgatagccgggctatagccggcggataagatcgccgcatgggacaggccatacaggcacgagttggccgctgagagcgccctgttcaccgggtcggcggccctccaatcgcctctgtcgtacgaccggcccgaccagtcaatgccagtctcctggctcatccgggcataggccgtcctgacccgacttccctccattccgcgaagctgctcgaccgttatgtcctccggcagatcctcctcgaagcgcatccggtacatgcgcttcacaacctggagccgcgtttcctcgttcgaggctaaggatgcctgccgcagaagcctggatgcgctcctggtccctccgacacccatagcgtagaacctgacgttctcctcgccgcaccagatcacgaggcagttgttctcggcaagcaccgcaacggccgcgtgcgtgatattggtgccggggccgagcatgagcacggcgagcgccgccgccggcaccggcgtcattccctccgcgtcgtggatcgcaatcgcgttctcgtgtctgtcgatcctcgcatgctccacatacaggaacgacaaactgtctctgaacttcggcagtaaatgaaggtcctttaatcgacgatcaggcgttacgatcacctcctttcatgggagagctggtcacctgagcggcgccaccgagagcagaccgaagccgaagcccttggcggagccgatgccggacccgagtgttttcgcgaacaggtcagggtccgtcacagccaacacgccttcgtagtctacggacaggtgtttcatcttcattccggtggagagcttcgtgctctggatatccgcccggctgttcacgcggaagtccacaaggcgaaagccagaggcctgactccggctctcaagccacgcccgctgggcctcctcgccggacacgccgacccgcttgccaacgggctttccttcacccggctgcgtcttctggaacaccctcttcacagtagggtttgcccgcagccggaatctgagacgctgtcccgccacgaaacatggatcgaatggtctcacgtccgcggcagcgaggagatgacccgcgttatgaaaggcatatccccaatcgggcttcacggcggactgtacgagaatcacgaccctgccccccggtggtcgctcgatgcgaaagagaaagccacagtccgctccgcgggatacatgaacctggttgtcgccaaactcctcgggtttgaaaggcttgaggaagttcgggtcatgggatttttgggaccggcacggaaacgccatgcaaaggcgctggtgtacgtgatataggttgcgcagccacaaccgccctggacgcggacgatctggattgttccccacgtctatcagcagatgggacaggtacatgctattccacctcctctgcggcaagatgccgacggcgcgtctccagcgagcggaatctgattatctcatctctctttgtgacgatcaggtcacgccagcgtgggtcttcgggattgatgcggtcgatgtccatgccgaggccatactcaatcatagtgacagcatcatggcaaaggcggcagagcgagcgtagatcatcctgcgattcgttcccaccagcccgacgataggtgatatgctgcacggttgttgcaggagatttacagaatacgcaaaggtgatggtcggcctccaaacgagccgcacgctgtttcttgtattctgtgttgttgtagtccgctctctggcgaagaggccttggggtataccgttgtgcgggctctttttcgatcttcaaccctccactctggtccactcgcaacacctcgcggacaacaaacctgggatgatgagccggaggctcgaatgagattggcacatcataccagacaagggcctccgccggagccacggcatcattggtctctggcacccagtctaacagacaatccactgtctggggcgtcgagtcctgtttgagtcgctttcgccagtggatcgagctaagcgccgagagaagatcgtcacaactaccgggcggatgctccaagatcggacgtgatggcggacagcatttcctgcccagatagagcgtccacttgggagcctgcatttgggcctccagccggccaatcaactcaggctcgccctggagcgccaccaggaaagaagcatcgcaaaggtactcgcgccgggtgagcatggctccgggcttggtcccgccttctgcaatgcgcatccgcattccggcgccgaccgtgtgataatcccaccagcgaatgccgcgcgtatcaatacgaacgcccatacgcagggcaccaagctccggcagccacttttcagcagcctcggagcgggaaacgcccatcgccgcgcagagcataccgatcactccggacttggtcggcgcctccgcagtccgcctaatgacaaacttagactcctgatctccccacgcctgaatgggaccttcaaggcgaagaaagagagtgttcgcgttcatcacgccgcctccggggtcacggcaaactgctggacctccttccagtcatagccgatggatttggtcacagcatatatcagttcgtcgagcgacttgacgttgtcgtccgcgacctcgatctcctgattgtcctctctaacgctcagggagtaccgcagattgggtgagaaccagagccgcttcctcggcttgccgtatccgatttcgaggtcatggacgtaccggcctagctcggccatggtctgccgagtaatatcgcggtcgcccacggccacaggatcggcgaaggcattagcgtagttgattggcgtgcccttatcctttacctcgatcagcattccatcgggcggattgtgcgcggcatagctgttctgcttgcctgtaggattggcgagcgccgcaccacggatgaaggcaccgaccgtatgggcggccagctttttgtgattctcaccatagcccttcaggttctcaaccagtgtttcccagtgtattgagaagtacttgtagaagcaggcggaagcaaacatcgcctcgcccacgaggcccgcccctgcgtcgtcgccggggatgtcatcggcggccacaaagtaatccacctccgggcgagcctcatgagtcgaaatcgcgtgggctacctgaagggccgcctcgacggttgtatccttcagtacgcctgtctccagcattctgccgcagagtgccatgtcgggcactgcgacggagtcactgatgagctgcccgaactgctctgccagtttctcatctgacagcccctcaccgttctgcaagagctttgccatagctccaatggccttgcttgtcgtatagaccagcatcttgctcttgtccgcgcttgccggttcatcttcttccgaattcccttgtctgctcttcttcggttcaaatccacagactcggagaatacgctccgctcgcttttgaacatccttgcccttaacctcgtcggcaatcaatctcgccagttgccgtgtgcgaacgcctccgagcagattcttgaactcatcgctcatacgaatgctgcgcttaatgcactggctggagatacgcgagcgcaggactcctccgaaatagcaggacttgggggcacccaagtcgtcccggttcagattcgccgggctgtgattctgaatagcgtggatctcgatcagcattgtcctctcccttcttcgaggtattgctcggcccatttcaggcgggtagattcgcgttcccaggtggaaaggtcgttcgtcagttcgacccagttgactcccagacccccggaagcaagcacgtcaagcgcccacctcagggcgggttcgatctggctcagcggcaggacgagcatcctatcgaacctctgaaggaagcgctctgtgtccgagtttcggttaggctggcaccttctcaactggcaggcgagcggatcttccgattgtggaatcgcgcggaaagcatagagttttgctatcagccaggctacctcccgacgtggcgcgcgctcgttcttctggcgcagtggccaccacagaccggtaaacaggtcgaagccgtccaccgtttggtccagaccttgccctgcgtgcgtgcgcaacaacccgagttcgccggacttcaagtgcgtcagaatcctgatatactcctccgttgcactcacttaccttcctccttcctacccgatcttgccttctgcggcatcttcggcaacacgcttgctatatccctccgtcgctggagcgccgcagtggtgaatcctggcgagagcgatctggcaatcaccttcatcatggggccgtattcggctgcggcctcttgccaagcgccgtcctctccctcaagtagctcgcttacgtttgccgaaaccc

SEQ ID NO: 858 - DNA, 4464 bp, Artificial Sequence
  Synthetic Oligonucleotide
gcgccgtctccccccagctgcgaatccgaaaaccctgttcattgtcgctcgcatgtatcatcacacagcccccttccctggcctggccgcaggctttatcccacagcttatcacgcaccctggccgaaaccctgccaacgaacacccctgccttgggttcaagaaaccaccgtgtcagttcaccccgcaatccaagcggcacgcgctcaaggatcatgaccaccatcatctgcctccgttttgtcaacatccagcggatgcatgcgcccgccttccacctctccctccgccgggtcccataacgagcccggagcggcggcgtcctggtcgaagggagccatgccggccgacctttttggcaacatcaatgccgcctggatatcaggaatgatcctttccagcagccgtgttgatgcgaatttatcccgacacatcaggcgtacccgccgctccagtccgtccctatcttccaggacggcattgaatgccaccgggatagaaatgcctgccttgtaaaggtctgcgatatcgtagacgaacgacagcatcttcccggtatggatgaacccgagggccggggaaaagcccgccgatacgatagccgcatggcagattccgtacaggcacgagttggcggccgacaaggcccggttcacagggtccgcatcgctccatttgtccctttgatagctgcgccccgaccatggcacgccggtctcgcgagcggccctggcataggcgtcccggacacggacgccttccatcccgcggatttgacggagagtcaattccttgccgaactcttcggaaaaccgcaactggtaaaggcggtgcacaacctgcattcgggattcctcgttcgcccacagacgcgcctggtgaaggaaattggccgcgctccgcgtttcgcccatgccgaccgcatagaaccggactccctcctcgccgcaccaggccacaaggcacccgtggtccgcaaggaccgatattgcggcgtgggtgatcgagacgcccggccccaacatgagcagggccagattggcgcaggggacgggcaccctgccggattcatcgtggacggcgatggcccgggcgtcctggtcgatgcggcaacgctctacataaaggtaactccatccgtctctgaatttcggcagaacgtggaggtcttgaactctcatgcagcctcctgcgaacttcaggcgctgaccggcgcaaccgagaggaggccgaagccgaaggccttcccggcaccgatgccgcaaacaagggtttcatgaaaacggacggggtcggtgacggcaaggacgccttcaaaacggacggagcgccgacgcccggtgtcctcccgtttgtctttccggtcgccttcctgcctgttctcgggcctcttacagtagataaagcccggctgaacatcagtggaatccttatcgatggaaaaccccgatacatcggccttgcgtgaaagccagcctaatagttggtcggtcggcacggggacacgctttccgatagattccttttttatatccggtgaattcctgctcaggcgtctgatcgggttcgcaacgaggcagaaccgaaggcgccgccccttcgtgaagtccgagtcgaatgatttcacctccggacaaaccgccagaagataaccggcattgtgaaaagcgtaaccccagtcgggcttcatggcggactggacgaggatcgcggccctgccgccgggcagcggatcgatgcgaaagaggaaaccggaatccgccgtacggtttacacgaacatggccgttgccaaagtcaacaggctgaaagggttttaaaaagtccttatcgccggattttctgtcagcggacggaaacgccatgcaaaggcgctggtggacatggtagaggttcctgagccacagccttccgggccggggccggtcggggttgccacccaagtcaattaacaagcaggacaggtacatttctattccacctcctcagcggcaagacgccgacggcgggtctccagagagcgaaattcaatgatctcggcccgcttttggatgatcaggtcgcgccagcaccgatcttcgggattgatgcggtccatacccatgccgaggccgtactcgatcatcgtcaccgcatcgtggcaaaatcggcaaagggcgcgcaaatcgtccctgtcttcattgccaccggcccgccggtaagtgatatgctgcacagtcgtagccggagccttgcaaaagacgcacaggtgatggtcgtggtcgaggcgttcagcacgagcattgcgatactcagcgtttttataatctgcctgcggtcggggggatgatggagtaaagttctgcgcaggctgatccgcgatactgatgtctccgtctgtccccacactcaatacattacggacgacaaaccggggcgcatgcgatggcggttcgaacgtaaggggcacatcataccagatgagggcgtcatcgggtgcttcgggttcttccggtgtcggcttccaatcaagcaggcattccactgtttgcggcggcaggtcgcccttgagccgttggcgccatgggaccccttgaagcgctgaaagtacatcctgaaaatcgccggatggatgctccaacagaggacgggatgggatgcaagactttctgccgaggtagatcgtccatttaggcgctttcattgcggcctccagttcggcaatcaggccctgtcttccctgcagggcgacgagaaaagaggcgtcgcagagatactcgcgccgcgtgagcatcgcaccaggcttggtctttccctccccctcggcaacgcgcatctgcattcccgcaccgaccgtgtgataatcccaccaacggacgcccggcgagtccatgcgcacgcccatgcgtagtgcgccgagtttctggagccactttttaccagcttcagaacgggaaacgcccaatgccgcgcagagcatcccgattactccggattttgtcggggcctcggccgtccgccggacgacgaacttcgattgctgatcaccccaagcctgcataaggccttcgaggcgcaggaacagggtgttcgcgcccatcaggccacctccggtttttttacaacgaccttttcaacctcctcccagtcatagccgatttctttgataatggccgggatcagttcatcgagcgacttgatattgttttcggcaagaacgatttccttcttgttctccacaatgcccaaaggatagcggaggttgggcgagaaccagaaccgctttgtcggtttgccttatccggtatcgatgtcgtggatgtactggccaagttgcgcgatgctctgcgatataaaatcgcgctcattcttattcactggtttggcaaaggcattggcgtagcttattggtgcatctttgatctcaatgagcattccatcgggcggattgtgcgcggcgaagctgttctgcttgcccgtagggttggtgagcgccgctcctctaatgaacgcgccgatggcatgtgcggccagcttagcgtgattatctccatagcctttaagattttctaccagcgtctcccagtggatcgagaagtacttgtagaagcaagccgaggaaaacattgcctcgtccacatagcccgcgcccgcatcctcgccgggaatgtcgtctgcagctacataatagtcaacttccggacgtgcctcgtgagtagaaatcgcgtgggccacctgtagtgccgcctcaacggttgtgtttttgagcactccggtttcaagcatcctgccactgagcgccatatcaggaacggccgtcttttgagcgattaacttgccaaactcaaccgccagttcattatccttttttccattgccgttctgcaagagtctggccatctcttcaatcgcctcatgagtcgtataaactagcatcttgctcttatcagaatttcctaaagcattttcctctgaactcttcttcgccttcttaggctctaatccacaatctttgaggatcttctcagcacgtcccttctccttctcgcccgtgaccttctcggagatcaatcttgctaattgacgtgtacggaccccgccgagcaactgtttgaattcctcgctcatgcggatgctacgtttgatgcactggctggagatgcgcgagcgcagtcccccgccgaagtagcaggttttgggcgcgcccaagtcatcccggttcaaattggcaggactgtggttttggatcatgtggattccgattagcatgacttccctccttcaaaggtttttaagaaatccttcgcccatctgcaccgtgtggagtctcgttcccaaatggataggtcgtccgtcaatttcacccagtcgactttcaggtcttttgaatcgagcaactcaagcgcccatcgcagggcgggttcgattttgccaagcggaagtaccagcatgctgtcgaacctctgccgaaaccgaactcttgcct

SEQ ID NO: 859 - DNA, 4442 bp, Artificial Sequence
  Synthetic Oligonucleotide
cagatcaacttcaggagtctatcgccggaatcgagcgatggcagaaagaaggatcaaaccttgtgcgcaaggttcgtccagctaatgagaaaaaaccgtcacgaaagcatcttgaaatcccaccaatggttgctgccattcgcccccatgtcgaagagagagtttccgcgaaggcgggcgagataatcggtggtggtgatgaagcatgggagcgagcggcgcaagaatacaggccaatgatggaggtgatcgcaaactctctttcccccggcttcaccacggtggcggtccaacggcggcggaagattgccggcgtcacgccggacatgcggccaaaaacagaatcggcgaagaagtccaagagcaagaaaggaggcggcaagtgacagccacggagcagttcattgacgttttgacaaagctgaaaaccggcgaactcggcctgctgcgccaacacgccggacaagggctcgatgaaacggttgacgggttcgacctgttctcgggcctgtggtggccattgcggcagaagaacgagcgagcgccccggcgcgaggttgcctggctgatcgccaaactctacgccttttgcccaatcccccaatcgcccggcggcacgctcgcccgtcaactgcaccgctgccagccaaacaaggacccggcgaaaaaacggtttcagcagaggtttgaccggatgctggtcctgccggtcggccggatcgagcccgcgctgcaatgggcgctcggcctcatcgcctcaaacaacctgcaactcgactgggtgaaactgacggatcatctttcccaatgggaacgcgaaacgacccgcttggggtgggccgaggaattcctagaagtgagccaaaggagatagccatgttgatcgagattcatgcgattcaaaaccacagcccggccaatctgaaccgggacgacttgggcgcgcccaagacctgctacttcggcggggtcctgcgctcgcgcatttccagccagtgcatcaagcgcagcatccggatgggtgctgagtttaggcagttgctcggcggcattcgcacacggcagttagcgactaagattgcggagaaagtcactggcaaatccgacgtccagaagggtgcggagagaatcctcgaagtttgtggcttcaagcccaagaaggcgaaaaaacaggacgtagaagggaacgattccgacgattctgagaagagcaagatgcttgtctatacgagccgcgaagcgattgaggaaatggccaagcttctgcaaaacgatggtgggaagactgagaaacagctggcgcttgatttcggtaaattgatcagtgaacgtgtggctgtgccggatatggcactgtccgggagaatgttggagcccgacaaggcctccaaggagatatggaaaggacacgacaccactgtcgaagctgcccttcaggtggcccacgcgatctcgacgcatgaagctcgcccggaagtggattactacgtcgccgccgatgacgttcccggcgacgatgccggggcgggctatctggacgaagcgatgttctcctcggcctgtttctacaagtacttttcgatccattgggaaacgctggtcgggaatctgaagggcaacgagaaattggccgcgcacacggtcggcgcgttcattcgcggggcggcgatgaccaatccgacgggcaagcagaacagcttcgccgcgcataatccgcccgatggaatgctgatcgagatcaagaataccccgatcagctatgccaatgccttcgccaagccggcggtccaaggggaacgcgacatcatctcgcagagcatcgcgcaattgggccagtacattcacgatctggataccggatacggcaagccgaaagagcgtttctggttctcgcccaatctccaataccctttggtagctcagataagggaggagaacgggaaaaagactccgcaggaaatccctcttgcgcttgcgaagaacaacatcaagtcgctggacgaactgatcgccgccgtgatcgccgccgaacccatcaagtgtgattgggaaaaggtgcaaaaggagaaggtgcaaaaggagatcgtgaaccccgaggtgacaccatgagcgccaacaccctctttctgcgcctcgaaggccccctgcaggcgtggggcgatcaggagtcgaagttcgtcatccggcggacggcggaagccccgacaaaatccggcgtgatcgggttgctctgcgcggcgcggggcatttcccgacccgccgccgccgactggctcccgaagctcagcgccctgcgcgtgggcgtccgtattgacgagcccggcgtgcgctggtgggactatcacacggttggcgccgggatggaaatgcgcattgccgaaggtgagggaaagaccaagcccggcgcgatgctcacgcggcgcgaatacctttgcgacgcctcttttctagtggccttgcagggggatccggcgtttattggcgagctgcacgcggccatgcaaaaccccaagtggacgctttacctcggaagaaaatgctgcccgccagcggcgccgctgctagcgcgaccgcgtgacggcgaggtgtgggcgaaccccatgcagcatgacagccttctgtccgcgctcgcatccgttccctggcgcccgcgtctggaaaaggatcgcaaaccggaaatattggattgcctgctcgactggattccgacgcctgcacagtccgaagcgccggacgacgcgctcgtctggtacgatgtgcccttgacgttcgagccgccggcgcatcgcccccggttcgtcatccgcgccacattgcgggtgggcgagggcggccaggtgtgcgccggtccccccgcgcagaatcgaactccgccgcctccccgcccgcgagccaactacggcaacaccgaatacaagaaggttcgactggaacggctcgaccacgaccatcacctctgcgtcttctgcaagtcgcccgcgaccaccgttcaacacatcacttatcgccgcgccgggggagacgagaagcgcgatgacttgcgctcgctttgtcgcttgtgccacgacgccgtgaccatgatcgaatacggcttaggcatggggttggatcgaatcaatcccgaagaggagcgctggcgggacaaaatcattgagaagcgccgcgagatcatcgagttccggtcgctggaaacgcgccggcgcaagctcgccgccgaggaggtggaatgatgtatctatcgcatctcatgattgaggtggggagcaacccggaccggccccgccccggccggttgtggctgaggaatatgtatcatgtgcaccagcggctctgcatggcgtttccgaaatgcgagcggccgcgcgaggatccggctttcttgcagccgttcaaagagaaggacttcccgctgctgcgcaatccgaacgctgtgccgaaagacccacgccacagtttcctcttccgcattgacaacagcatccaggagaacagcccgcgcgccatcatccttgtgcagtccgtgctaaagccggattgggactatgccttccagaacgcccgcatgttcctcgcggcggagcctgagagtcgcgaatggcagcccgcattcacggtaggcgaagaactccgcttccgtatcctcatcaacctgagcaagaagaccgcggagagcagagacgggaccgatcttcgtaaggtgcgagagtggaccgatacccagggccgcccgaaatcacaaggaaagcgcgttgcgctgacttgggaagagggccagagaccggaggacatgatccttccgtggtttgcgcgcaaagcagcgcagagcgggtttgagttgcgcgactgccgcgttctgcgcctggggtgggtcgcaggctatctgccggaaaggaaaacgcctgggaaggaagggaaggaaggggagggcgggcatcctggccgccagatgaaattccgatctgccttgctggagggaacgcttgcggttgccgatgcgccgctctttgcccaggctatagcatcgggcataggttcggccaaggcgtttggtttcggcctcctgagcgtcgctcccgcctgagtggatatgccgggagggtatcccgcgaaggagccggctttgaatctgacaggcgggacgcccgtcctactttgggcagccctgtgtttcgtggacacaagagagtgggacaggcgtctcgcctgtcagcagggtgggacaggcgtctcgcctgtcagcagggtgggacaggcgtctcgcctgtcatctgattcgcgcatctgtttggcgcgacacaccgcttgtccctctcccgctgtcccgctcccgttgcgccgctgccgctgtgccacccccgccccggaaagcctgagccatggaccgcaagaccatcaacccccaagacctcccccgtttcagcgacaagctctcgtacctctac

SEQ ID NO: 860 - DNA, 4401 bp, Artificial Sequence
  Synthetic Oligonucleotide
aaacaccaatgccattaccggttcacccccacgtgcgtggggacagcgtgggagaggggatgagggggtggtgaaataacggttcacccccacgtgcgtggggacagcgctgatgcaacattgcccgcaccgcaagcacacggttcacccccacgtgcgtggggacagccttccctggtccggggcgtgggcaaatgggaacggttcacccccacgtgcgtggggacagccagaagggaaattaccgttggaacgaggcggacggttcacccccacgtgcgtggggacagcctggtccatatatgccggatttctcaaaattgcggttcacccccacgtgcgtggggacagcaccagggcctgggtagcctccgggtcgatcaccggttcacccccacgtgcgtggggacagcgtgcaatcacatgggtcttccgtctcatagtccggttcacccccacgtgcgtggggacagctttctgcacattatcgccgggcagtatgtccccggttcacccccacgtgcgtggggacagcaaggcccagaagcggacggtttccgcggctaccggttcacccccacgtgcgtggggacagcttttcggcccaatctttctgaaccggagtgatcggttcatccccacgtgcgtggggacagcgggattctcccgcgccaggcctcccggcccttcggttcacccccacgtgcgtggggacagcgccgtgtgcgtcggcatcgatgattacaaaaacggttcacccccacgtgcgtggggacagcgtaccggaggaaatgcaggcgcaggagaacctcggttcacccccacgtgcgtggggacagcttggaaggatgaggatatgaaggtcgagaccgcggttcacccccacgtgcgtggggacagcccttttcaaagctgcgctctacggcacccgaatcagaaaaaggccctcgaagtcttccaccagccgggacgggtccccgtgcatgcggatggcaaacccttgctcccggttagacgtgtggatcatggtgcagccaccgccccgggcttccttgcaaaccttctcccacaggagctcccgcaccatacccgaaacgctgcccacgaataccccggccttgggttccagcagccaccgggtcagttctccccggagtcccgccggcacccgctcaagaatcaggaccaccatggtttccctcctcaggctccgggtcgccgaaattttgaccgccggccagactgccggcctccggatcccagaggtccccgggcagggctgcatcgccgtcaaaatcagccccggcggcgattccggtcttgttcttgaggtccagggcgaactccaaatccaggatgatccgcttcaggagtttctgctcattaaaggcatcccggcaggcctggcgcacccgggtctccagctttagttcgccccgggccgtctctccgaaagcaatgggaatagagacccgggtcttgtatagatcggcgacgtcatacacaaaggagagcatcttgccggtatggataaaccccagggccggagacaaacccacggcctggattccagcctggcagatgccatagagacagctattgcccgcggagagagcccggttcaccgggtcggccgcgtcccaggcgtcccgccggtaggcccgcccctgccaggggacgccggtctcccgggaggcccgggcgtaagcctcccgcacccggaccccttcattgccgcgaatctgctgcagggtgaggttatccggcaggggctccgggaagcgcatgcggtacatccgcacaactacctggaggcgtagttcagggtcagcccagaggcgcgcctggtgcagcaggttgtcggcgttgcgggtcaggccctggccgtgggagtaaaagcgcaccccgccttccccaacccaatacaccaggcagccgttgtcagctagggcggccaccgcggcatgggtgatggaggtgcccggaccgagcaagagcaaggccaggccggcgcagggcaccggcaccttgcccttcgcgtcccagaccgcaatggcccgggcctcctgttcaatcttgcagtgctccaggtacaggtagctccagccgtcccggaacttggggaggatgtgcaggtctttgattctcatggcgcttccccaggggctgagttttggcagagcgccagcgaaagaaggccaaagccgaaggccttgccggggccgatgccttggataatagtttcctgaagaagagaggggtcggtgacctgaagagtaccgtcgtatcgaacggagcgcagacgttgccctttatcggtacctgtctttttcttcttcacatagatatagcccggctgaacctgggtgcactcctccctaacagagaacccagccggttcggcccggcgcgccagccagtcgaagagttggtcattgggcaccgggacgcgtttacctatggaggcctctttcaccggctgtccgtctgcttcgagtgagcgccttgaaagccgtctcgttggattcgccgccaggcggaagcgcagactctggccccgggtgaagcagggagcgaaggattgcagttgcgggggggcggccaggagataactggcgttgtgaaaagcgtagtcccagtcgggcctgaccgcggattgcacgaggatcaccgcccggccgccgggcaacggatcaacgcggaaaagaaagccggaattctggttacgcggagcatgaacaatcgtcaaaatatggggaccggcttctgacttttttttgctcttatcggcaaagtgtcgttgttctggaaagtcgcagggttcataaggcgccacaaattcaggatcgctttgttttctcggatcggacggaaaccccatgcacaggcgctggtgcacatgatagaggttgcgcagccacaaacgcccgggcctggggcgatccggattatcgcccacgtcaatcaagagagaggacaggtgcatagctattccacctcctctgcggccaggcgccggcggcgggtctccaaggagcggaaccggatgatttcgtcccgcttccggatgatcaggtcgcgccagagcggctcttcgggattgatgcggtctaagcccatgcccaagccgtattcgatcatggtcacggcgtcgtggcagaggcggcagagggagcgcaaatcttccggggcttcatggcccccggcccggcggtaggtgatatgttgcacggtggtggccggagacttgcaaaagaggcacagatgatggtcgcggtcaagtctttcctgccgccgcctgcggtattccgtgttgcgataatcggcgcggaggcgagggggcgcaggcgtgtatttctgcactggctcatctacaggcctcaccttgctgtcgccgcccactcgtaattctctgcgcaggaggaagcgggggccatgcgccggggggtcgaaggaaaggggcacatcataccagacgagggcgtcaccgggcgcttcgtcctcttcggacgccggctcccaatcgagcaggaaatccacggttggcggcggctgatctcccttgagccgccgacgccagggaaccgctatcagcgcggcaagcaaatccgggaaattgtggggctgttccttcggcaaagattctagcaaagggcgagacgggggacaggactttcggcccaggtaaagtgtccattggggctttctaactgcttcctccaactcgacgatcagccccggttccccctgcagggcgacgaggaaagaggcatcacagagatactcgcgccgggtaagcatcgctccgggcttggactttccctcgccctcggcagtgcgcatatccatcccggcgcctactgtgtgataatcccaccagcgcaccccgggccggtccaggcgcacgcccatgcgcaaggcgcagagtttgggaaaccactcatcactggcctttggacgggaaacccccaatgccgcgcaaagcatcccgatcacgccggacttggtcggagcttcagatgtccgcctgacgacgaatttcgattgctgatcgccccaggcctggagagggccttccagacgcagaaacagggtgttggcgctcatcaggctacctccggatttaccaccaccttctggacctccttccactcatagccaagttccttgatcacctcagggatcaattcttcgagcgatttgaggttattttcggcaagggcgatttccttcttgtcttccacaatgctcaagggataacggagattgggcgagaaccagaaccggttcttcggcttgccgtatccggtgtccaggtcgtggatatattggccaagttgggcgatgctctgcgatatgatatctcgctcgctttgactcaccggtctggcaaaggagttg
